United States Patent Application Publication US 2004/0123343 A1 - sequence listing, part 2

SEQ ID NO: 3190 - DNA, 1124 bp, Oryza sativa
  Clone ID: PAT_MRT4530_102895C.1
atgagtccagagatagcattgaacacaggacaaacaacctcaattctatctccactgatccacaaagaaatcaagaagcgaacaaaaaaagcaaggcactgcatttccctgccactgctgagcagtgagcacaaatcacagacacaaatggaagcagcagtggctactccttccttgctcttctctagcccaacacccaggaggccttcctcctgcttgtcactgccgcctccttgcagcagcagctacgcctccaatggggcgaagctgcagcagccgcggctgcagttcgtcagtcagctaaccagcagaaacagcaacgggagtggcagaagaagcatttccattttgtcgctgaggtgctcttccagtggcactgacagcgcgtcttcttccgccacttcagaaagatgggttcttgagcctgcaggagacggcgattggcgtcatatcgggtaccgcgtcgcacgacccggcggcttccagatagcatccgaggcggcggtgacggtgggtcgtgttcctgaacaggctgacatcgtcctgtctgtcgcaacaggcgacatccacctggccatgttccgtgtttccaagatggtcgtggatgtgcccagtgacgccagtggagctgagcaggaagcagctgagacggctcaagtatcagctgcagcccaacagaccaattaaggctcaagtatcagctgcagcccaacagaccaattaattagcgacctccatgtgctgcttgatgcatcaagacagctcaagaagaactagcttatcagtgctcccaaaggccgacatgaagtgcatatgttacgatcgacagtctcccttgcaaataagcgcatacatatgttgtgtgataggaatgtcacagagcaacaactctggatattaattaatagagggagcgcacataatggtagccccgtgatcaacttaaaatgcatttatcaagtaccaaagatgccaatattacaagtacaaaagtgtagcatgccaactgcgagactgcatgttgaattgaacgatatccgactgcaaatcaattttccgagttgtattcttcgcccaaaagatgtgcctggcactcgtaaaacacttgagtttgtcgaacgatc

SEQ ID NO: 3191 - DNA, 269 bp, Oryza sativa
  Clone ID: PAT_MRT4530_102896C.1
caaaatctttcgaatctttcgccgtctgcgagcttgcacaactcttcttcctaatcttccgccgcgggcggcgacggcggcggcggcggccctggcggcggcggagcagagcgcgcagcagttcaggggccaggcgaggctcccggggtttgcggcgccccggcggtacgacctgcgggtcgtcccccacctcgacggttgctctttcacggcacctgcggacgtgtccgtcgacgtcacggcgaccaccagggttctcgggctccacg

SEQ ID NO: 3192 - DNA, 453 bp, Oryza sativa
  Clone ID: PAT_MRT4530_102897C.1
atggctggggagacgggggaaggtgggggatcccattcccaacctgagaagcagccgggccaagcggcggcggcggcgtccatggcggaggcggaggtggaggagctgcccaaggccatcgtgcggcgcctagtgaaggagaagctcgcccaggtcgccgccggaggggccgaggtcatcgtcaacaaggacgccatgtccgccttcgccgagagcgcccgcatcttcatccactacctctccgccactgccaatgacatgtgcaaagaatcaaagaggcagacgatcaacgctgatgatgtcctcaaggcactcgatgaaatggagttccctgagtttgtagagccccttaatacttctttgcaagccaaggaggtcggagatttaaactccgaccacccctctgatgctctactgtgttcaatcctaagcttctcataccggatctggtaa

SEQ ID NO: 3193 - DNA, 447 bp, Oryza sativa
  Clone ID: PAT_MRT4530_102898C.1
tttagaagagctatgacgtcgcatgcactgcgttgtaagcttggatcctctaaagcggcgctccgccgcacggagctcgtcgctgctcgcggtagaagaagacgggaggtagatgagtgagcatggctgctggtgaccacgccggtgatgagtgaacagccaccgaagctccggaagctgagtgttcgacgagccgactgtgtgctgccctggctctgtgcactgctgcctgtgtgctcgcctgaaccacttcttctcgatcttgtgccatcttctccccctcctgccagctgtcagtgatctgccctgtgaactgtcctgcaccatctggtgacctctcgggaacactgaaccctgaagcctgtctggtcttgtagatttggtccgaccatggttgtagcctgttgcagtacttgcgagagtgaagagcttgagtgtaggggatct

SEQ ID NO: 3194 - DNA, 690 bp, Oryza sativa
  Clone ID: PAT_MRT4530_102899C.1
atgtcgacgacctcgccgagggcggaggaggacgcgaaggagacggtgaagccgatcttcatcacgctcaaggtgatggaccaggaagaccggaggatccgccacaccatcaggatggccgacaagctgcaggtggtcatggacatgtactacgccaaggcgcccgatgtcacctacggcacggggaccttcctcttcgacggcatacggctgaagggcgacatgacgccgatggggctcgagatggtggacggggacactgtcgatttcttcccgatagctaaaacaccggaggcgatgtacggctggtctggcatcccagcggcggtgaaggtggagaaggagaacgaatggaagacgccggcgacttgggaatggaaggcgccggcgaccagggtggccggggaatacgtcacgctgaaggtgcagggcaccgacggccgcgccgtctaccgcaccatgctgcggacggaggagctgcagggactgatggacttctactacgaccgctcgcatggccgggtgcagcgcggcacgggccggtttctgttcgacggccgccggctgcgcggctggcagacgccggcggagctccagatggaggacggcgacgaggtcaatttcttcgaggagttgatcggtggcgccgccggatctggatgggatcccccatcgtcgatcctcgcgtag

SEQ ID NO: 3195 - DNA, 527 bp, Oryza sativa
  Clone ID: PAT_MRT4530_10289C.1
ctcccactcctcccatctcctactccctatacctctcctcttcctcctcctcgctgctcctcctcccatctcccaaccccggtaacagcggcggcctcggctagggcggcggcatcggttagagcggcggaggcagcggcggcatagacaagtgcggtggcgatatcggctagggtggtggtggcggagcggatccgtcgccggccaccatggggaggccggatccatcgtcagtgaccgcggggaggccggatccttcgccggccaccgcggggaggccggatccgtcgcctgccaccgcggggaggccggattcgtcgccggcgaccgcggggaggctggatctatcgccggccaccgcggggaggccggattcatcgcctgtcactgcggggaggccggattcgtcgctggcaaccgcggggatgacagcggcgagcctcgggcaaggcagcgatgacgacggtggtgacagcggcggcggtcactggattcgggcgggtggaagatccgcacgcgaaaactga

SEQ ID NO: 3196 - DNA, 423 bp, Oryza sativa
  Clone ID: PAT_MRT4530_1028C.1
atgggatcaactttaggagccgacaacttcgccttcccaccagggcaggtctactattctggcagcctcgacttcgtcatcgacaacttgggtaaattctctctccttgactctgatccgaaccaatcgaggactcggtccgagtccaatcccggcaaatccaagatgggatctagggaggtcggggtcatgctacaaccactcgaatcctacagctctacagagtccaatcctggcaaatccaagatcggatctagggaggtctggatcatggtacaaccactcgaatcctacagctctacagacatcgtcaatagctacagtctttctgaaggctacaacaacttcgacaccgagagcatcaatagctccgagtacaccaatgattataccccgctttgtccttttactcatccactttag

SEQ ID NO: 3197 - DNA, 596 bp, Oryza sativa
  unsure (1)..(596): unsure at all n locations
  Clone ID: PAT_MRT4530_102900C.1
tctcccgctcggatccngtcgtctctcagcgccccgctcacgctgatccgtggccgccgacgacgggagggtccagatccggtggtgtccactgtggtcgcggcttccctgccaccgccgtttctgcacgcgcggcccatacaccgcaccctgccgtctccttcttccccgtgttagtatgcctttcatatgtttttaatgtatttgtgctgttcttataatgtagttttgcacttatgatagcatgttacttgtgcttgcaaggttgggtgggttgtcactgtggttggagctggttgttgagctgattggagtcagagatggtggccaagatggagaggagatgtcacccgaagttgtctcggaagccgcaatgaaggcggagatggaggcggcaaggtggggctgctggcgttggatgttgcactcgcgttcccgcaggccacgacgtcccagttcccgcccgccggtgagacctcctctcttgctttcccggtgttctcaggttctcggtttcccattattttaaataatgagatattatgattgggtgaaactgtcttggccatctaattggagtatttgagagaggtgtg

SEQ ID NO: 3198 - DNA, 181 bp, Oryza sativa
  Clone ID: PAT_MRT4530_102901C.1
gccctcgatcatcattagagatcctatacaatcatcgacttttaccaaaataagatggctggggcctggtacttcatcggcggagctccgccgtccacttccaccaacttcctggggaagaagctgaagaaacagctcacaattaacggtgaactaccatgcgaagagctccaacatcaac

SEQ ID NO: 3199 - DNA, 216 bp, Oryza sativa
  Clone ID: PAT_MRT4530_102902C.1
atgccggtgtacttctccccagatgccgcattagcatcatcccaatcaccaaatggaggttcaaagcctctgcctccttgcttcaacctgctccttcctggagtcactgggacacggccatcagatgaagaggccttcctatctggagtctgcatcccagctgacctgtacctggaccttggagaggcagcagcagcagctgcaacttctctgtaa

SEQ ID NO: 3200 - DNA, 506 bp, Oryza sativa
  Clone ID: PAT_MRT4530_102903C.1
tagattatttcaacccatccggacaggaataagcctgtgcttaactgaagtttcttcagcaagcctccttcggcctgttcagtattggaatgtggtgtcacaagacttcatcagaaaagatgcaaagaaaagggctcaggaccctcttcttgctggtctgctggggaatttggacggatacgaaaccatagaaacttcgagaaagagggatggtcattcagcgaattgtcgacaattcttttttatgagatcaagcacgtggaccagctacagagaaaaaaggctggtatagttctctcgaagagagagctgttttttttgttagtttgtaactttgtatagcctctggcttcagttctattttgttccctcctatcaaaattcgtacaaacagacagatcatacccataattacaagtaccgattatgttggttatatcttttttacaattacacaggatatatattttataaattttggttgaataaaaaaaaaaaaaaaaaaa

SEQ ID NO: 3201 - DNA, 849 bp, Oryza sativa
  Clone ID: PAT_MRT4530_102904C.1
atggcgtcttccgcccatatggctgccgtgctgaacctgccctggggctaccgcttccgccccagcgaccgccagatcatcgccaactacctcggccccatggcgatccacggcgccgactccctccctcagaggggagacgtcgtggagggcgtggacgtcttcgccacgcgccctgccgcgatccccttcgagccgcggcgccacgtgtttgggcgggacgaggtgcgcgcctacttcttcggggaccagcccaccgacagccggggccgcgaggtgcccggaggtgcatggcttccgtgcggcggcggcgacaaggcgtactccggcggcgcggacggcggggaggcggtcgcgtacaggcgcaagtacgagttccgcgccgccaacgaggaagccgaccgcgcgggggaggaggcggcgacgccggcgcggccgagatggcggatgaaggagtaccggctcaacaagagcgccgccgagttccgccgcgcgtacgcgcagcccaaccccaaggcgaacatggactgcgtggtccgcgagatctacacgaaggcggtgccacctccaacgccaccgtccggccgctccggcgacgaggaaatgcaggaaggctccgactactccgtcatggacgaggacgagttggtggactacttgcttcagggcttcgaggacggcaacttcgacgaggaccaggaccagcccgcagcggcagaggacggcgactactccgacgaggacgaggaccagcccgcggcagcagaggacggcgactactccgacgaggaccaggaccagcccgcggcggcagaggacggcgactactccgacgaggatgagccctga

SEQ ID NO: 3202 - DNA, 2512 bp, Oryza sativa
  Clone ID: PAT_MRT4530_102905C.1
atggccgacgccgacgagctcggcaggaggctcgccgccgtcgcggtctccgactccgacagcgcaaacaacaacctcttccaggtgatgcgcgccgtggaggacgccgaggccaccatccggcagcagctggaggagaacagccgcctcaaggacgagctcatgctcaagacgcgagagcttgacagattcaggtcagaggctaccaagcccacttctcttgccgacaccttttcaacttctccccatgggacctcaacatgcttcggtaccacttcctcgtcgctcaattccaggaccgctctagctgatcagcacaatggactctttcaccacactgaccaaatgctgcacgatgccatcaagctaaagtacctagataccgaccagtctaatggaatgcccaggaaactatctggggagcagagtgcgcccgagagtcgtgtgccgtcgcacctctcgaatccgacatctcgctccctgtctccaactaggcatcgcaaaggagagtatgatcctaagttcaatctacctggacagtgcttattgcctgcttcagaggcaaactctaccatcatgtggaaacaggatcttcttgctaaggttaaagaacatgaagaagagatcgcacagctcagaaggcatcttgctgactactctgtgaaggaagcacaaatactcaacgagaaacatgttttggaaaaacgcattgcatacatgcgaatggcattcgatcagcagcaacaagatttggttgatgctgcatcaaaagctttatcctacagacaagacattattgaagaaaatatccgtctgacatatgccttacaggcagcacatcaggagagatccacttttgtatcttctttattgcctcttttgacagaatataaccttcagccttctgttcttgatgctcaatcaattgttagcaatctgaaggtcctgtttaagcatttgcaagagaaactcgctattactgaggagaaactgaaagaatcacaataccagcttacaccttggcgagctgaatcttcaaacagtacaaatattcctgtgcaggcgccttctcatcctcctggaaatgcaatagttaccactagcaaagccaaccttgacattgtgccccagcaagcatattctcatgtacaatctcctatgtcctctcctgttcgtgctagacgtgattgggatctgttggggaatgagaaccatcaggctatcccaagtgaggttactgcagtaaatacagagcatgaaaatgttggaaccacctctccgtcaagcagcaaccaaattaagaaggatgtagtagctcaaggaactgaacatgattctcgtgctgtccgatttaactttgaatccaagaatcagaatccgtcattcaaggacctcgttaggaatgatgtcccagaaaatctggagggagctgaaacgcatatttcacaagaacctcctgcacaatggggtccggagggctcacctaatttggcatctggtgttgatgatgcgaacccgccatacccttatcttcctactgtccttgaagagcctagttcttctttctctgaagctgcagatgatgacccactaccagccatagaagggctacgaatcacaggtgaagcttttcctggaagagagcttcaagcaagtggctactctatcaatgggaccacaagttgtaattttgagtgggtacggcatttggaggatggatcagtaaattacatagaaggtgcaaagcagccttcttatttagttactgctgatgatgtggactctttactagccattgaagtccaacctctagatgaccggaaaagaaagggggagatcgtgaaggtttatgccaatgaacaaaaaaagattacttgtgatcctgaaacaaaggagctcatcaagaaaattctttcaattgggcatgtatcctatgaagttctgctgcctgttaggtttctagatatgtgggaaccagctgtattggcaataaagagggaaggttacagcattaagtgtaatggccagcgtggtgttgttattacagaaaaattccagcaagccactgctgtttgtttcgacattgagatcaatatcccatatgggcgtcctactgaattttctatattggctgctgatggtgctgaatacaatctcaagcctgcagagaatgcgccatcacgagataccattgttctaatcttgaggctgttcagaatgaaggcagttgagaagagtaaaggaagaaggaagggcatattcttcaagtagattgttcctgctgccagtttgtaattggattccatggtgtttgttgtttcttgtatgtatgtagagggagctcgaatttgagagttgagtccgctgttgtaaaggattcgtcgtcattcgttcaattcataggctcaaattttgttgtaaagcaagctgaaggaacgatgttgcaaacaaaatactcgtgcattttggcatggctaagtgcagttgaatttgtatgtatatcactggggag

SEQ ID NO: 3203 - DNA, 1380 bp, Oryza sativa
  unsure (1)..(1380): unsure at all n locations
  Clone ID: PAT_MRT4530_102906C.1
agccggccgggctcctacctccccggagcccgacgagatcccgccaccgccacctctcctcctcgccgcgcccggcgacctcctcctccacatgctcctccggtcggcgccgcgccgcctccaccacctccgcccgcaccacctctctaccgccgccgccctcgcggcggcgccgccgaccccgaccgagtggaccacggcgccggtcgcctccgtcggcgcggccaccgccgacgcgtccctcttccacgtctccctcgacctctcctcccgcgccgacctcctcgcctcccacgtcgccgccggccagttcctccccttccgcctccccgccgcgccctacccgatcttcctcgccatctcctcctcccctcccgcgccgggcctcgcgacctccttcgatttcctcgttaagcgactccccggcaccccctccgcgtgcctctgcgacctgcgccccggcgacctcgtccacgtcggcggcagcgtcgtcggccgcggattcgaggtcggcaggatcgctgacgcgcgcgatgtcctcgtcttcgccaccggatccgggatcagtccaattcggtcactcatcgagtcaggttttggcgaaaatgagaacattgatgtaaagctcttttatggggttagaaatcttcagaggatggcatatcaggagagattcactaattgggaatccagtggaatcaaaattatacctgttctctcaagacctgatgatcaatggaccggcgagcgaggctatgtccagcagaatgctttttcaaggatgaagaaggttgtaaatccttcatccatgggggcaattttgtgtggacataaacagatgtctgaggaaattactagagcacttgttgctgacggtgtgccaaaagatagaatcttaacaaacttctgactgcccctagcccactagaacacnattatcagccttctagatgttgtatccttattactcattacagtgattattctttacagcaagcgcgatggaaactcgcaacagagaaacagttttgtactacttacatataggggcttctttttccaattttcctgcacgatgcaacatgctgcgctgtaatctggattttgccagcctgatgtatcaatatcaacacttggtgggcattttcgcatttgaaccgaaaggccctagttcatacagttttgtacctcctgaaacaatacccccttggaaggtgttgatatactccaaattacaaaagctagctcaataaaaggggtagagatgagtggcctcatgtatttgccttataaaagaggtagagatgagtggcctcatgtatttgccttcagttataatttgtcttcagttataatttgtgtattatttccccgcaaaaa

SEQ ID NO: 3204 - DNA, 381 bp, Oryza sativa
  Clone ID: PAT_MRT4530_102907C.1
atggagttgaagttccatcatccttggacaaatatcaagaaaggcaccaaagttcacaagaacaaagagagtgagaatcaaagaactgatataccaatatgtcaagttagctgcttccctggtccggagaggaggggaaagaagccggtgaagaactcgaggggaaagagtggccctctctcagtggaccttgagggttacagggtgcttactttggtgcgagcgaaccgtggaaaggccaagcacgagacggccatcgcccaccggacagtgactgaccctaactgcgagaaagcaacaaagccgtcaccaagaaacacatgccacaaaagagaagccatcaattcccttgtccccagctctaatctctacatgaggtag

SEQ ID NO: 3205 - DNA, 354 bp, Oryza sativa
  unsure (1)..(354): unsure at all n locations
  Clone ID: PAT_MRT4530_102908C.1
agccgccacactcctccacagccgccccctcctcctcacactcccacccacccccagcgcgccgcacaccacctcctcaccaccaccacccctacctctgccgcatccgcctgctgccaccggcctccgtcacgtggtcacgcctccccggcctcgtcgcggccttcctcctccctctccctctctgtcccgaggcagcagcggcgggtcagcggctcctcgacccagcggctgcccagtggcgcggcggctcggganctccacagcggcggcctccctctcanncctccctctcctctcatcccctatgcgatgtaatttattttgtgaattccctcctcttctctcatctta

SEQ ID NO: 3206 - DNA, 362 bp, Oryza sativa
  unsure (1)..(362): unsure at all n locations
  Clone ID: PAT_MRT4530_102909C.1
ccactcttgcacccacgcttccggcngcgcttnttctgggggtnaggctcctcgggggggggggggggggaaactccttctacacctactgcccgccggcaccgagggcgaggccgagcaccgggtcttgcccgggcggggcgttgaatctgggggtgtgcgccaacgtgctggggctcatcaagggcaangtcggcgcggtggcgccttacgagccctgctggtcgctgctcaacgggctcttcaacctcaacgccggcgtctggctctgcaccggcgtcaagggcaacgtgctcggcatcaagctcgacctccccgtcgacctcagcctcatcctcaacaactgcggcaagatctggcca

SEQ ID NO: 3207 - DNA, 1301 bp, Oryza sativa
  Clone ID: PAT_MRT4530_10290C.1
tcaagctgagctcggtggattccggaggagctccttgccgaccgtgaagccgccgtcgacgacgaggttgtggccggtgacgaacttggcctcgtcggacgccaagaagacggccgccctcgccacgtcctccacctccagcgacgccccttccagctcctgcatctccctcgtcaccatcctcctcacctcctccgcggtggccgccgggaacgtctcggcgatgatgcccagcgccatcgccgtcgggatggcgtgcggcgagatggtgttcacccgcacgccgtcgcgcgccagctgcctcgccaccgtcctctgcaccatgccgacgacggccgccttcgacatggagtacgccggcggccccatgtcgccgagcaccgccgtggagctcgccgtgcagaggatgcagccggcgcggcgcggcgccatgacgcgcgccgcgtgcttgaggcacgccaccatggaccgggcgttgacggccatgacgcggtcgtagtcgtcgaggtcgagcgccgcgagcgtggccggagccgcggcgccggcgatgccggcgttgctgtagacgacgtcgaggcggccgtggcgcgccacggcgaggtcgacggccgcggcgacatccgcctccaccgtgacgtcgcagtgcgtgtacgacgcggcgtcggcgccgagctcggcggccacggcgcggccgaggtcgtcctggatatcggcaaggatgaccttggcgccgttcctgacgaactccttcgccgtggcctcgccgatgccgctcgccgcgccggtgatcacggccactttcccatccaactttctggagcttgacgccgacgaggagaagaggcgatcggccaagccggaagagaacatcggagcagctctgctcttccccctgcaacttgtttacgtgaaaaatgattgaaatcatcaaaatttcacggtttgcacgaacgttttttactggagaagatgcgaacctgagaagtttgttggctgctgcgttcagcatcatgaacggactcctgattaccgatgcttcacttccaggagttgagagatctcagcagacagtagtctgtactatagatggccatatggcccgcgggccgacggcctggcccaagcatggcacggtctgacaggtgtcaggcccgtgctggcccggcccgatagttgggtcgtgcgcatgaacttcagggaggctaaagtagacttatttcaaccatatgtatggcacggtcccaatacgaatgaggaaaaatatacttatttcagttatataaaaaaaaaaaaaaaaaaaa

SEQ ID NO: 3208 - DNA, 449 bp, Oryza sativa
  unsure (1)..(449): unsure at all n locations
  Clone ID: PAT_MRT4530_102910C.1
attatttatttttcggtcaagctaacacagcnagaatctcaacttagtgaagaaccatttgttagtaccagcattgaacttttgttggaattgctcccttaatttgattctgagctggtcttctggcggcatccaaagcatcatcctttccagcagcgaacaagttctggcttcaaattccaagtgtatctggtgggcatgaggggtgtagttcatcacctgacgaaaggcttaacgcgggttctgcgagaaatcttctgcgggtcatggcttaggaccttcaagggggcctgtcgacaccagcgaggatggtgaccgtaggcgcgctgggtagtgtaccctcatcgaagttcttcaaaataacggtttacggccagcgaattaccggagtaacgatgacgacttaccaggcttcaaaaacttgacatttcctcggccgaatctggctc

SEQ ID NO: 3209 - DNA, 346 bp, Oryza sativa
  unsure (1)..(346): unsure at all n locations
  Clone ID: PAT_MRT4530_102911C.1
gggaggtggggatggcggcagcggtggcggctatgagccagcctatggcggcatgggcagctatggccaaagcttcttcaacatcagctatgcgcgcagccagccgcctccgccgtccgtctcatacgagcaccggctgcaggccaccgatgccagggtccactactacgccggagaaggcaaccctgaagcacccccactcggtagtgtgcggtgggtatggttatccgccgcagggctcgagctcttacaaccagtatgcgtacggtggttactatggtggtgcttctcctccgcctccggccggtntaccttgtacctcccgcggggaggttgcgcgtggggg

SEQ ID NO: 3210 - DNA, 3274 bp, Oryza sativa
  Clone ID: PAT_MRT4530_102912C.1
gatccagaatcagaaaaatcttttgaagttgaactggcgacaggtgcagcagttacagaattcagggaaaatcaacgaatcgaatcgagggggccaacgaatggcaggaaagttttccttacggcgctaatcaccgtcagagttctcggtccccctcaccaataacgaaagaatcaaccaagacaacaaaagaatcaacggctgatcttcttcttcttcttcttcttcagtgggcgagcttctttgctctcccggtggaaggctgggcgtcgtccttggcaccgggcccctcgggcttgcgagcccacgccggggcccggtcgggctcgtagcggtagtcgtagaacagctcctcgcccgcgctgatccgctctttggcgaagatccccaccctgtgatcgcctgctaccatgatgaccttggcgtagcagtttggatcaggggaatggttggcgaacttcagcttgtcgcccattctgtaggcatcaagaacgtactcattgttcaagttgaaaaggaacgatgaattctcacggtcatatatctttccacgcttgtcagcttctttatgggagataagctccccagtgtactcgccaagatactcgtgcttcccaacactattcttgaggaaagctccccagccagaaacatcagatctcccaagtaagaccctttgttgctgtttaagcagcagtttcatgttccggcattcataattatcacctctttggttagggactcccaatgtaccatcaccgcaccctacccagcagtttctacacacatcaggatcacattccctgtcagcagcaaagcatggacactgccggctgcgacactgactctttgcgcaatggcaacctcggaagcgattcttgcacattttcgggcacccacagtatttctcacagcaggtaccatttgtgagacatggacattgcttcccacatgcagactggcaaccacaaggagtgtattgtcgacaaggctgatccttcctttctgtaatccttttccttataaaatggtagcctgcagttttccaggtgtacttcaaacggcggacccttcctcgccttctcacaaatcttgatcttgtccgtaattcattacccttcatatatcctttaacaagagaatcaacaccactaagagctccagatgcactgctgttttcaatgtaattcatatactgaaaaacatctgtgcatgttttcatcccacccagaaggttccgagcaattaaacaactgttctttccaaaaatctctaatcctttcaatagaagcccttgctcaatcactttccaggacctgccatgagcttcttgcctgcatatactctcatcaacacattcctctttccttgaactatcacaaccatctgttgctgaatgttcattatttgtatcctccattgaatcactctgagcatccacaaaagatgagttattctccatttgaagtgtgcccttctttctaaaactccttgtgcttggagaattacactgtgaggatacaacagaatccttaattccactcctagtatcagatctaagcttcatatccctaggccaatggcatccattaacaatagaattagagtccggtgacatttcctgttgcccctttttcacactcattagaattctctcagcaattcttctgttagtacttttcttgattccaccttttgcgccaagcttattttttgagaggccaggagagtgttgcggggatttattgcttaacagttgtacttcagactcactgctttctgaggaaacccttgcagttgaagaactttcactttgttgagattttgttttctgcccactagaaccaagctttttcttatttgaccctatctgatcctttagattgtccgatgttggctcctcaacatcaacaagcaaatgagaatcaatctccatgatagcatctggtttagagaccagtttgtaacagtgaataccacatggtgtaccctcatccgagctgcacaatggtgcctgcttttcagtcggaaatactaaatcttgagaacacccatgtagcttgcaatcaaaaaccaaacatcggcgacaaaagagattgtcaaaggaatccaatgctgcatccagatctttatcaccgtacacgtcttccattttgacattaagttcagacactttcttggaagaaccctcaggtttctccccttgtaggatctcatacctggcctttatatcatcaggagccctttcgatatctcgagctagagtttcaagcacagcatcagacatgccacattcttgaatggtcatccgaattatgcaatcttcagaatccttgaactcctttttctcttcctcgtcctcaacagcttcatcttcactatcactgcaaattaaagcttcgccacagtttgtatcatagtaaatccttcgacgaccaagtacagattggtcttcttgcatccgctggttcctgtccaaaaatatccaagttgtatatggagggagtgttgccacttctggtagtctaatcggacggacagaattcctcgcggatagatttccacccacaataacagtcgatgaacactcatcttggcaattggcaccttcactttcatcaggagatgactcacgactattcacagcacacagggcatcttctttcctctttgtgagcaaattcgagactaaatctgtactgttggatgtactagtttgcctattttttgacaaattgtgagagtgcagtgtaatcgggctaagcttaatgctattctcctctacccttttctggatgtaaacaaagcggtccgatgtgattttcttcttcagcgaatcaataacacatagaacatagcccgattcactgctcccttcctcgcaaaacatcggctgcggggacagaacaagcttccaggctcctccctcgctggcccacctcctgcatcctcgtccccctgcgccgcctctgctcctcctccgtcccaccccaacggcggtggggacgacatgatgcgcggcgcggcgacaatccaccgtgaggtccagcagcggcggctcgttcgggttccacacggcggtggacgcggcgcagcatgccatcgccaccgggcacgtggagaccgagggcgcagtgaacggcgtcggcctcaccaagctcatgggccggagagccggccgcattgcgctccacgccacgctcatcagccgcgacgtcgactgttggtggcggatgcagcgcctggccaccatgggcaattgcccgggctccat

SEQ ID NO: 3211 - DNA, 174 bp, Oryza sativa
  Clone ID: PAT_MRT4530_102913C.1
atggcgtgcgcgttggacatgcaggagtggggcgtcggacgtgcaggagtgggctggctgccaggtgcaattgttattaagcagaacccaagggccgtgtaccacatccttgaaattgtgtattgtctgcttctaaccggaaaggcaatacatgcgaaaactttcaatgggtaa

SEQ ID NO: 3212 - DNA, 1525 bp, Oryza sativa
  Clone ID: PAT_MRT4530_102914C.1
tgttttttttttttttttggtttttgcacgatcaaaccaatacattacagaggcgaaaggaatcaagtacacaggcctcagaaagaatgtttgcaactcatatattacaacaattacaatgccctccaaacttgctaactatttccagaataagttcccctccaaacccgctaactatttccagaataagttcctagagtttcaacaaagctagtcatctgaatgttcagactaaaattttgttgtcaagaccaggtcaccattccgctcattcagagcagcgccagcgacacctaacatttttcctccgacaaaacggtaagccacagaaccatgacccctggctgaacagagcgaaaaggaacttgatcacgcgctaggataatttacacctaacaaactcaacactaattacattagccgatgctggcgaaggcccttgccaaaatggggttgcatcaatctaacatagagaccattcaggtccatcagagagtcatgtgtaccctgctcaactatcctaccaccatttaggacgacaatgttatccacatgcttcatcatcgctgccctgtgcgcaatgaggatggttgttttgttccccatgaccaatgtgtcaagagcttcctgcaccaccctacttgattcagactcaattgcggagctggcctcatctaacaacaaaataggtgcattcttcaaaaccaccctagcaattgcaattcgttgcttctgcccagctgtaaggtcaacccccctcattccaacatgagtgtcgtagccatgtggcaagctgctaatgaaatggtgggcatttgctatcctcgcagcttccggacgcgtgggctctgttgcattgtgccttgcataaataatgttctctcttatcgttgtcgagaaaataactggctcttgctgaattaggcccatgtgacttcgcaaccatctcaggttgaatgattttatatctcggccatccaacagaacttggccagtcactgggtcatagaatctctcaattaaagaaattatagtgctcttccccgatcctgaaacccctaccacggcaactgtttgtccaccactcactttaagattaaaattgctcagcacaagaatttcaggacgagctggataagagaaatcaacattcttgaattcaatgctcccgtaaacattaggtggttttaaaccggtgttatcatcaggatcaatctttggttcccggtcaatgatttgaaacactgaaatgagagacttccgccttttaagaatgtaaggagcgagtccaaaaggctccaccaatgcaaatgatgcaaatgaaaagagaatgtactcttttaaccctgtggcaattgtgagtcgctgcttgtccactgaaatggcagtgtaccaaagaagaagggcattgcaggcaaaaagaagaaactgcgagaatccaaagccaaaacctatggccaatccttgcaatagactctgcttcagtatcttacaaagatgtaacctgtatagttccattatctta

SEQ ID NO: 3213 - DNA, 2300 bp, Oryza sativa
  Clone ID: PAT_MRT4530_102915C.1
ttttttttttttttttttttaaaacaaatatattactttattccttaagatcattttacatgcaacattgtggatgtggtaagtaataacaaatgattcagaataacacagcggctagcatagtaaataagtaaccttggattttgttccaacttcagccgttcagcttcattgttttgaagaactcctccaatgcctgatttgccgacgagccatgtccaccctcccgtgcagcttccatgatctccttgatcgctctcgcccgctgccgcatctcggccgccttcgctgttggagacatcaccgtctccaccacggcaaccagcgtcgctttgtccacaataatggcactcatgtccatgtccccccgtgccccctccacgcggaggcacaccccccactcctcgtcgagcatcttggcgttgtagtactgatcgccggcgagcggccacccgatgatcggcacgccgtgcgtcatgctctccagcaccgagttccacccgcagtggctcaggaacgctcctgtggagtgatgcgccaggatccccacctgcggcgcccatccatggaggaggaggcctttcttggtcgccgtcaccctctcctcgaatccgtcgggaagccagtccggcggcttcacggcccagacgaacggccggccggtggcctccagtgcggcggccagctccgccatgtgctctgcttggatggagaactgtgacccgaacgatacgtagagcaccgacgacggagggtgggagtcgagaaaactggtgatggcgccggcggtggcgtccgtctccggcgaggttgttttggtggaggcgcgcacgagtgggccgattggaattaccgggagcctgaaggttcgccggagcatggcgagcccggtgggctcgaactcctccacggtgttgatgagcagcgcgtccgtcttgtaccccagctgtatctgccgcccgaagaacgcctcgacgcggtgcttcacggccgtgggcgggtggagcacgttgctggacacctgcgacctgtggatgaccacgtcggggtactccggtaggaggatccggccggcctcgtcggggcgaatggggaggtggctccagagcgagtgcacgacggcgctgccgaacgcgccgcacgacacgaagaaggcgtgggcgcacccgcggcgccgcgcgacggtcaccgtccacgccaagaacgggtcggagacgacgcagacagcgacgtcgccggcggcggtggcgccggcgacgaagtcgtcgaaggccggctggagcacctccaaggcctcgaggaagtccgggaagcgattgtgggggacgccgtcggaggactcccagcccgccgggaggccatggtcggccggcacgaacggcagctcgtgtaatagaaaggagtcatgtcctgccgacgtggctcgccgcaggctggccacgttgcgtggcgtcgagacgagggtgatggcgacgtctgggagggcgcggtggaggacgccggcgaaggacaagaaggcggcgaggtgcccatggccagggaaggggaacagcacgacgacgttcttgctagttgctgccgtcattactgctactactcccgacaacaagtctacatgtttcagtacgtagccatgctacaacatccagagttcctcgctaaaaggagtaagtgctatttgtatgattcgataggcatcaaagcaccaaaaaatgctacagaccagcaggttatcagagtactcaacctgtatgtgcgacagcaatattactttacttcaattcgttcgttcacataaaaaaacgcaactcacttagcaaatatgaagccttccctcaggatactgggcggcagtggctggggttgacggcgaatcaaggatgtccgtcgctggcagatggagcgatggaggtagcgtccacccatcgtcgtcgtcaccgtaggggaggctaccggatccacccctcccgtcgtcgccggcgcgacgggatccgtgcgagaggggaagaggtcgccggatcagcccctcctattgccgccgacggcggatctgcgcgagagaagggtggagagacggtggaatccaggcgccgacggcggatccgcgcgaggggggcggagagacgaagggatccgtgcggactcgagctccaaggggccagcggagcagcagaggggcggcgctgccccaatacgctcatcaccgaactgcagcagtaagggaaagagcctggagcagtggtggatatggccggcgatagagagagacggagaaagacgaggagagagcgagagaaatg

SEQ ID NO: 3214 - DNA, 256 bp, Oryza sativa
  Clone ID: PAT_MRT4530_102916C.1
cgataacagggtgcatatatattggatctgatgggaggaccaattccatagggagggagtagcaaaaaccaccagtttcctacccaatttaagttcaattcagttcttcatacttgggttgtataagaagaaggtaatacaaaccttttaactttgcgtatctggactcattaactatgcatgtatcaatgtgcagcaaatggctgttattaaatctttcaaagttcttcacaacatattcatggcggttttatac

SEQ ID NO: 3215 - DNA, 369 bp, Oryza sativa
  Clone ID: PAT_MRT4530_102918C.1
gttcattcttacattgcaaaggcgactctcacagctcgcgctgcggcggctgttgtcgacgacggcggcgacctccgtcgtactggccgaaccgacggctttggttgctcattccggcatatgagcgacagccctacttagaccggcgggtggatccgcggtggcatcagcctgatggaggggcggtggatcggggcttatcttggcttgtacgctatgcacctacgagcagagacacgacaggtcactagaggaggatgctgagaagacatctggatggacactgaagatactctttataggaactgctgcgtctcgtgtggtacacaattttttcttagatcggggataacctgctgtagctgggca

SEQ ID NO: 3216 - DNA, 450 bp, Oryza sativa
  unsure (1)..(450): unsure at all n locations
  Clone ID: PAT_MRT4530_10291C.1
gggggggggggnanggccttccaggttgnccggggggccnccnttnncccnnccccccaaggggtttgggttggttgggnnntctgacctnantaccgggccgnatnngntcctgnncngnacccgggggttngtacnngggtnngggtggaccctgnggcgtaattacactcaaccgtgcaatgtantttnncgnnggncaagctttgggggncnctctccagcangcattanttnnngnaatnatattttctcacncaataatntannatatcgtatnattcntcacntggttatgcnggtaggnacttgtagngncntatgncntgtagnanntgtgnacgtatnnttttngggcgcnccatggtnaaaatacccccccccnnntanattantaaagntgnnnagtaaaaaaatagtngattagtgtaaaaaaaaaaaaaaaaaaaa

SEQ ID NO: 3217 - DNA, 306 bp, Oryza sativa
  Clone ID: PAT_MRT4530_102920C.1
atgtgggcgacattgaaggctcgagcaggggtcttcactagctgcatcggggatggcaatttccccgacgagggcgggtacccgccggggacccgaccctacggggccggggtcggggctatatttggccccgcgggtgcagcgggggtggggccccgaaaatatgctttcaagggggcaccattagaaattggaggtccagacctcgcctattttagggccctctccggagctcccatggcaaacaaagacgtgaagcagaagcttgtgctggagcagtttgtttgccacagacgccggtccatc

SEQ ID NO: 3218 - DNA, 298 bp, Oryza sativa
  Clone ID: PAT_MRT4530_102921C.1
aattcggcacgagaccttcatttcatgtttgaacttcccttttctttcttcaatatttaaagataaataaattgaagaaacctcattttcatccaattaagttcaatgttttgcattgcttgcaagaattctattgattctgattgcaagggtgacccttaaatctctaggggtcttttggttattattattgtgtagggctgattattattgagaattcaagtgtgattggttagtcctatatcgactaagaataagctaaatgaaggatatataggaaagatgacccatatactct

SEQ ID NO: 3219 - DNA, 603 bp, Oryza sativa
  Clone ID: PAT_MRT4530_102922C.1
gaaaaactaaactttttttttccgagagcggaggcaagccttgccacgagggcggcgctggaggcgctggccgcactggccgcggcgctcgccacggcggcgcgcgccgagcagggcggcgcgcaggccggacgcaccaggtgcccgaacagcccctgctgcagccgatgacgctggagcggaaccaccctcgactcatgcggcgaccgctgccaaagccaacgcagcggctgcggcccgacgcccccgccgacgccgacgaccccctgcgacgccttgggctacagcgagcccaccgacctgcgaaagcggctccagacactgccaatggaccgagcatgccccaatcccttatgttacgcgtacgacgccttactcgccgccgccgccgcgtacccggcgttcggaggcaccggcaacaccgaaacgcggaagcgggaggccgccgcgttccagggccaaacctccacgagaccaccggagggtggccgaccgaacccgacggccccttatcccggggctactgcttcaagcaggagcaaaaacccgaccgtccgactacctgccagccccacccacgggaggggaccgctgccccccccg

SEQ ID NO: 3220 - DNA, 272 bp, Oryza sativa
  unsure (1)..(272): unsure at all n locations
  Clone ID: PAT_MRT4530_102923C.1
ttatttataatttttatttttnngggggggtggggccataacctgagttgtattcttttattaacaatatctaaaacatattttcaatatttttcaattttaagggacactttacatttgatattgnatatttgacatatattgttcaatatatataacaattcttatcaccatttgtttggtattgaaataaccattcacacattaaaatgcttaacaaattgaactttacatgatttttcacaactactttcttaactcaaaaacccaat

SEQ ID NO: 3221 - DNA, 422 bp, Oryza sativa
  Clone ID: PAT_MRT4530_102924C.1
accctaaaaaaacatttcagatatgtttcatcttttttcaggttcgcatggccaccagaaaccttgcaagtcacaaacaaccctaccgcgtaaaaaaaaaagaccaatttcacaatatgttcttctgggtacatatctcaccagaaaaggatcttttatgccctcacaaaacaattgccacacaaaaaaagggcatatggcatttcgacagttaggcacattgctttgacgatttatgccggaggtatgtcatggcattacaggtacctataaattgatcgcccagctcggatcagtactctaaagaaaactccagcgaaaactgagaagggactcctctaacgcttgcagagtgatgacatgaggcccattgtatgaaacaatgacatgacccctggaaataccaactctcccagcagtgg

SEQ ID NO: 3222 - DNA, 499 bp, Oryza sativa
  Clone ID: PAT_MRT4530_102925C.1
atggcggcggcattagcatggcggttcaatggaaccaatggaggcgcagatctggaacccaaagttcaagagtcagagccaccaactcctgtctcagtgatgagaatggtcaagaaccgtgccaatgtggaggatgaggagacactttcaagtgttgctcaatgtattgagcagttaaggcaaggttcttcatccacccaagagaaagagaactccctgaagcagttattggatcttcttgaaacaagagacaccacatttggagctgttggatcacatgcacaggctgtccctatacttgtttctctccttagatctggttcatctggtgttaagatgctggctgctactgtcctggggtctctttgcaaggaagaggagctaagggtgaaggttctgcttggtggttgcatccctcccttgcttgctcttctcaggtccaagtcagctgaaagccaaactgcagctgccaaaactatttatgctgtttctcaaggtg

SEQ ID NO: 3223 - DNA, 4390 bp, Oryza sativa
  Clone ID: PAT_MRT4530_102926C.1
tgcaaaatctacacatcatgcaagtgaaacacatgcttatgaggcaagggttgaggatggtcaattggataaaggttttacctctatccatgtagatgaactagataacagtggcatcagtccagtgtgtgctgtagaatctggaacagtgtgcacaaatttggtggatccacattgtgaagaatccatagatatgactcataatcatgcagatggaaaaagtaatcaagttgatatgaaaaatgttgacgagcctcaagatctggacactagtagactttctaacaagggtatcaaggaaagtgttcagttggaaggtttcatcggttctacttctgttaaggaaaattccaatcatgtacaacctgaagtaagcaccactgttcctgttaaagatgaatcagaagcttttgacagtgcaatagttgcacagaaagatattgtctgttcgtctcctgtccacagtatgaataaagaggaaagtccagctctgatatggaaactgaaattaaaacatctggagagaaatctggaccaaatggcacaaaaggaacatgaagattctatccttaaaaaggctcatcttatagaggtgaatcttaagagggctggtgaacgatctctctataatatgtctctagagaagaggacaaggggtcactgggattttgtccttgaggagatggcttgcatggcaaatgatttcatgcaggagcgcttgtggaaaaatatggctgcagctcgggtatgccattgggttgtgtctaaaggaagggcaaaatttgaggaagcaatcattcagagaaagcagaaagctgttacaagaagccttgtaaaaggtatcatgagtttttggcgttcagcagaggctttgcgaactattggtaggacagctgttattcaagaacacaactcagatatgctggatacgacaaatcatactggtttgaaagctgaaaaatctgagggtaacaaatcctcggaagcagaagagcctaactatcctcgccaatctcgaattcaggattatgcagttaaatttcttgaatataacagtcagacatctggttctcttgtgttggctgaagcaccaccaactcctgacaggctaaatgactttggtaccttgaaagtgtctgatctttcagaaggaagtctcttttatacagtagcacctagtgcaatgaaggtatacagggagtctgtggaatctctttctgtgcatcataagactggttacattggtctcaaggatgactatgaggcatctgggtgtgactttgctgcagatttgcctcaggagaatgcttatgaggatgaaggggagacatgcacttatttaccggaagcatatgatggtggtttgttatcacagatgggccataggaaacaactagggcagcagaggattaacggtgcaagatcatatggaataagtactcatgtgccttttgaaccatatttggaaagcaaattatggaatggaaaaaggccttcatctttccttgcagttcctacgaaacgcatccgtacagctgctagacaacgaatcgtaagcccataccctgctggcattggtggaaccacccaagtcacaagtaaaactgatgtttcaagtggggacacaagctcctaccaagatgatcaaagttcgttgcatggggggtccttgccatggaaaaatacagacttcgaatcaacagttgattttgacagacaattgccatatgatggtagggaagtggtcactaaagctaacaagaagaaaaagcttaagaacccaggatataagacttctcaaaatgcagccaattcctgtgccttggcttctgcaaagggccgtatatgtgatcaacgatcccaagctgatttctttactcagtatgaccagaaggactttctgaagaagaaatcagactctgaacaatttgattcaaaatggaacattgcttcccatggtggtcaacatgctttgaagaagcttaaattgatgaggcaagggatagatatttcacaggaagcttctcctgttgcatcacagatgagtaacatggcaaattctgctaaaattataaagataatcaccaatagggatcgtgggagaaaaggcaaagcactgaagatggcttccagcggtggatggtcaaacttcgaggatcaggctcttgttgtccttgtccacgacttgggtcaaaactgggaattagtaagcgacgcaattaatagcattgagcaattcaagggaagtgctaggcagttattccaacgacttcaaggaccaatagaggaagaaaatctcaaggcacattttgaaaaaatgattctactcatgcggcaactgcacgccagacgtagaaagagtgctttttttactacccttcttgttgttactgggaagtatttcttatggccacttgatctttgcgacgctgtaagttcaaacctagatgcaagtacgcctggtagtggttaccagagttcttatacaattgggttaacaccaccaaaccatcatggttccaatggccctacaactcccaattcaactctgaattccaggttatcagggtcacctggtacggttctgagcaacaattttttgccgccttcaacatttagtgcctcttcaagggatgctcagaaatatggtgttcctagatgtacctctttacaaagtgatgagcaacagaagattcactataaccagattcttagtggtagaaatcttcagcagactggaggttctgttccaggagcatttcctcctggggttgatcgtggtgcacgtgtgatgcctggtacccatggtatgggcatggtgtcaggactaaatcgaggtatgcctgctgcaactgtaggctttcctaggcatagttcccctggaaagccaaatgtggtttcacctggaaatgtattagccaacagtgggcaaggagcgccaaacgcagtaaatgtccatcctggagccatgtctgcccctggaaatccaaccttacggccacataatcctatgcaggcgcttcatcctggtcaaaatatggaagagcataggcagattgtgatgccagagttctgcatgcaggtttcacagggaaatactcaagccatcagcagcatgaatcattcactctccaatgcggcatcttcttcacctgttcagtcttttcctattcagcaacatcaacagaaacatcaaatttcaccgccatcacacatgtttggaaatccgcagcatcctcagatccaagggatgagccattcgaatccacagcagcaaacatatgctatgcgcttggctaaagaaaggaacatccaacaacgtatggtgcctcagcaacagaatgatcttcctggagcaagtgcagtacccagtgtacagaatggttcgcatggtcagcagcagaagcaatcacctgcagccttgtcagccccatcttcacaaccacagcatcagcggcagcaagctgcacaaaatccaccagatagctgtgcacatcccaatcaaccaaccaatgctacacaacataagccaaagaagagtcaacagcagcctagacagaatcagcaacaaaggaatcaaggtagtcaacaggctaagcttatgaagagcttaggacgagggaacatgctgatacctcagactacagttgacaccactccaaccaatgctgtttctgcgtcttccaaaaagcaaattactgagaacaaactgattcaacatggccaaggaactttacccggaaataaagcatcaaatccgtcaatccctcatcctggaaatcaacataaactatacagttctccattgcctcaatcaccaaaacagttgccagatattggtaaccaaggcgtattgcagggttctcctagtcaggccctcttaacttcacaacagcttccactccatcctaaatcttcactgaccacacaacagcaacaacagcatgtccattcatcgcagaatagcatccaaagaatgatgatgcaccaaaacctccaaagtaattctgattgtaggccagactcacaggtcgttcaagtccaaaacaatcagatagttccaacaccacctattcctcagagtacagagaaaggcagcgctggactttcatccataagccagcagaagcacgaggtgtcgaatgattcaaatgcagttaattcaacatctatgatgcttagctctcctcaagatacatttgctgggggtgagagactattgccatcatctagccatgatgtgctggaaaggcagatgccaggtggtttgcctatgtatggtggccagtggcaccaggagcaatctaagcagcaactgcagtccccaaaccagcagagaccagttgttcaaggcagtgtatatgctccattaaatcctgggcctggctga

SEQ ID NO: 3224 - DNA, 342 bp, Oryza sativa
  Clone ID: PAT_MRT4530_102928C.1
gagaaccctgcaatacgccttggttaccaatatctggcaactgttttggtgattgaggcaatggagaactgtatagtttatgttgatttccaggatgagggattgacggatttgatgctttatttccggcttgctgccgctgatgctgtggttgtgaagatggggctgacaaggctgcaggtgattgcttctgctgctgaccatgcgaaccattctgtacactggcatatgtttgctgctgtggattcgaatggctcatcccttggatctgaggatgctgcggatttccaaacatgtgtgatggcggtgaaatttgatgtttctgttgatgttgctgaatag

SEQ ID NO: 3225 - DNA, 6109 bp, Oryza sativa
  Clone ID: PAT_MRT4530_102929C.1
cccacgcgtccgcccacgcgtccgatgcgccgccatgctcgccctcaaccgctgtgcgccgggatgggaaggaggggagcgacactgaaaggggaagcccatgcgccggctatttccagccggtgcgtcgttgccgccggctgcttcctcctccaccgtgcgccgtctgctgcttcgcctcctcgctcccgcgagatggaggttggggaagacggggtgaagcgtgttggtaacaagtcttcaccacgcagtctggccattgagaaagctcaggaggagctcaggcaggagcacgatgttcgtgaagaacggaagagagagctggattttctagagaaaggagggaacccattggatttcaaatttgtccatgtagcatcagttagtgtacaatcgacttctctcacagagcaaatagttgaacagaatgtgataagtgatgctaaaggtagttttgcttttgctgcttcgcctcgtggagattctggtgagagtaacggcagaccaggaagttcaccatgccgtgaaaccaacacagcagacaatcttatgctctttcgtggagataaaaatgacgttgtagaggagaagattgtaaaaagaggaacaaagagaactaatgctgctcaatccaagcagcccttgcccactgatggtcacaacaatgcaaaacaagctgaggattctgttctatcacgccttggagtgaagagccaggcatatgttcgacgcaacaggtcaaaaccatgtagggagattacttcagtcaaatcacctacggttcctgctaaaagttctgaaccaaaagatgcaaaaggtgaaatgcaggaaaaacaggcagatgggcatggtgcacgttctgtttctggtttaaaacaagcaggacagaagcgtgaaaatgcaactaagagtacagcttctgatgaacatgttgcaatggagttggatgggattcaaaccaatcgtggaagcaactgcttagtgaagaatgaagcatcacaaagtgatggtagcagtaaagctattgaagtgttgcccaatgcgtatggcaatcaacagcttggtggatgtggtgaggtagttgcagcaggtgaacctgtagagatccctgattctacttcaaacattatattgaggtcatcttattctagtgcaaaatctacacatcatgcaagtgaaacacatgcttatgatcagaaggttgaggatggtcaattggataaaggttttacctctatccatgtagatgaactagataacagtggcatcagtccagtgtgtgctgtagaatctggaacagtgtgcacaaatttggtggatccacattgtgaagaatccatagatatgactcataatcatgcagatggaaaaagtaatcaagttgatatgaaaaatgttgacgagcctcaagatctggacactagtagactttctaacaagggtatcaaggaaagtgttcagttggaaggtttcatcggttctacttctgttaaggaaaattccaatcatgtacaacctgaagtaagcaccactgttcctgttaaagatgaatcagaagcttttgacagtgcaatagttgcacagaaggatattgtctgttcgtctcctgtccacagtatgaataaagaggaaagtccaggttcagagggaagaaacagttgtcttgggaattctaactctatccatccaattgttgtaggccctgtcttgcctaaaaattctctacctgaaaaatacagctctgatatggagactgaaattaaaacatctggagagaatctggaccaaatggcacaaaaggaacatgaagattctatccttaaaaaggctcatcttatagaggtgaatcttaagagggctggtgaacgatctctctataatatgtctctagagaagaggacaaggggtcactgggattttgtccttgaggagatggcttggatggcaaatgatttcatgcaggagcgcttgtggaaaaatatggctgcagctcgggtatgccattgggttgtgtctaaaggaagggcaaaatttgaggaagcaatcattcagagaaagcagaaagctgttacaagaagccttgtaaaaggtatcatgagtttttggcgttcagcagaggctttgcgaactattggtaggacagctgttattcaagaacacaactcagatatgctggatacgacaaatcatactggtttgaaagctgaaaaatctgagggtaacaaatcctcggaagcagaagagcctaactatcctcgccaatctcgaattcaggattatgcagttaaatttcttgaatataacagtcagacatctggttctcttgtgttggctgaagcaccaccaactcctgacaggctaaatgactttggtaccttgaaagtgtctgatctttcagaaggaagtctcttttatacagtagcacctagtgcaatgaaggtatacagggagtctgtggaatctctttctgtgcatcataagaagactggttacattggtctcaaggatgactatgaggcatctgggtgtgactttgctgcagatttgcctcaggagaatgcttatgaggatgaaggggagacatgcacttatttaccggaagcatatgatggtggtttgttatcacagatgggccataggaaacaactagggcagcagaggattaacggtgcaagatcatatggaataagtactcatgtgccttttgaaccatatttggaaagcaaattatcgaatggaaaaaggccttcatctttccttgcagttcctacgaaacgcatccgtacagctgctagacaacgaatcgtaagcccataccctgctggcattggtggaaccacccaagtcacaagtaaaactgatgtttcaagtggggacacaagctcctaccaagatgatcaaagttcgttgcatggggggtccttgccatggaaaaatacagacttcgaatcaacagttgattttgacagacaattgccatatgatggtagggaagtggtcactaaagctaacaagaagaaaaagcttaagaacccaggatataagacttctcaaaatgcagccaattcctgtgccttggcttctgcaaagggccgtatatgtgatcaacgatcccaagctgatttctttactcagtatgaccagaaggactttctgaagaagaaatcagactctgaacaatttgattcaaaatggaacattgcttcccatggtggtcaacatgctttgaagaagcttaaattgatgaggcaagggatagatatttcacaggaagcttctcctgttgcatcacagatgagtaacatggcaaattctgctaaaattataaagataatcaccaatagggatcgtgggagaaaaggcaaagcactgaagatggcttccagcggtggatggtcaaacttcgaggatcaggctcttgttgtccttgtccacgacttgggtcaaaactgggaattagtaagcgacgcaattaatagcattgagcaattcaagggaagtgctaggcagttattccaacgacttcaaggaccaatagaggaagaaaatctcaaggcacattttgaaaaaatgattctactcatgcggcaactgcacgccagacgtagaaagagtgctttttttactacccttcttgttgttactgggaagtatttcttatggccacttgatctttgcgacgctgtaagttcaaacctagatgcaagtacgcctggtagtggttaccagagttcttatacaattgggttaacaccaccaaaccatcatggttccaatggccctacaactcccaattcaactctgaattccaggttatcagggtcacctggtacggttctgagcaacaattttttgccgccttcaacatttagtgcctcttcaagggatgctcagaaatatggtgttcctagatgtacctctttacaaagtgatgagcaacagaagattcactataaccagattcttagtggtagaaatcttcagcagactggaggttctgttccaggagcatttcctcctggggttgatcgtggtgcacgtgtgatgcctggtacccatggtatgggcatggtgtcaggactaaatcgaggtatgcctgctgcaactgtaggctttcctaggcatagttcccctggaaagccaaatgtggtttcacctggaaatgtattagccaacagtgggcaaggagcgccaaacgcagtaaatgtccatcctggagccatgtctgcccctggaaatccaaccttacggccacataatcctatgcaggcgcttcatcctggtcaaaatatggaagagcataggcagattgtgatgccagagttctgcatgcaggtttcacagggaaatactcaagccatcagcagcatgaatcattcactctccaatgcggcatcttcttcacctgttcagtcttttcctattcagcaacatcaacagaaacatcaaatttcaccgccatcacacatgtttggaaatccgcagcatcctcagatccaagggatgagccattcgaatccacagcagcaaacatatgctatgcgcttggctaaagaaaggaacatccaacaacgtatggtgcctcagcaacagaatgatcttcctggagcaagtgcagtacccagtgtacagaatggttcgcatggtcagcagcagaagcaatcacctgcagccttgtcagccccatcttcacaaccaccaagcatcagcggcagcaagctgcacaaaatccaccagatagctgtgcacatcccaatcaaccaaccaatgctacacaacataagccaaagaagagtcaacagcagcctagacagaatcagcaacaaaggaatcaaggtagtcaacaggctaagcttatgaagagcttaggacgagggaacatgctgatacctcagactacagttgacaccactccaaccaatgctgtttctgcgtcttccaaaaagcaaattactgagaacaaactgattcaacatggccaaggaactttacccggaaataaagcatcaaatccgtcaatccctcatcctggaaatcaacataaactatacagttctccattgcctcaatcaccaaaacagttgccagatattggtaaccaaggcgtattgcagggttctcctagtcaggccctcttaacttcacaacagcttccactccatcctaaatcttcactgaccacacaacagcaacaacagcatgtccattcatcgcagaatagcatccaaagaatgatgatgcaccaaaacctccaaagtaattctgattgtaggccagactcacaggtcgttcaagtccaaaacaatcagatagttccaacaccacctattcctcagagtacagagaaaggcagcgctggactttcatccataagccagcagaagcacgaggtgtcgaatgattcaaatgcagttaattcaacatctatgatgcttagctctcctcaagatacatttgctgggggtgagagactattgccatcatctagccatgatgtgctggaaaggcagatgccaggtggtttgcctatgtatggtggccagtggcaccaggagcaatctaagcagcaactgcagtccccaaaccagcagagaccagttgttcaaggcagtgtatatgctccattaaatcctgggcctggctgatgataaattaatctggggtcacttttacagagcaaccctttgaaatctaaagttattgtacaggacatcaagtcgtattcatcatttcttgaagtagaggtagactcgtacatagctgcgtagtgagaaaatccaccagatagctgtgcacatcccaatcaaccaaccaatgctacacaacataagccaaagaagagtcaacagcagcctagacagaatcagcaacaaaggaatcaaggtagtcaacaggctaagcttatgaagagcttaggacgagggaacatgctgatacctcagactacagttgacaccactccaaccaatgctgtttctgcgtcttccaaaaagcaaattactgagaacaaactgattcaacatggccaaggaactttacccggaaataaagcatcaaatccgtcaatccctcatcctggaaatcaacataaactatacaggtctccatt

SEQ ID NO: 3226 - DNA, 2190 bp, Oryza sativa
  Clone ID: PAT_MRT4530_10292C.1
caggtggtgaggtgctgcctcttcgatatcaagtcatactctcctccacgcgcaacgcaacgacgcaaaggggttgattatagaacaaatgttaaacagggtgcatagaaatgccatgtcccaggtaccagcggaaacagcagccactacactaaagtgtaaagacaagcactttgcaaattgcaaaattgcaacccaaagatacacattgcaatagaagcctaggatggcggttgaaacataagctggttcgataaaaatgaagccaactccaccctagttgcttagagtacagcactcaaaacgggatcacactaaccaagcgtgaaaccacacaaaacttgacagacaaacgtgatcctacataagataaggaagagtttgtgtgatcacatcctatcctctctcctgcgtggggcacaagttatgatctcatcaaccctgagaatcatctcagccgcctcggtggcggagagaaggatggcttgcttcaccttgaaggcctccgatatgcctcgcttttgcatgtctccaacgctgcctgtgatgacatcgattccagcagtgcaattctccttgtggtgctcagctcggagctgagagatcagctcagcactgtccagaccagcattatcagctatgattgttgggatggcttgcagggcacgtgaaaaggcatcgatagcatgagatttcttcccaggggtcttccttgcaagatcatccacagctttggccatcaccatctccggccaaccacccccaaataagacacgggtgtcatttactgtctgggaaagcacacataaggcatcgtgcaaggacctctcagcctcgtcaagcacatgctcacttgctcctcttaaaacaatggtgcaagcctggcccatcgcgacaccagagaagtgaataagtttgtcctccccaatcataatctcttcaatgacattgcaatgcccaagcttaacagactctgggttgtcaaaagttgatgcaatgtcaccaccggtgacaagagctagccgttcaatgccctcaaagtcagcatgctcaattgcaagtatgccagcatcagcaaaaagttcttcagggaagttatagatcaactgcctattgacaaagcagttaattccatgaccaatgattttctgaactttctctctcattttctgcttttcggcagcttcaatttctgcgaccttagccatcgaatccactcggacacgtgccccatatatctttactttgtctgtgtccatagctgtgtttgcaactaaaattttggcattctcaattctctttggttgtccaagaccaattttcttgtcaagaatgaaaccttcatccaaaaaggagtccttgagggatcctccaggtatcttcagaatttgaatcgcttccaagtttgtgctacccttaagtcttaggacagcatcaacagcaagttcagcaaagtactccttgtcctgagagaggatttttgaactaagtgtagtcatggcaatgttcatgagatctgatctaaacttatctatattttctttgttgtccatggtcctctccagcaaagcgtttctagcacactcaacagccattctgtaacctgcaattatagtcattggatgaattttcatgttaactaacttttcagcctccctcaaaagttctccagccaaaacaaccacagaggttgtcccgtcaccaacttcatcatcttgaacttttgagatgtcaacaaggacctttgcagcagggttgtctatatgaagggacttcaaaattgtagccccatcatttgtaacagtaacactcctccctctgcctgttgattgcaagatcttgtccattcctttaggtcccaatgtagtcttgaccaaatctgcaatagccatagcaccaatgaaggctgccatcctggcacgttcgcccttctcctcaacagcatcatccttcagcaccctctccatttacgctgcactgttggccggagcggagcccggatcttgctcgcggggaagtcgcctagtccggtgatggggaggaagcccttccgggcgtcgtcgtcgtcggcggcggcggcggcggagcgagggaggggttgaggcggcgaggaggggtttggggtcgcgaggaagaggtagcagcgatggatctagggcccgcgccccggccgtcccctgcagcccgggg

SEQ ID NO: 3227 - DNA, 513 bp, Oryza sativa
  Clone ID: PAT_MRT4530_102930C.1
atggcgcggcgcggcggcggctctaacggctgcggcgcgcggccggagatgggcggcagcggcggagctcggaagggggcggacgtggccgggaaggtggccgatttggccggtgacatgggggagtggggaggaagagagagagggggattcaaattgaaccccgcccactctcgggcgcgcgtggggcgggaggagcgggggaggggcagcgatgtgggcgcgaggtgtgggcgcggaggggaggcgcgacgtggagcggagaaggcgggaaacggcggcggcgtggcggtttcggcggctgcggcggttggagctccggctccaacggccggaggtaggagacgaccgataggtggggcccacctgtcggcgtcccgagagaggagggaggggcggcttgggccggcccacaaggaggaggggccgcgggagagggatgggccgacggcccaacaaagaaaaaggagggaaaagaaaagaaaaagagaaaaaggattttcctgggattaa

SEQ ID NO: 3228 - DNA, 2560 bp, Oryza sativa
  Clone ID: PAT_MRT4530_102931C.1
atggccaaggaggcaatggcgacaccgacacggccgcaggtcagggagacgtggccggcgggtggcggcggcggcggcggtggttggatgggcgttggctccggcgagagggtggcgagcgcgtacgacctcgtggagcagatgcactacctgtacgtgcgcgtcgtcagggcgcgcgggctcacggcggcggcgagcacggtcgccggcggcggcgggtgcaacccgtacgtggaggtgcggctcgggaactaccggggcacaacgcggcaccacgagcggaaggcggcgccggagtggaaccaggtgttcgccttctcgcgggagcgcgtccaggcctcggtgctcgaggtgttcgtcagggacaaggacgccgtggcggcggtggcgcgagacggctacgttggaagggtcgcgttcgatgtcggcgaggcgcccgtgcgcgtgccgccggacagcccgctcgcgccgcagtggtaccgcctcgaggacgtcggcggcggaggcggcagggcggtgcagggagaggtcatgctcgcggtgtgggtcggcacgcaggccgacgaggcgttcgcggacgcgtggcacgccggcgcggcgtcggtgcgcggaggcggcgacggcgtggcggccgtgcagagcacgcggtccaaggtgtacgtgacgccgaagctgtggtacctccggataagcgtgctcgaggcgcaggacgtcgtcccgggcgccgtcgccggcgcaggcggcgacaagggacggcacggcgaggccttcgtcgtcgtcaaggtgcaagtcggcggcgtgacgctccggaccaagccgtgctgccgcccgacgagcccatcgtggaacgaggagctggtgttcgtcgtggcggagccgttcgacgagccggcggtgctcgtcatcgaggcccgggcggcgcacccgggcaaggacgagatcgtcagccgcgccgtgctgccgctcaccctcttcgagaggcgcctcgaccggcgcggcgcggccgcggccacgcacacgcagtcgcagtggttcagcctggagccgttcgtgcaccggccgcgacactcgccggaggagcccgccttcgccggccgcgtgcacctccgggcgtgcctcgacggcgcctaccacgtcatggacgagcccgccatgtacgccagcgacacgcgccccacggcgaggcagctgtggcgcccgcccatcggcgtgctcgaggtcggcgtcctcggcgcgcagggcctccccccgatgaagaccgccgccgacggcggccggggcaccaccgacgcgtactgcgtcgccaagtacggccacaagtgggtgcgcacccgcaccgtcgtcgactcctccaccccgcggtggaacgagcagtacacctgggaggtctacgacccgtgcacggtgctcacgctcgccgtgttcgacaactgcaacctcggcaatggcggcggcggcggcaaggaccagaggatcggcaaggtgaggatacgcctctcgacgctggagatggacagggtgtacaccaacgcgcaccggctcgtggtgctgcacccgtcggggttgcgcaagaacggcgacgtctgcctcgccgtgcgcctcacctgcctgtccctcgccagcgtcttgcgcctctacggcgagccgctcctccccggggcgcactacgtccaccccttcgccgtcgcgcagctcgacggcctcaggcggcaggcggtgggcgtcgtggcggcgcggctgggccgcgccgagccgccgctgcggcgggaggtcgtggagtacatgctcgacgccggctcccacctgtggagcatccggcggagcagggccaacttcctccgcgccacggcgctgctctccggcgccgccggcgcggcgcggtggctcgccgacgtgtgccactggaggagccccgcgacgacgatcctcgcgcacctcctgctcgtcaccttcgcctgcttcccggagctcatcctgccgaccgcgttcctctacgcgtccgtggccggcgcctggagctatcggcggcggccgcgccgcccgccgcaggcggacgcggggctgtcgtgcgccgaggcggccggcgccgacgagttcgacgaggaggcggacacgttcccgacgtcgaggcccgacggcgtggtgcgcgcgcggtacgaccggctgcggacggtggccgggaggatccaggcggtggtcagcgacgtggcgacgcagggggagcgggtgcggtcgctgctggcgtggagggacccgagggcgacggcggtgttcacggcggcctgcctcgccgccgccgtcgtggcgtacgccacgccgccccgggtggtggcgctcgtcgccgggctgtacctgctccgccacccgcggttccggagccggatgccgtcggccgccggcaacttcttcaagaggctgccgtcccgcgccgataccatgctatagtatatgatgcgtcgtttcttgtgtcttatgatgttataaaactttttttttcttgtaattcatcgccaatgatgcttgcacattcatatacccagataaaaggtttcaaaatcgc

SEQ ID NO: 3229 - DNA, 234 bp, Oryza sativa
  Clone ID: PAT_MRT4530_102932C.1
cccggaaagacccaaacccaaggcttggactaaaaaaacgttccttggggggacaaaaacaaaattaaggtggaaaagccggggttccccgcgcgatttaggggagggttacctggcccgtacaaaggggcctcagggggggcatccccatagggggatcggctcggggggctaggttaaggaattggtctaccccgggggcgggcccgggacccccttttttttggggcccgg

SEQ ID NO: 3230 - DNA, 472 bp, Oryza sativa
  unsure (1)..(472): unsure at all n locations
  Clone ID: PAT_MRT4530_102933C.1
gggggggctgttcacgaataaatcgagatgcgccacaattttttttttttttttttggggncccaagtttatttttttgggggttattttattttttattaaattatattattttattgatttttttttttttgatataagtgaaatgatagattacgctgtatcaaactactaacaggcgatagacaagactgctttttttttttgtttaccaaagtcagggtagatagacgagcgatgggcttccgtcgagtacagtaggccttattacggtgtaactacgctactccgatgttcatcatagtcgtaaacgcaaacggtaggtagtcgggcataattcgcaaagatcaatatggccgcgagttctacagacacctagagcggaacaaagcgcagacagtgctcaagtagcgcccctgaaaatactaatgaaactccagctacgaggccgaagctgtggacgcaccggagc

SEQ ID NO: 3231 - DNA, 958 bp, Oryza sativa
  Clone ID: PAT_MRT4530_102934C.1
gttgtaattaagtttcatgctaaactagactttttggtatttccaggtcgatcacagagaggagtcaagatggtggggcccgccggtggatcccacagcctttcttttcctctctttcttttattttctctctctcttatccttcccttctctcggttccttttcctgctctctcgatttcttctctgttttctctctcgttctcttctctgcctttggctccttcacgcgcgcccgagaggagagaggcgccggagatggcggcctggcgcagggcggcggtgggggaaggagagaggagaaaggggcggcatcggtggggaggaggaggctggggcggtgcggcggcgctcggcgcttggctcggtggcacggaagccggcggtggagcatgggggagggaaggtggccggctgcgacggaggccgtcggggcgaaggaggttgcggccggcgtcggcgacctggtggcggcgcccaacacggcgcggcggtgccccagcgccgatgaagacgacgatgcgggtgaggttaaaacgccgaacgacggtttaccagagaaggtggtggtggacatgtcgtcgccggcgagcggcggcggcgggcggcggctgttcccgtgcctcttctgcgagaagaagttcgtcaagtcgcaggcgctcggtgggcaccagaacgcgcacaggaaggagcgcggcgccgccgccgccgccggctgcctgaacccctacgtcttctacggcgccggcgccggcgccgcccccgccccggcgacgctgtcgttgttgctgcaggtggacaactcgtacaccaccaccagctacatcgacgaacacggccgagcagcagcgccgccgccgccgaattccgaccacttcttctggacgacggccggcgccgcctcacgtggtggcgccggcgccggcggcgaggtcgacctcgagctgaggctcttctga

SEQ ID NO: 3232 - DNA, 114 bp, Oryza sativa
  Clone ID: PAT_MRT4530_102935C.1
atgggaaattttggtaaaccggtaggactcgggtaccactgcgacatctggtcgtggcttgtctatgaccgctgcaatgcgcgcatacttgctagtcccaataaagccataaag

SEQ ID NO: 3233 - DNA, 194 bp, Oryza sativa
  Clone ID: PAT_MRT4530_102936C.1
atggcgacagagccgaccttagcggcatcaagggcccatatgggtgatgtccataaaacaaaggacatccataacgacacttcagggccgtccattaagttgccatgccgtgctaaggggatgtaccatctcaagcctttggacggtaacggcggcagagccgccatcatgttaccgggcgttgctgagaggat

SEQ ID NO: 3234 - DNA, 185 bp, Oryza sativa
  Clone ID: PAT_MRT4530_102937C.1
aagaataagtatcatgaatatcattatatcagtcagattaattagctttgtcataacagaagctgcctgaaaggacagagcggtaatgccaatttggaaacacttgtaggttggaatttatggggtgctaaaagaccacgaccacaacatctaaacataatttacagtgacgtatcgacaccaaa

SEQ ID NO: 3235 - DNA, 420 bp, Oryza sativa
  Clone ID: PAT_MRT4530_102938C.1
atggggagggggagcctcaggttgggaggggggtggtcctcgggtggaagatggaacgacgaggagcgggaggaggcagtggtacgagcggcggcgaggagtgggagtagggcggcggaggtcgagcttggcaccgtcgacgggcttgaggcgcctgtgctcgccgccgaggagcacgtggacgacgtcgtggtggtggtcgtcgtgctcagggacgacggcgacgagatccggccatcgcacgccttgcccggtctcctctgccggcgccttgcctgccaccatatcctccccgatctggccgtgagaggcccagatccacccactacggcgctggatctggcgtccccgactagtgacggcgcgaggcggaggatgccggggaggatggcgacgggagagagggagagagaggagtag

SEQ ID NO: 3236 - DNA, 342 bp, Oryza sativa
  Clone ID: PAT_MRT4530_102939C.1
tgtgtggtggtttttttttttttttttttttttttttttttttttttttttttttccttttttttttctttttttttctttctttaatcccttttttttaattttttttttttaatttttttttaagggggggggtacaaagggcagggccgggggaaacgcgagctgatgactcgcgcttactaggcattcctgggggaagaccaacaattgcaatgatctatccccataacgatgaaatttccaaagattacccgggcctggcggccaaggttatatacccgatggaaacatcacggtagcgcgcgggcggcccagaacatttaaggggaagacagacct

SEQ ID NO: 3237 - DNA, 1765 bp, Oryza sativa
  Clone ID: PAT_MRT4530_10293C.1
tcctcaacgctactgacagacagaattgcaggcttgcagctatacgaaagaggagctgaacaaaaaagaaggaaaaaaaagaaacccctatgctgattttacaacacaactatgaaatctacaagactacaagcagcattagccgacgcacaaaagatctcagcattcacataaagaaaactgcgttatgagccaatcaatcgctcgtatctccaaagatactgctatagacagttttagagataaattaattgcattctccgtgctgtcaggcaacgcagagtatgagcttgtaagaactaaactgaccgccccatcacgcagcaacttgccaaacgcttaaatttggcttgcttgaagtgtcagttccagaattgtttgcggactccacatctggcttgcttgcagagtttttgctgggtaccgtccggggtttcttgtcagtgttgccaaatgcctccaaagcatccaagaagaactttttatttggaacaataccctgtgagttcatccgtttgagcaacttctgaataagcttcttgtcgtttgctttggtgtaggccttgtaaagcaatttgtatgtggaagcactgggcacagcacctttcttaattacagaatctaacagctgatctgcttccatgggcaagccgttcatgcagtacgcatcaagcattgcgttcactgatgacaggtgtacattattttgtgagctcacaagctcatcgaatatctgtctggcccttgagacacaatcacaatatgcatacatcatgattagacattcttgtgtcacatagttcggtttgaatcccatttcagtcatcttatcaagcacacactctgctttctccctgagtctcgctttcccgtagttggttatcatggaattgaaagttgggtgtgtaggcttctcctttgatcgtagtaagctcttgaacacctgctccatcttatcgaatgcctgctttcgcccgtaagaatctatgagtatgttgaatgtgattacatctggacgacattgattgcttttcatccgtactagcacagattccatctctgtgatcatgccattcttcccgtaagcgtccatgactccattgtaggtatagatatcaggagagacagggctttcatccagatccttaaacaagatgtctagctgttttgtgtcaccagcctgagcaaaagctcttaggagaatgttatatgtcacaatatttggttggcacctatcaatagtcttcatcttttcaaaatagccgagagctttcgccaaagccttgctcttgtctcgcgaatgcaaatgtgtgccgataagagaattatacactgaagtgtccggcctacacccactgttccgcatctgagagaacagccacattgccatccgtatctggcctttccttcccatcacagatatcagcttcgaatatatgccgttatcagcaacataccacctttgtttctgcatccatctgaaaacaggaacttcaaaattcatctcttgttgatccacatcaacaccctcgagacactggagccagccgtcgcggcggccgagctcctcgaagaggaggaagcagtgctcggtgcggaccaccttcacgtggcggtcaagcacggccacgagccgctccttgccgccgctcgtcctccggaggaagaaccgcaccaggtccgccgcctcggcggcctcgtccgccccttccgccgccgcggcacccgcgccccgcctctttcccctggctgccgcagccgccat

SEQ ID NO: 3238 - DNA, 110 bp, Oryza sativa
  Clone ID: PAT_MRT4530_102940C.1
ttgtgccatttggtatctgactcattgtctacttttgtgactatgtgtctcgaaatatggcatataataaggggtaacggatcttgcgacattgatggctcctgtatgag

SEQ ID NO: 3239 - DNA, 491 bp, Oryza sativa
  Clone ID: PAT_MRT4530_102941C.1
atgtcgtcctcgagcaggtcgtgtcgctgcacggtggccgttgtggctttgaatccatcggatgagatcccaggcgcagcgcgtggcgaggaagcggggcagttcgggatcggggacgcgatgccgacgcggaactggagtgccggcgataccgtgtgggatggcgatggcggaacattttcgacagcagcaaggcgctgcgcttggctcgtgttcggcacgggagcgaagaaggacaagcggccgagccggagcggacgacgccgacgaccggagcaagctggcgacaagaaaggcggcgccaagggccgggagccactctcctcctccttgtcggccgcgggcggggagatatcggcggcggcctcgacggggagccgctctcgctaacggtggccgcggaaggggagattggtggcggcagcatatgtcgtcacggaggaggcaacgatggagatgaggagcacggcgggcatagagggcggcgctag

SEQ ID NO: 3240 - DNA, 366 bp, Oryza sativa
  unsure (1)..(366): unsure at all n locations
  Clone ID: PAT_MRT4530_102942C.1
atgggcggtcccctcttgcgccgtggtgaatccggcagctggacaaccggacaccccggccgacccaactccatcacgcccaccctcaccaccgggctgatgtcacccaggggggcggcacccgacggccctgcttgtcagtggcacaaggggagagggagggggcattggggtggtccaccagctggtggggcccaccgagcagcggcacaaggcaggagggggagtggatggtggttggcacggctcaagccgctgaccatgcaggcgcggnggngcaccggctccgacgataccggcggcgacgaggcgcgcgccggagcgaagcaagagaggggaggggaggaggaagaggattggatctga

SEQ ID NO: 3241 - DNA, 2831 bp, Oryza sativa
  Clone ID: PAT_MRT4530_102943C.1
atgtatattagttgaattacgttctgcagtgctgtgtttggttcagtctagtgtagcagtcttttgtttccatccaagatatgacgtcctgattgtgtgcagtttgctggctatttgtttcatgttggctcgttcacttggtaactggcgcgtacaagaacgtgccaatcctagcagagacaccatgcattggtagaatccactctcttcaaaaatgcctggttgatcatagtccttgcattcttctttcagatgatcatcgatgatatctaaaacttgacgtggagcactgttgtttacatagttgatgatgtcgagtccgtccttgaacataggatcagttggtcttttccctgtgataatctccaatagcactatcccaaaactgtagacgtctccagaaggtgacacatgaccaccatgtgcatactctggagcaatatatccgattgtgcccttcagaccgactgaattaactgaacctgctgttgtagagaaagaatcaacataaaaccttgcaatgccaaagtctcctaagagtgcggtcatgtcatcgtctagaaggatgttgctaggcttcagatcacaatggacagtaggccttccgcaatcgtggtgtaagtaatccaatgcatcagctacattaacagcgatgctcattctttgagataagcgtagaccttttgaagcttttccgtccactctgtgatgcagccatgaatccaagcttctctcggcaccacgcatttcaagattgaaaaccttcaccgccacttcaacttttggttccttcagccttcccctgtacaccgaaccgtgggcccccctcccaataagattagattccgagaaattcgttgtggcttgagctagatcgttgtaagagaccttaagaaagttttcgccaaaagaagtttgttctgaatattttcttcttggcttcttcttctcaaggattacaaagtagataagcaatataagggacatgaacccaaatattggaatcaatattctgattaaataatattgtttgctcattctatgagaaacagttgggcttgggcatgagggcatatggagatccttatttcctccacagagtccccaattgccaccgagtgaaacagatgtagcgtctgcaaatactccgttcgtcggtatttgtccatagagatgattatatgaaaggtccagactcttaagctgcagatcacttaaagttttaggaattgtacccgataagttgttatgagaaagattgagcgccaacaagcccacgatattcccgaaaggtggaacctctccaatgaaaaaattttgatccatcaaaatgttcactaaatttttacattcgctcaaagaatcaggaattccaccagtaagcttgtttgatgaaaggattaagttaactagctgcctaagcaaaccgatctctataggtatgttgccttggagattattataactaaggtccaatgatgtgagtagagaaagacttcccaggcttggtggtatgggaccttcgaatctattgtttcgctattgagagtcttcccaattgtgcaagattgccgatagaggatggaataggcccaatgaagttgttgtttgcaagaattagaacttgaaggttttccaactttccaagccattctccgatagtaccagtaagaaaattagaatctagtgtcaacagaattaacccagaaagtttccctatgctatctggaactattcctgaaagtttatttccacctaatactaggttttgaagagttttcgatagattcccaatcgaatctgggataggtccagttaatttattttgtgctaatgatagagtttgcagagaactacagttccccaacgcatgtaagaatgcccagcttactctgtcgcttgcttcaaggtcattgttatcaaggtttagagcaagtagtcccgaaagcttaccaaaagaactgggcactgggccagtgaaaacattgtttgacagatctacccttcttagccctgaagcattgcccagggaagctgggatgctatcttcaaacatattatcttgcaagaaaatactgcacgagattggggagcttgtcaccaatgtcaggtgctaatgccttgcctagcttattgtcacgcaaagatagtccttgcagagatgagaggttgtagaagggacgtggaatttcgcctgagagattgttgtcagccaatgataagggctgcaaactggacaattggccaagctcactgggaatggttccctcgagttgattacttgcaatgaccatctgtcgaaggttagtgatgttcttgagggtcggaggaatggtcccagtgaaattattaacggaaaggcccagtttctttaaattggaaagcaaacttattttcggaggaattgcacctactaacgtattcttactgaggtctaaaaccgatagggtagagcaatttgtaagccaatctggaaaattcccttccaacgagttcatgctcatatcgaggatttcaagtttgtggagattgctgagaggaggtatctgcccagagaagtaattagcggacagatcaagtatacgaaggaaagtcaggtttccaacagagggggcaattgggcctgacaagccttggccggtgaggttgagcaccgtgactcgcccggggtgcttcgttgcgcatgtgacgccgttccactggcaatggggagatgttttgttccagctgttcagggctccagccgtatcgttaatggcttttctgaaatggagcaatgagagcatgtccgtgctgttttcggggacagttgcgcaacggatgccaccagc

SEQ ID NO: 3242 - DNA, 535 bp, Oryza sativa
  Clone ID: PAT_MRT4530_102944C.1
cgggctgcaggaatcggcacgaggggaaagcattggcacaatcaattgtggggcaaatcactgcaggaggaagagcattggcacagtcaattgcggggcaaatcactgcgggaggaagagcattggcacagtcaattgtggggctgatcactgcaggaggaagagcattggcacagtcaattgcggggcagatcactgcgggaggaagagcattggcacagtcaattgcggggcaaatcactgcgggaggaagagcattggcacaatcaattgtggggtgaaagattgccaaagaaaaaacattgccaccaccaattgtctttgagactgtggcctggattttctcgtgcggttcttgttttacactgccaaggttcatggaaagcaacaaaatcatatagcttacagtggctgagatatgacaacaaagaagcacttttcggattcataaataaggaacaaaacagaaatatcaaagatgctgagattttgttaagcaccatgaccttcaatcactggaaaacaggtttgatgt

SEQ ID NO: 3243 - DNA, 5353 bp, Oryza sativa
  Clone ID: PAT_MRT4530_102945C.1
tttttttttttttttttttgcagtcaccaaagaaagaattaatgtatataataatatagtaacctcaatttgcagagttgaagtgtcctttacaaggtaggagtagcatcattatacaggccagatagcttcaaaagaatcaatctttctgacagatttttcatgttaactatgtgggtcataatgtacatggatcaggcctctccttgtctgtggctggacactgcaaataaccatgcttggtgtccatgggggagaggttatccttcctatctactattgactgactacaacctgatacaagttgggtacaaaatgaatcgacgactaacctcgtgatagggacagagaaaaaatgggttatgaatctttacttgaaaactattgtggtggcgatgcttctgaattctgatcgctggtggttacattgaaaaaaatcaacaaggttagctgctgcctgtcaagaggaccactgatcggggacggtgaggaagtactttgacatggctttcctgaacctcttcttgtactgcatcggagatatgacggtcggggactcgttcttggggcctcccaggatgcctgaagctttcacccaggtctcgagctgcttgtcccaggtgtactggcgcaagtagtcaataatgccaatgacaagctctttcttctcctcgtcgattccaacaagtagtgagtaatccatgacatccgctgtcgcaagaaaagaagtgtcattccaaacggctctttccaatcttcgttttgccttgctccctaaaaatattggctttgtatgcaatgcctctaggaggtttgaatccaagaggactttactctcactggatgtatagcgtgagcgcaatgaaccctttagatcatagactctagatatcttcctttcaaagaaaagattctccatcaccatgaggtccatctttacttccctaccaccttttaagcccttgatattaacctgatatactcctacgattttggccaggcaagttggactacctgaagtcagggattccatcaaatatctgaagtactgaggagcaaactctacaaacgattcaagctctgtcctggtgacttgtttgattatgaatctctcatcaagagtctttgcaaagtaaacattgctttttccaccttgcgcattccatctcttgcagcggctaagtgaacggatgaaatcaatatcctttgggcagcatttcttcctaagtgcggcaaaatgctttgcgaaataacaagtaatggaaaactttgctttatcttcagaaagtggcgattcatcatcaaaagaaaacttaaagtgagttcccttagaatccaaatggtcttcttgtgagagcaaggtcccgtcaagtccatggctgctgtcaatggcatttggtaggtgtaagaaactcaaacttgaattcagtttgcgtgtgacttgctgcacatattcttgtgaagtcattgcataggacacgatactggtaggctcatcatcatagactgcaatgacagcatcatcttcatacccaatctgaggcaacagcagccgtgccccatcatcgatcatatgtgaagcagatgagatatatgtaagtgtacgggtaagaacaacatttaatttctctactgcaccaggagacctttgagaacaagccctccgtatgtttggcattggatctttcaggatactagtaaaatccccaaagtattcagcagatctgaatgacgacagatgcaatgaagtaggagccaatccattgcgttctcgctggtgtatagcaaatttagaatcaaatgaatgaattctgacaggggttacagaattcccatagcttggattgtctgggaaattaaacgatccatactcatcaattttggtaaaaccttgtagaaggtcatcttgtatctcactagatccagtccatgccaaatcaatcttatctgaaaaaatagatgcaagtgagggtaacctttcaacaggttccttacccattgtagctgtagtaactggctgctctgtctctccattgaatctgcggaaaaccttgtccagatcttctgcatcatccacaggatgagttacaagatcaatctgtgaatttgtctcacccatcctgtattccgtatcattcaagcagccttctctagatagcaaggattttcttggacttcctgaagattgcgacaaatttgtggattttcctatttttgtatcccccacaagcaggtcagctttccactctttcagtctgacatctaagaaaatatcaggatttgaaacatgactgtcttttttaaggagtgaatctatgtaacaaagccttcgatcccaaatgtaagcatcaaggagaagaccgcgtctcaagcggttgagctcaagaacatcaatagagacctgcacagaatgattgctatctgtaataactggcaacagcaggatctcatatccatttctttccattttaagcaaatctttcatctctatgatctgcctttgaacacctgctttcaccggctcatcctctgatgtaacactattttcattatgatgaagaaaatcatatacctctgaatgtaaggtctccattttgctatatatctcaactgccatccttctcatccaatcttgtcgactgcggcaattgaaatccagtactgaggggggtaggttaactgagagaatatcaacaggagaatatctgaagaaagcaaccatgtttccgtacccatagaaacgaaggcagtctctctggagagaatgtccacaacttgcaactcggttagcagtagtatggtttgaaaagcttagctccaagaacttcccaaacgacagaccccaagctgcatctgacataattaccctccgtgtggcaggtggtacaccatccttaggttcgcacttgaggcatctatgccacatccatatcctaccatcacgttcacctggtaacttttgagacagaagccgccgaacactaattgttaaactcccatgctgatgagtatagcacctgacatgtgattctgatgactctttgcatgacgggcagcaatatgcctgatcaaataagtcttccctgaggtacctcccaagtggcttatcaaagctaccataaaacttgatgcggaagagctgagaacgctcgcatagcatgcttttggggatacaagtgcttgaaagggaaactaagatgctctgatggttgtcagtagcaggaaaatattcaccagaaagctcattcgggccatctgcatctcccatcaaataatcatcatgtggtttgggaccatagtggtctacctcttgaaatttctttcctgaaaccatgccttgacggtcatcatttatgggaagttgtgtcgagtcattcaaatactgatattgcatcaccatatctgaagttctaatgtcatgatccaatgaacatggaaatattttatgacctttgcatgattcagttgcatggaatgaatcatgatcatgacaattcatatgttcaacaggaattttagattccctatgctcagagatgaccccctctccttcctcattcaacgataatgagccaggtgatatagaattttccttaaacataccattgactctagtagcttctgaatgtttgccttgtacaggtttaagtccatgaggaataccaacaccagcagatccagcaaaatagttacttgggtcacttcgaatatcatttaccactaccattggccttgaaggaaccttgggaagagtcgcaccttcatcagcaaagaatgatgtttcaagagagaggtgataagctgcaaacacagcaagttgcacaacacgcttaattttctttagttcctctcgacatgatcctctcagtagaaccgtgcaacctaaacgcctcggacagccttcaaagaacatcagggtcttcattgacctcctgtttgtctgttttcctgatgagaattctgaaactttatgcaccttgaacaattcacattgacctagtcttgctgaagcaatattgtcaattgacgaggcaatttgtgctcctgagcatcttgatatcctatccaaaagcggtctcttaacattcagaactaaagaaatatcttttgccaagagttcctgggcataagatgagacacttttctcaactagcagcacatttggtcgccgagactcaatctttgcaacaattgccctcaggtgctccttttcctgttcaagtatagtatcaatggatgctagtttgttcgtgaccttctgatactcaagtgctccccctaaaatgagcaattttgcattcacatgctcagaggccatgcgtttgtgttttacattcttagagcaaaccactcctctaacaagattgctatcacttggatcccctgatgctaaacatttaactttcacataatcagtaggatccatgctgccacctttcttggtatctggtctcacatagccagcagctagccaagctagggaggatactatttcaagccagcttttggatccattgtcattttccagatcaatacattctcccttaagcaattgagccacaagagcccggaaatgcccaagtacagcattcctcagaccctctttgtgagctatgtctgtgattgtgtcaacaccaactattttgttagtattaaagttaccaagagcaagaagcttgcccgagtccccagcctcatcatcctcgtagtcgaatccaaataatctcgcttcaacatcgtcaccctcatcttccggtgatggcgggagccagacattggcatcgaaatcagcaggataacgggtcatgtcacctccactcctgtctgcgatgccaccgttcagcctggtatcgcaaccaagagaatccaggctgaggcgctcgttcctcttggacgttggcgaggcgtcgttgtgccccaccatccaagtcgggctctccagagggcttggtgtcaaggacctggcgaccccgttaggagtactgacgctaagagagtctgtatctgaaaagtcatgtaagtagtcattccctggggtgaaaaactgtaccccgggctcatcgtcgtcctctccatcgcctcgcctgacagcgtggcagcggagcagctgcggcgaggagatctggcggcgcagggcgatggcgcgcctgccgcccccgggcctcgcggggagcggcggcgtcgtgtccgcggcgccgctgcgcgatctcgtcggggtcgcgggcgacggcgggccgctcgtctgccgggccacctcctcgccttcggcggcggcggcggggggcgtggggccggcgatgagggatctgaacttctgcaccgcccccagcaccgagaactccaccactcccat

SEQ ID NO: 3244 - DNA, 5196 bp, Oryza sativa
  Clone ID: PAT_MRT4530_102946C.1
atggccgccgccgcctcctcctcctcgccgccggggaccgcctccccggtgctcagcgtgcggatcgtctccctcgactactacatggcgccgcccctccccggattcgacttctcctacagccacttccacggcggagaggtggaggaggtgccggtgatcaggatctacggctccacccccgcggggcagaagacttgcctccacatccatcggctaatttcgctcgtcatttttgattcaagacttcaaccgagtctgcgtgtgtttgatgctttgagcgtgagtgtccttccatttctgtatgtaccttgcaaagaggaccttcttcataacgtcgaaaaaggtaattcatttatatctggtctattgagtgatcttgagaaagctttgcaggatggtgctgttcttaatagagtattccaaccttatgagtcccacattccatatcttcttcactttttgattgactacaacttgtatggaatgggctatgtacatgttacagacttcaagttccgccctccattgccagatgattttcatccaaagtcatctcttcacagcaaggtggactgctccactgaatcagggcataaggtacatccggataatgtcgcaattagaaaaccgacaatctggatatcttcaacagtaccacattctttaatactggctagttcagccacttcccattgcatggaaggaacaaattggaacgtcactaatcgacatagttctttgatgcttgaagctgactcgagaatagaaggcatcctaaatgaaaagtataagatgtacacttccctttcacaagctacagcagatagcaaaatagttcggtcacttttatcaatttgggaggaactcgagcacttaagattgttggaggaagcaaaacctgttgatatgggcagacctttgcgggattctgttcttagaagttttcttcatggaattaaatatgagactgccctttctatgctatgtccaaaggaggaagtgtcctatcacagagttccaaccatggaagaatctgaaaagctcgaagaatgcttaaaatcattgaatgatattattgggactatcacattttcacagaatgactactgttctattattgatagtgatatttctgcgggcactcaacaggagaaccagatcacaaatgttctgtgtttagagccatcggaagagggaaacactcagtgcccagtgtcatcatctgctgctcaaagaacatcatctcaattatttgaagaacatgaaaagcttgtggatgctgaagctcttggccttctaagctggctggcctcctcacaagctgcagaagaaccaacaactgatgatgagttggtcaatgaagccattcttagccctttattttccaagaagtccattgcagttgccttagagtctgcacagctggattttgatggtgcttctcagcaggagtgccaggatattcttgattcaattggacctgtgattggagaagaacaaccaaatgatcaaatgtcctaccgcagttctgtaaggctcggtgagagtagttccctgagcaatagtattccgcagattgatgggtcatctgatgaaaacaaggaagttccacaagaagatggtaagtataaaatcgacaggaaaagggctggattgcctagttattcatctcctcaaagtagttcaaaagccagtaagcgtggaggaaatgaacttctctggggctctttgccactttccattaaaaagagatcagatttgaatgctgatggtcattcaggtggtgcgatgcctactgagaaggtgctaagtgcttctttcatgagtggaactggaaagaactcccatgctaacccagataacactgagaggggatcttctagtccaacaggtgaacatgacccattgtgtgattctgtgagagatttgatgaggaggaggaggagatcttttcggtctgaacaatcagaagttggtaattctggagatgcagcatacatcgttcgtaaagagaatgaaattgtgaattctgagcgactagaattgcatgatatatccagtgacctttcaaattcagaaatgtattattctggcagtgaatatttgcagatgacctttgcacggaagcctccaatgaagaatgaagtattatgtttggagggctcttcagcaggtagtgagctgcctcaatcttccaaactgggatttgccgatatccctccgttttttaatcagaccgctgaagagaataagcagaatgaatcatttcaacgcatgggaagttcatgggatacattgggtgttccaactcatttccaaaatgatggatcagccttatatttgctgacacatgcattttcgccaccatccactgtagccgtgggccagtggctaacccaacaatcttgttctgttagtgtctctggtataggtcattccaactatggcgagaaagtgtctgttgatcaggaaggagcaaacaattctactctttcaccatatatgggaggtcctgctttgatggatgattctcctgcatctaaaatggctttggagcatagcattacgacatttcctgatgatacagttatgatagaaccagatctttccaaccaagaaattaaaaatctggctgattggcatgacttttcccagatctctggtggagatgagaaggataaacttacacctctcagtcaaattggattctgtgatcctgctagtattggtggcggacagcaactgactataattagcatagaggtaataacagaaagcagaggagagctgcgtcctgatccacgatttgatgccatcaatgctgtatcgctggccgttgaggatgatgctgacaatactattgaagttcatgtgcttatacgtggaaacaatgacagttcacacaggaggagaaacctggatggagtttccggttgtgacgtaaatgtatttcctggagagagggaacttttgaaccatcttattaatgcaatatgttcaattgatccagatattatagttggatgggagattcagttaggatctttaggattccttgctgaaagagctgctcatctgggtataggcttactgaaaagaatttcaaggacaccaccgcatcagatgaaacatccacctatgaacccagtggacgaatctagtcaggagcttcctggagcatcttcagctgatgatgttattgatgatgccagtgaaaacaattggagtcatgctcatgctagtggtatacatgttgatggacgaatcatactgaacttatggcgtctcatgcgtgcagaagttaaacttaataattactccctcgaggctgtagctaatgaagtcttgaggaggaaggtaccattagtaccaactaagatattgaatcgatggtttgcaacaggttctggacgaggaagatatcgatgcatagaatatgttaataagagatcttctctcaaccttgaaatattaaatcaacttgacctggtaaaccggacatctgaacttgcccgtgtatttggtattgatttcttctctgttctttctcgaggttctcagtttcgtgttgaatctatgctcttgagattggttcatacacaaaactaccttgcaatttcccctggaaatcaacaggttgcttctcagccagccatggaatgcttgccacttgtaatggaaccagagtcagctttctactctgacccagttgttgtattggattttcaatccctttatccctccatgataatagcatataacttatgttattccacatgcttgggtaaagttttcccgtcaaagtcaagtgtacttggtgtcagctcatattcagcagatccacagaaaattgctgacctgaaaaatcagctgctgctgactccaaatggtgtcctgtacgtgcaacctgaggtcaggaaaggtgtgcttcctcgccttctcgaagagatactatcaacaagaattatggtgaagaaagcaatgaaaaagctgtctgcatctcagaaggttctgcagcggatttttaatgcacgccaacttgctctgaagctgatagctaatgtaacatatggttacacagctgctggattcagtggtcgtatgccctgtgcagagattgcagacagcattgttcagtgtggccgtagaacacttgaaacagctatatcattcgttaaccagcaccctttgtggaaagctagagttgtatatggtgatactgacagctacgagagtcctgaacagaaagagcccatctttgatgcaaagggaattgaaacagtgcggagagatacatgcccagcagttgcaaagattttagagcaatctattagaataatgtttgaagaacaagacttagccaaagttaggtcatatttggagcgtcaatggacacggatactatcagggaaaatttctattcaagatttcgtttttgctaaggaggttcgcctaggtacttatagtgcaagggcttcctcgctgccacccgcagcaattgttgcaacaaaagcaattctatctgatcctagggcagaacctcgctatggggagagagtgccatatgttgtaatccatggagaaccaggtgctcggcttgtagatatggttattgatccttatggcctgctagaagttggatctccatatagattaaatgcactatattacataaccaaacagataatccctgcattgcaacgtgtttttggactcgttggtgctgacctgaataagtggtttaatgagatgcctcgcccaataagggaaacacttgctaaacgacagtcagcatctggtcatggtagctttagccgattaggattgaataagaaaggggttggcaaaggaagcaggatagatacttactatatgtcaagccactgtataatttgtggtgaaataattcaaggatcagacacattttgcaacaactgcttgagaaatgaagctgttgtcggcacaatagttgctggcagaacttccaaattggagcgggaaattcagcatcttgctgctatatgtggtcactgcggaggggcagattggattgttgaaagtgggatcaagtgcatttcccttgcatgcccagtgttctttgagcggagaaagattcaaagggagttgaggggtgtttcagaatcagcaatagaagctgggtattatcccttctgttgtccagaactcttctga

SEQ ID NO: 3245 - DNA, 1688 bp, Oryza sativa
  Clone ID: PAT_MRT4530_102947C.1
atgcgccgcccgtggaagcacccgacgaaggccaggcacggcgccgctgacctctgcctccgcgaggtcggcctcctcctcccccgccgcttcgcccgccgcgcggccgcctccgaggatcttgtaatgcgcctgcaggttcacaggaagctcaacaggcatacaggctgcgtgaacacggtaggcttcaacgcggatggcgataccctcatatcggggtccgatgaccagatggtgatgctgtgggactgggacactggtgcaatcaaattacagtttccttcaggccatagcaacaatgtgttccaagcccgtttcatgccatacacgaacgatcaaaccattgtcacttgtgctgctgatggagaggtgagacttgccaagataggggatggtggagatgtacctactacattgctaggcgatcatgatggaagggctcacaagttggccattgagcctggcagtccttatattttctatagctgcggcgaagatgggcttgttcaacattttgatttgaggacaaatacagccacaaaattatttcagtgcagaaactctttgagtaaatcaggacactcttccaatattcatcttaatgcaatcacaatagatccgaggaatccaaatcttcttgcagttggaggaagcaattgttatgctcgtgtctatgacatccgcaaatacaaatgggatggatcttctgattacccatctgactgctactgtccaccacatcttattggcaatagatttgttggaataacaggcttagcattctctcaccagagtgagttgcttatatcttacaacaatgagaatatttatctcttccctaaaaatggaggactgggaccagacccaaagtcatctgtcaagattgaagccaacaaagggtccaaatcaacaatagtttcatctggagaagatgttgatcgacctgcaccactgatgtatgctggacatcgcaattgtgagactgtcaagggagtgacattcattgggccaaatcatgaatatgtcgccagtgggtcagactgtgggcgattatttatttggagaaagaaagatgggaagtttttgcgggcaatggagggtgatgaatgtgttgtaaactgtattgagccccatccgcacactatgacaattgcaagcagcggaatcgataatgacgtaaagatatggactccctctgccactgagcgagcaccagtggtaaacattgaggagttgaagcctcgtaaaagaagaacaaaactctggcacttttctctaccagaggaattgatctttcatgttctggcatcacgacgcagacagcaagcagctggagatgatgattcatctgaggatcttgaggacagcacaggattgcttaatcttgtactccgagctgcggagagagacgtgctatctgatgaggatgaagaatcctccgaggactctggagattgtagtctcaacttatctatggctcaaccctggaaacattgctaaattgtacatatacagtgatgttttatcctgttttcatggacgtgtgtttttcagttagcggtgtatgagtgcctgatctatctccatcatctccactcccgcccattgatccagtgaacaaactagcacgtacagagaattcagattctcttcaagcatatgtcaagtgtaaataagttcacataaat

SEQ ID NO: 3246 - DNA, 408 bp, Oryza sativa
  Clone ID: PAT_MRT4530_102948C.1
cctagcttacgtggctaaattgacccggtcttcatctaacgtggtgtcagggttatgggttaggcataccctttacccttcgatatacgtcacatatcggtatggtattcccatgcgcatacggatatttcctgcgtactctaaggaaatccttcacggagtctacggatgggaagagtcctactcggacaagactgggtcgtcaatatgtcgtataaggtctgatatctccgagttctacttggaaaccccctgatctgcgatataaaagggacccctcggagaggacatggggcatcgaatctcagagccaacacaaccctcacagtctacgaagtcggagcctgcaaggagccaactcgccgggatctagtcgaaccaactcgaccacgatctcgtcggatccgt

SEQ ID NO: 3247 - DNA, 441 bp, Oryza sativa
  Clone ID: PAT_MRT4530_102949C.1
ttttggtttttttttttttttttttttttttttttttttttttttttttttttttttttttttttattttttttctcttttcttccgggaggccaaaaaggggattaagcagggccggacccgggggacaacccggaaaacccggcccggcccccggaggggaccccacctccccaaaaggggggcgaaaaaaaaccgggggaaaaaagggccaaagcgggccccgggggaaaaagggaacccgcccaaaattccacaaaacaaacgagccggaagcaaaaagggaaaagcccggggggcccaaagggggggccaacccaaaaaaaagggggggggccaacggccgggttacaagggggaaaacctggcgggccaccgggaaaaaagaaagggccaacccgcggggagggggggttcggcaattgggccccaggggggccc

SEQ ID NO: 3248 - DNA, 468 bp, Oryza sativa
  Clone ID: PAT_MRT4530_10294C.1
gggacagagaccaaaatcgagatcgcgatcgagaccaagagcgggatcgggatcgggagcgagacagggaaagaggatctcgaagggaagcgagggaatcatccggagccaataacgatagtactacctcaatgaggccgaaggctgtatgtgttttcctgtcaatttattatctcgcaaagttttgtactatcatcagttccatggtaaacatgtcggcagcagcagtagtggtcaagggcaccgcactagacaggaaggagcataagatggagccattgcctttttgcacggtcgattcagattttaccgaacaagaaaggcactccgtttacgccctcctgtgtgcacgcgcttgcgattgggcattgttcttggctgatcccaggattgctgtggctgctgtttggggcgatcgccaaccggagtgtttgtggccatgcatattgccatgtcgttccattgctg

SEQ ID NO: 3249 - DNA, 528 bp, Oryza sativa
  Clone ID: PAT_MRT4530_102950C.1
atggcccttgtccggaggaaacgaagcaacgaggcggcgactgcaattggagattgggaaggaatggatggcgtcggcggcggtgacgacggctccgatcgaggggagtggatgtccgacggcgcgtgggtaggtgcactcggcgcaagcgtcgggggtgggcagtggcacggctccacttccttgcggttgcctctccggcctccgacgcggcaggttttgcgtgggctgaggatcgaccattccgaatgctcagacgtgacggtcaattggactccgacgggcgggctggcggtggcggcggctgaggccacggctctccctgacatgacgaacgccgaaaggctgaggtacgccacgctatttgcgcatctcatgtttcgccagtgcacccttcttcgtgggtcagggttgaatgttgttggaatttccggattttccttgttcatgctggtgaactggatctttttcatgatgttcgaactgattgttaagagatgtgaagccagatgtgggcaaattcactaa

SEQ ID NO: 3250 - DNA, 231 bp, Oryza sativa
  Clone ID: PAT_MRT4530_102951C.1
atggcggttgcggggcagttcggatatttccccttcgccaaccccagacccagtcaagacctggtatcgccggtcaccttggctatctccggcgtgcaagcaaagaagcgggcggcctcctgcttcttctccagcgataggctccatcagttgcaactcgctgtggtcatgcttgtcaccgtcgacatcaactcctacagggcagctatgaaggtttcatcggggttttag

SEQ ID NO: 3251 - DNA, 447 bp, Oryza sativa
  Clone ID: PAT_MRT4530_102952C.1
atgaaaaagatccagttcaccagcatgaacaaggaaaatccggaaattccaacaacattcaaccctgacccacgaagaagggtgcactggcgaaacatgagatgcgcaaatagcgtggcgtacctcagcctttcggcgttcgtcatgtcagggagagccgtggcctcagccgccgccaccgccagcccgcccgtcggagtccaattgaccgtcacgtctgagcattcggaatggtcgatcctcagcccacgcaaaacctgccatccaacaggcaaggttaaatggaaagggaggcgagagcatttcgtcgagcgattggtgggcacggctcacctgccgcgtcggaggccggagaggcaaccgcaaggaagtggagccgtgccactgcccacccccgacgcttgcgccgagtgcacctacccacgcgccgtcggactaccgaagtaa

SEQ ID NO: 3252 - DNA, 463 bp, Oryza sativa
  Clone ID: PAT_MRT4530_102953C.1
cttcttcaagtcccagattgccaaatcggatcgggggggtaccttgtgattttctgtattctgtgtacatgctggagcatgaaaacgttccaggccagagagcttgttacagaggagtagttggtacgacacgcagatagcgtgcgtagcgatctctcgttttgggcagttacgcataccaattaactgcgacggtgctggtcctggctcatcagtttgcaggaaatggagggcgttgacctcggatgatgaactgtggcgcaagctgttcaacgacaggtggggagcggacgccgcagcgttctacgcgccggagggatccaagtcttggaaggacgtcttagccgtgcaagaccggtgcgaccgatacggactgggtgtcaggatcatcagggaagggaaggactactacctgatctaccagggcgagatccagaggtacttgggcttccgccaggacaca

SEQ ID NO: 3253 - DNA, 2185 bp, Oryza sativa
  Clone ID: PAT_MRT4530_102954C.1
gtcgtagcgcgccgagcgtacctcgcgaagaaggcgggtccggggaaggtctgggagggagcagcccgcctctccgccgtcgcccgcctcgtccgcctattcgccgccacccgcctcgcccacctctccaccgctgctcgcctcgcccgcctctccgccgccgcccacttgcctctccgcctcgttcgccaccgcccgcccccgctcaccgtcgaccgcaccgccgtgcgcaccgtccgccatctacgaatgagttgaaacgcatggagcagaaaaagggttggatcttggatgggaatgggatcaacaagaccaagctagtttacagctcgcagcatccagctgaggacctcctcgtcgtcgtcaatggcaagagggccggaacgacggggatgtacgcgactacgcggccgcagacgcgcccgtatttcgctaccaatgagtacagtacagaattgggctatttcaaaaagatccctggtagtgatattttatgcgatgtgtatccttcccgagcacgcacactcgccgccgcactccacttccccaacacgccgccgccgccgccgccgcccgagctcgccgcgatgtcatggctcgcgcgctcaatcgcggctaccctctcttcttcccactctgatgaagatggcgataacctcgaggcgagcagcggcgacgaccatagggacgagcagccggacaccccgagcggcggcggcggcggagtcaagggcgacttgtcggagctgaccgactccctcacccgcggcctctggggcgtcgcttccttcctcgctccgccgcctgcgcccgccgccgaagccgcggagacggctacgggggcggtgggggagggggaggatggggctcggtcgccgcggatcgccgggatccggagcgacctggcggagatcgggggcagggtgaggagcggaatctcgttgctctcgaacgccaacgccgtggcggagatctccaagatcgcctcgtcgctcctgccgttcgggcccggagaggacgacgacgacgacgacgatgccgaggctgtgggcgtgaccgaggaggtggtggagttcgtgaggcacatctcgacccatcccgagacgtggctcgacttccccttgtttgtcaacgaccggcacgcggatgattttgaactgtcagacacacaatatggacatgcattggctatagagcgtgttgttccaagcttgtcatatcttaggaccgagctttgctctaccaatatgagtgaagcatgcttttggaagatctattttgtgcttcttcactcaaaactcagcaagcaagatgctgaacttctttcaacgccacagttacaaactatgataagtcaggtgtgtaaggagaatgtaactatgtatgaacttaagaatatcctaaaagcaagagaagtattattgcaaagttcaccgacaaagaaaaggctgggacctgatgatggttcatcacaaaactggaatgttgcatctaccaaaggtgacaacagtggaatgtctgaagcaccttcattggaagaagcaacttctgtaccgatgaatgtggttgaggctgacaagcatccgatttcagtcgctgaggtggaaataatagacaagtccgtggttgaagaagagctggtggtgaaaaatgagaccaagagtataccttctgactctgagaaggctaatctgcatatcacctcggacgatgatgataaagaggtggaggactggctgaaggatgtggctcctgtgtccagcaaaacaggcaacgtcaattcagcagggcaggaggaagacatatccttcagtgatctggaggatgaagaggatgattgagagacggctagcttaagcagcgcagccagtactagttccctcggttcaatgtcgcaaacacaagacaacggctagcttcatgaagaacatcaactgttactgaatgatcgaaactctgcagctacagcaaagggaaccgtgttgttgctgagtgacggattcatcctaattgcatgttgatgtaatgatgtatttatgttcgctctctttttgtacatagatatatacactatgtcacctgcgtgtgcactgtatatccacgatagcgtgcagcactcatacttactggattctgaatgcaagatatcctctcatttgctgtcaaaaaaaaaaaaaaaaaaaaa

SEQ ID NO: 3254 - DNA, 1413 bp, Oryza sativa
  Clone ID: PAT_MRT4530_102955C.1
atggaaggcggcgtccacatcgtgtcgcggcgcatggtccggccggcggcggagcacgccggcgagctgccggaccacgagacggtgcaccacctcacgccgttggatctccggatgatcaccggcgactacgtccagaagggcgtcgtcctgcccaagcctcccggcggaggtgagcacgtcgtcgaacaccttgtctcgtcgttcgcccgcgcgctggcccgcttctacccgctggccggccgcctcgccgtcgccgagacgccgccgtcgcctggtggtgctcgtccgaccatctccctctcgctccgctgcaacggcgagggggcggagttcgtccacgccgtggcgcccggcgtcaccgtcgccgacatcgccgactcgctcttcgtcccaagggtggtgtggtccttcttcccgctcaacggcatgcttggcacggacgccgccgtggagccccgccgccctgtcctggccgcgcaggccaccgagctcgccgacggcatgttcgtcgccatgtcgctcaaccacggcgtcgccgacgggttcaccttctggcacctgttccgcacctggtcggagatcaaccgccgccgcagcggcgctgacagcgccgacctcgagctctccacgccgccgccggtgttcgacagatggttcgtggacggcatcccggcgccgatccctctacccttcgccaagctggaggacatggtccggcggcctgcgtacacgccggtggaggagtgcttcctccatttctcggcggagagcgtgaggacgctgaaggagaaggcgaacgccgagatggccgccgccgccgccgccgccgccatatcctcgctccagtcggtgctcgcgcacacctggcgagccgtgtgccgagcccgccgcctcgcgccggagctggagacgagccacggcctctccgtgggactgcgagcgcgggtcaaggaggtgccacaagagtacatgggcaacacggtggtgggcgccgtcgcgagggccaccgccggcgagctcctcgacagagggctcggctgggcggcgtggctgctgaaccgcgccgtggcggccgcgggcgacgaggcgagcgtgaggcgcacgctgccggcgtggccggagacgccgagcttcgtgacggtggcgggcctgcagaacgccggcgtggtggtgatctcgggctcgccgcggttcgacgtgttcggcaacgacttcgggtgggggaggccggtgggcgtccggagcggcgccgggaacaaggtggacgggaagatgacggtgtacgaggggcgaggcggcggcggcggcatggcggtggagatttgcctggcaccggaggcgctcgcgaggctggtcgccgacgaggagttcatgagcgcggtgactgcgccgccgccgacacatcactga

SEQ ID NO: 3255 - DNA, 561 bp, Oryza sativa
  Clone ID: PAT_MRT4530_102956C.1
gaaagaggaagctgataaatcaagggataatctgcatatcagccatcaatggtgatggtttggaggagttctgcaatgctgctcgcccaaagttgtaaagactcattggtgccgatagaagcttttgttccatatgacaaaggagagctcctgagtgacatacacaaggttgggatggttgagaaaacggagtacacggaaaatggtacctttgtaaaagcgcatgtgcctctgcctcttgcaaggcttctcacgccgctgcggcagcaggtggcggctgtttcatgatgtgaacgtcttgcatattgctatcggcaattcacataatttgctagcctttgtagtttgtacagagctaagccatagattttcatgccatcagtttgacctgtgtagagcatcattacaaaaatgtagtagatgagttagatagatgtaaaaacagtgtaacatcaattgcattactactgtaaatattttttgggcagaaattgacacttgccttgttctacttgaaaatctgtctcactctactgaatatactatcgccccaacattatt

SEQ ID NO: 3256 - DNA, 603 bp, Oryza sativa
  Clone ID: PAT_MRT4530_102957C.1
gctgcaggaatcggcacgaggaggcaatggatacgcatatggatttgtgccgcacacgtacagtgaccacgatgaatctgggaaaacacttgcaatcatcatcggcctcgtcgcggctgtcgccctcgtcatcgtcttcctctccttcgtcagaagagccggcggtgtcggtggcaaaagctaagggtgagcaggatggtcaccacttagctcagattggatcggtcggtgtggctttttcttgggcattgctttggtatctctcctacacatctcttttatcttttagggtctcttttgtcgtctcattatgggccaaaacaaagaggaagccatgccgaaatgacctacgctgaaagggagccactgtgctgaagtgtgaggtgaagattccagctgctacctgcaactagccactaaggaaaaattactcaaaaaaataatcaaggagttaattaaagtgtggtgtctacttgttagataatttgtttatgaaacttatatatatatattaatatatatgattcatcatgtccaagcagttgttaattggtcttatctcatatatataattatatatatacaatgcatggttggtgaaaa

SEQ ID NO: 3257 - DNA, 1255 bp, Oryza sativa
  unsure (1)..(1255): unsure at all n locations
  Clone ID: PAT_MRT4530_102958C.1
gaacaatctatatattgtcagagacgcacactttactgatcagctagttagtcccagttctgaagaacaactggaaaaagaaaatcgagctgtaaaaatattagtaccagtgatcagtgacagttcagagcatcaaccatgtcgtccaacaattccatggaggccaacaatggcgatgatgagaagaagcaagagcaggtggtgtgcgtgacgggagcgggaggcttcatcgggtcgtgggtggtgaaggagctcctcctccgcggctaccgcgtgaggggaacagccaggggatcccctgcaaagaacgcccaccttgcttgatcttgagggagccaaggagaggctgacactgtgccgcgccgacgtcctggacttcgccagcctacgcgccgcgtttcgcccgggtgccatgggcgtcttccacatcgcctccccggtgtccaaggaccctaatctggtgccggtcgcgattgaggggacgaggaacgtgatgaaggcggcggccacctaccccaacgccgtcgccgcctacgccgacgtccgcgacgtcgcccgcgcccacgtcctcgtctacgagcaccacggcgcgcgcgaccgntacctctgcatccggcacccgtcatccaaccgcgccgagctcctccggatgctcaaggagctcttcccccagtaccccgtcacttcaaagtgtgaggatgaggggaatcagatggtgaagccgtacaagttctcgaaccagaggctcagggatttgggtttggagtttactccactgaggaagagcttgcatgaggcgatcgaatgtctgcagcgcaagggtcacctgcctgttgtcacggtggcacaacagcgtgcatgtttgtagaaccaagattttatacacggtgaacttcccaagttcccaaagataataaaagcagagacatgacagcggcggcatatgcataacaaatttatattttggcggcggcttaaatttgaaattttgtctacctgaagaataaagtaggagtaccatataaagggaagttcagcgtggaagaacccgtactactactactcctagctagccagttcatatcgtaaatctgcatgtgtaacacaagttctttctttggtatgaattacatctgtatctctactttgttcatacttctacgatataaaatgaaaaaaaatattatataataccgatcgagaatgtatctaagaaacaggaatgaaattaagggaggaatagcgcacctctcct

SEQ ID NO: 3258 - DNA, 164 bp, Oryza sativa
  unsure (1)..(164): unsure at all n locations
  Clone ID: PAT_MRT4530_102959C.1
ggagaaaaatacaanggcncgtggcagccaatgtatctgcatgggtgctcatgaaaatagctcggagcggttcgtctttgttaggcataccaacacacgttatctgatgtgcgtggctctgcgatattgatcatcatatcgccaaaaacaataaaatggggcca

SEQ ID NO: 3259 - DNA, 463 bp, Oryza sativa
  Clone ID: PAT_MRT4530_10295C.1
atgctgctatggctaattttatattcaagcgagtgttgtatcacatggtttcgtgtgaaactccatattttgaatggctttcacattgtacttactgctaagcattgatcaccggtcgcttaatacacatgaggatcaggttatcacaatttagaaggggctggctaactaaggtcaaaacaggaactacgatttgcgtatttgctacaaggcctacaatgtctgattccagagttttttcctcacgatcaggactctttcatcaccggaccagagagcgtcttttttgggtttcacatcagatgaccagtcgtcccatcttaccgctggcaaaagcttcttgatgtggttgatgacagcaaccttgtctctgataatggcatacccctgaggcctcatgatgcggtccatctcaatcagcagatccttcacactgcacccttgtttctctatctcagaaaaa

SEQ ID NO: 3260 - DNA, 2910 bp, Oryza sativa
  Clone ID: PAT_MRT4530_102960C.1
atgtcgtccaacaattccatggaggccaacaatggcgatgatgagaagaagcaagagcaggtggtgtgcgtgacgggagcgggaggcttcatcgggtcgtgggtggtgaaggagctcctcctccgcggctaccgcgtgaggggaacagccagggatccccgcaagaacgcccacctgcttgatcttgagggagccaaggagaggctgacactgtgccgcgccgacgtcctggacttcgccagcctacgcgccgcgttcgccgggtgccatggcgtcttccacatcgcctccccggtgtccaaggaccctaatctggtgccggtcgcgattgaggggacgaggaacgtgatgaaggcggcggcggacatgggcgtgcggcgcgtggtgttcacgtcgtcgtacggcgccgtgcacatgaaccccaaccggagccccgacgccgtcctcgacgagtcctgctggagcgaccccgaattctgccagcgagaggacgtacctgccaccacgtcgtccgctacctcaccgggcgccgcggccacctaccccaacgccgtcgccgcctacgccgacgtccgagacgtcgcccgcgcccacgtcctcgtatacgagcaccacggcgcgcgcggccgctacatatgcatcggcaccgtcatccaccgcgccgagctcctccggatgctcaaggagctcttcccccagtaccccgtcacttcaaagtgtgaggatgaggggaatcagatggtgaagccgtacaagttctcgaaccagaggctcagggatttgggtttggagtttactccactgaggaagagcttgcatgaggcgatcgaatgtctgcagcgcaagggtcacctgcctgttgtcacggtggcacaacagcgtgcataccaatggcaatatccttgcacgaagaggtttttccaaagcggtgcccccaaggaggatgcgacgtggatcgccgccaccgcttgttcggaatcgaagcaaggttttcacccggagaatatggtagggaaagaaaatgggtatgctaaaacaacgcctctaaggaggggaacgacgccaaacggcgtcgccgttgtcagccggccaaatggctcggcaaggctttcgcccgcgattccctgtccaaacccacaccaccaatccgcacaagaagaatcgtcgtcggtcaacaacattgtcccttcagcgattcggccaagaccaccgcccacagttcttcccgccgtcgacgacgcgcccgcacccggactcctccttccccgcctccacatatcacctccgccgatgacgcaccccaccatcgccatcgccaccggcaccgccaccgccacccccgtccagccgccaccgtcgctagccagggccaccagacgccagacgtccatatccggccggggtgacgcggatcggaggtgcagcgcgacgcgcgggtcgtttgcattatggaggaaggcgtacgggcaccggcgtttacattccggaacaatgaccaaggccggctttccggcacaaacccggaatccgccgctctggtggcccaatttcttctctcaaaaattcggccaccccggggatgggctgaatttaccttgggttgaagaaattggaaaattggcgctcggcatcaccatcaccatcaccatgtcgtccatttccaacgacaacaatggtgatcagaagcgacagcagcagcagcagctggtgtgcgtgaccggagcaggtggcttcatcgggtcatgggtggtgcgggagctcctcctccgtggctaccgcgtcagggccaccgtcagggaccccgcggaccgcaagaacgcccacctgctcgcgctggagggagcccacgagaggctctccctgcgccgcgccgatgtcctcgacttcgccggcctcctcgccgcgttcgccgggtgccatggcgtcttccacgtcgcctgcccgctgtccaaccgcgatccagagctgatggcggtcgcggtggatgggacgaggaacgtgatgaacgcggcggcggacatgggcgtgcggcgcgtggtgttcacgtcgtcctacggcgccgtgcacatgaaccccaaccggagccccgacgccgtcctcgacgagtcctgctggagcgaccccgaattctgccggcaaaaagacatgtactgctacgcaaagacgatggcggagatggcggcgacggaggaggcggcgaagagggggctggagctggcggtggtggtgccgtcgatgacgatgggccccatgctgcagcgtgcgctcaacctcagcagcacgcacgtcgccaactacctcaccggcgccaagaagtcgtacccgaacgccgtcgcggcctacgtcgacgtccgcgacgtcgcccgcgcgcacgccctcgtctacgagcgccacgacgcgcgcggccgctacctctgcatcggcgccgtgctgcaccgcgcccagctcctccagatgctcatggacctcttcccccagtacaccatcgcttcaaagtgtgatgacaaggggaagccgatggtgaagccgtatgagttttcgaaccagaggctcaaggatttgggcttggaattcaccccgttgaggaagaaggagatggccccaacacgtgcgatggggtgctccagaaggatccatgtggtggtcatagacacaggagacaggctaagctcgttaccagatgacatccttcacaccatcatgtcgttcctcccggcgtggcaggccgtgcagacgtgcgtgctgtcgcggaggtgggagcgcctctgccacgccgatgccttcctgccgtcctgcgtcgtgctgatggacaccaacgccgcccgcgactgcgacctccgcctcctccgctccgtctcggagtcagtcgaagagatcaatctcggcgagttttttccttttaatctctga

SEQ ID NO: 3261 - DNA, 466 bp, Oryza sativa
  Clone ID: PAT_MRT4530_102961C.1
cccgggctgcaggaattcggcacgagggtctttcagtgttcacgtaggttgtagagagcacaacaacgtacgtacacagcagcgaggactgagactagctagcttagctgacatggctccaaggcggggggcacggtgcccagtggcgtgctgcggcggcattcagagcctgctcgccgccgtcaacaacacccccgaacggcgcaccatctgcggctgcctcaagaacgtcggggacggcgcctccgggggcccctacatcacccgcgccgacgcgctcccctccaagtgcaacgtctccctcccttacaagatcagcaccagcgtcaactgcaacgcgataaactagggcggacggcctgatgcgtacgtgtgtgcccgcgcctcccgtacgagaggagaataaaatgtcattagtaccatcaaattaagctagctagttaagctttacgaaaatcgatccctt

SEQ ID NO: 3262 - DNA, 5916 bp, Oryza sativa
  Clone ID: PAT_MRT4530_102962C.1
atggcgtcgggctcctctcgagccaacatcgaccagttcttcccggccaagaagaggaggccctcgtcgcgcaaggacgagccgccgtccgggagcccgaggggcgccaaggggtccctggaggggtaccttgtccgttccccttcaaccgcggcggcggcctcgttggactcgccgaggggtggtggggacgcggcgggcgccaggaggagcctctccgcggcgatggatgtcgatgtcggccatcccgccacggcggtggcgacagatgagggggattttgagctgaagaggtttgcgatggagttcttgtcattgtcccattactgcagtgttatcccttctgtcatgggtggtgctagcaatggcgaagcgggcaagcagcagaagaggagtgcgatccagtcgttcttggctccttgtagcaatgcatctgccaagaagcagcgcgttgctcactctggggacttggaagctctaaaggttgttgatgtaggtcataaaacccccttccgggaaaaatgtggcactcaatacggtggcccagaggctttggaggaattaggtgaggggacaaagctgagcagtgagggttttgtggctttgcaacgatgtagctttaccccaaatactggacagaaaagggttggattttcaacagcaccaggggctggggaaacaccgatgtctgtatccacgaactctctgatttcacccggggaggaattctggaatgcagcaattgaatttgctgatggcatttctgctcgggctgagaagggtcctggaaggcctgagtgtgatgtggatgacaagtcatcctgtgcagttgcattgtgctctaagattcttcccagatccggaaatggtggttctgaccatgaaaacacagtaggaagcaatgagacaaagcaaatggacagatcttcatataaagaagaaccagtggcagcaaataatcatcatgtaaacagctctccgttgcctgtgaagcatttggacttttttcatgaggatgaaattcaagttccaggcctgaaaattgaagaaaaaggtggtgctgtagatctgagtcaaaagagtcaaatgaagaacagagaaaatctcacgcattctgtagataacgtgaataaaagtacttttgacatgcacatagattcttcagctacgattcatgatgagtgtctgtccaagttaacaacagaagggaaaaatcatccaacaagagtgggtgacagtggttcttgtctgactagaagagacctcaatcaactgatctatagtgaggataagctgcttactgcgtattcagatcatggcaagcctagcaaagattgtacaaataaatttgcatcccaagaaatggaagccaacactcctactagttctgttccccaaaaggaccactcaaagctgtcaagttggcttccccctgagctctgtgctatatacatgaaaaagggtattccagagctgtatccttggcagattgaattaataacaaatcctaagaacctgttccaacttgtggaatgtttacttgtggaaggtgtcttggagaaacgcaatcttgtttattgtgcatctacaagtgctggtaaaagttttgttgctgaaattctaatgttgagacggatattgttcagtggaaagatggcaatccttgtacttccctatgtgtcaatatgtgctgaaaaggctgaacatcttgagcaacttcttgagccgctaggcagacatgttcgaagcttctatggaaatcaggggggagggtcacttcctaaggatacatcagttgctgtatgtaccatagagaaggccaattctttggtaaacaagttgttggaggaaggccgtctttctgaacttggcataatagtaatagatgagcttcatatggttggtgaccaacaccgaggatatcttttggagctgatgctgacaaagcttaggtatgcagctggtgaagggaattcagaatcatcaagtggagaaatctcaggttctagcagtgggaagatggatgcaactcatggattgcagattattggtatgagtgctactatgcccaatgttgcagctgtagctgattggcttcaaaaggacgaagaatttactgctcaagctgcactttaccaaacagaatttcgacctgttccgctggaggaatttattaaagtcggtaatcaggtctttgataaagatatgaatgttgttcgcgtgcttccaaaagtagctgatcttggcggtaaggatccagaccatattgttgagttgtgcaatgaggttgttcagcaggggcattctgttcttttgttttgctccagccggaaaggctgtgaatcaactgcaagacatgttgccaagtttttgaaagtggcttctgttggatcaagtgacgttggctcagaatttccagatgctacatttgcagttgaagccttgaagaggagcccttctgggttagatcctgtattagaagagacccttccctctggagttgcataccatcatgctggtttaacggttgaggagagggagattgtggaaacatgttaccgtaaaggtcttgtcagagttttggctgccacttcaactttagctgctggtgttaacttgcctgccagacgagtaatatttaggcaacctaggataggtcgtgacttcattgatggaactcggtacaagcaaatgtctggtcgtgctggtagaactggcatagatacaaagggagagagtatacttgtatgcaagcctgaagaggtcaagaggattacaggtattcttagaagtaactgtactcccttggagtcttgcctctcagaagataaaaatggaatgactcatgcaatcatggaggttgttgctggtggaattgtgcaaactgcaagtgatatccatcgatatgtgaggtgtacgctgcttaactctactaaaccttttgaggatgttgtgaagtcagctcaggactcccttcgttggttatgccataaaaggtttcttgagtggaataatgaaactaaaatatactctactactccacttgggctagcagcttttggcagttcacttaatcctgaggaatcgttggtcgtgctggatgatctttcaagggcaagagaaggctttgttctggcatgtgatttgcatttggtttacctggtaaccccgataaatgtagatgtcgaacctgattgggaattgtactatgagaggttcatgcaacttacttctcttgagcagtcagttggcaaccgggttggagtaatagaaccatttttgatgcacatggctcatggggctgcaatgcctgttcgtggaaaacctcagcgtgctggtatccgcaacaggtcaccaacacgaggttctggtggaaatgcacttattaatgagcaggcacttcgagtttctaagcgcttttatgtggccttgatgttgtcaaggcttgctcaggaaattcctgtcacagatgtttgtgaggcattcaaagttgcaagaggtatgattcaagctttacaggaaaatgctggcaggtttgcttcaatggtttctgtgttttgtcagagacttggttggcatgatttagaaggccttgttgctaagttccaaaaccgagtctgttttggagtcagagcagagattgcggaacttacatcaattccatttgtcaagggttcacgtgcaagggctctttataagtctggtttgcgtactcctgttgccattgctgaagcatctattcctgaaattgcaaaagctctttttgaatcttctacttggtctggccaaggtgattctggtttacgccgaatgcaattgggtattgccaagaagataaaaaatggagctcgaaaaattgttcttgaggaggcagaagcagctagagtagcagcattctcagctttcaagtcacttggtgtacaagttcctcagtttactacacctctactcccaactatcgatgaacccccaactcgagatagcatggtttctgttggcagaggtcaagctagtgatgatacaaataactgcttcagttatggttctcaaagggcttctacagagagaactttagggaacgatatgcaccctggttcttccatacaaataacagagagtgcaagaatagtgaataatgccaacatcgttgtccaagtagcatcacctttctccatagaaactaaattaagcagcagaaatgtggctgacaaaggccctgttaatgcatataatttcccaggagggtttgacagttttcttgatcaatggtctactgttagtgagttttcttttgatcttcattatgtcaagaagtcaattaaatcatcttcaacctatttcgatattcttggtttggctgtctgttgggaaaattcacctgtttactactgcaactttccgaaagacctaatgatggctggtagcaatgactccattgaaatgtgggacgaactaacgagaagatggaacagagtaatcgaaattatgcgacaaaacagtgtcaaaaaaatgacctggaatttaaagttccagattcaagcattgaagtatccctgtgtttcttgtcaacggctctctagacttcatcttgactacaaaatgttgaagaatgttgaagtcctcgacaacttgtatgttttcctacaaccagtttctgtccacagtggattggacatatgcttggtggcatgggttctctggcctgatgaggaaagtaaaacagtgccaaatcttgagaagttagtgaagagacgactacacaatgaagctgcagcagctgcaaatcgagatggcagatggagaaatcagatgcacaaagcagctcataatggttgctgtcggcgtgctgcacagacacgggcattgtgttctgttttgaggaaattacttgtttctcaaaatctcaatgatttactcgaaacaattgagggcccattggtaaatgttcttgctgatatggaactttggggaattggtgctgacatggatgcatgtctccggattgacatggatcaacatccaattatatctgtaattaaggaacatagaacattggcaaaactgttaaatggcaccttggggtccatttgctcacgggctcagttgtgcagcaaatcacaaagatacatcatacaaggaaattggctccagacatcaactgccactggccgtctatcaatggaagaaccaaatctgcaggagaattggttgctggtaacagctgattactcacagatcgagctgcgtttaatggctcatttttctaaagatactgcattgattgaacttctaagtaaaccagatggtgatgtatttactatgattgcttcaagatggactggtaaagcggagtccttgatctgttcaaaggaaagagagaccaccaaaagatttatttatggcatcctctatggaatgggtgccaactctctagcagaacaacttgaatgcagcccagaagatgctgcacagaaaatccaaagttttaagaggttctttcctggtgtctcttcatggctacacgaagctgtggcatcatgtcgtcataaagggtatgtggagaccttaatgggaaggagacgttttctttcaaaaataacagccggaaatagcaaggagaaagcaaaggcacagagacaagcagttaattctatttgccaggtatttgatgaagctatcatgaaatatcccatttttcctggtcatacatacatatatgtgcatgatgaactggtgcttgaagttgatccatgtatggtagcggaggctgtaaggttactacagactgtcatggagaactctgcttcactcttagggccttcggtctcctttcttttattacgtgccaccttgaatctatataaaacaggttacattgcttcagttacggagtccattgttgagaatgaggattga

SEQ ID NO: 3263 - DNA, 1236 bp, Oryza sativa
  Clone ID: PAT_MRT4530_102963C.1
atgtcgtccaacaattccatggaggccaacaatggcgatgatgagaagaagcaagagcaggtggtgtgcgtgacgggagcgggaggcttcatcgggtcgtgggtggtgaaggagctcctcctccgcggctaccgcgtgaggggaacagccagggatccccgcaagaacgcccacctgcttgatcttgagggagccaaggagaggctgacactgtgccgcgccgacgtcctggacttcgccagcctacgcgccgcgttcgccgggtgccatggcgtcttccacatcgcctccccggtgtccaaggaccctaatctggtgccggtcgcgattgaggggacgaggaacgtgatgaaggcggcggcggacatgggcgtgcggcgcgtggtgttcacgtcgtcgtacggcgccgtgcacatgaaccccaaccggagccccgacgccgtcctcgacgagtcctgctggagcgaccccgaattctgccagcgagaggacatatactgctacgccaagatgatggcggagaagacggcgacggaggaggcgtcgaggcgtcggctgcagctcgcggtggtggtgccgtgcgtgacggtgggtcccatcctgcagccgtccgtcaacttcagctgccaccacgtcgtccgctacctcaccggcgccgcggccacctaccccaacgccgtcgccgcctacgccgacgtccgcgacgtcgcccgcgcccacgtcctcgtctacgagcaccacggcgcgcgcggccgctacctctgcatcggcaccgtcatccaccgcgccgagctcctccggatgctcaaggagctcttcccccagtaccccgtcacttcaaagtgtgaggatgaggggaatcagatggtgaagccgtacaagttctcgaaccagaggctcagggatttgggtttggagtttactccactgaggaagagcttgcatgaggcgatcgaatgtctgcagcgcaagggtcacctgcctgttgtcacggtggcacaacagcgtgcataccaatggcaatatccttgcacgaagaggtttttccaaagcggtgcccccaaggaggatgcgacgtggatcgccgccaccgcttgttcggaatcgaagcaaggttttcacccggagaatatgcgattcggccaagaccaccgcccacagttcttcccgccgtcgacgacgcgcccgcacccggactcctccttccccgcctccacatatcacctccgccgatga

SEQ ID NO: 3264 - DNA, 352 bp, Oryza sativa
  Clone ID: PAT_MRT4530_102964C.1
attacgacaaacaacctttatctgaggaaattaaaccgcagctacaggacggaactatatgtatatgacccaccaagaatggaggcaatctcatcagccatacatattatcctatatgaagatacggggaatttcagcttgtggagcacatatataagcaaagcctgacgaggagggcgtgcctatacgacatgaccgtcatcaagcattgcgcgaaggacatcatgggacagctgcatgtgctaaggtgactaactctgtgattggcacacgtgatctaacacaaggatgttctggcattatgcgctccggatctgccatgtatttgagaggtctggaacgggccatctgt

SEQ ID NO: 3265 - DNA, 132 bp, Oryza sativa
  Clone ID: PAT_MRT4530_102965C.1
atggggaggttgatctctaccgaactcaacttgggcctgggccagcggcctctgtcaggaaacgtcttcttcctcatctttgctattggattggagctggagctggaggccaccaagcggctcttcttgtag

SEQ ID NO: 3266 - DNA, 3243 bp, Oryza sativa
  Clone ID: PAT_MRT4530_102966C.1
atggccgcccgcgcgctgggtccacctcctcctcacgccctcggcgccacgcggcaggctcctcgctgcccccacgctgccgccgcggacgcctctgcgcccccgacgcatggataccggcgtggcgccgcggcgctcggctccgcgctctccgcccgccggggaaggcatactttgtgttcagtacaattgatggatgctcttagaggtggcaatcttcaagtggaaccaaacatacttcattcccccaagccattgatgtctactagacgtgatgactcagccataacctgtaaaggattctgtacaatatcgtggaacctcaaatcagatgtgctggatggttacataatcttcgtcactggagatccagttaccttgggctgttgggaatcagatatggctgttcagttgtctccttctgttgaaagtaacaacttatggacggccgaaataaaggtaccatatggtgtgcatttcaagtataactattttgttcgagaggagaatgacgcctcttctgatatcatatggaggccaggtcctgagtactccttgtcaatacccccagttggccggaaaaaacatgtcattgttgtgaaagatctgtggatgaaaactagtgtggcaggcattcccactccttcctggggatcatggctgatggaagctaattttcttgaagaccaatttgctaagagtggagagcatcaaaacattgtgaaagcccattctgtcattgatacggtggatcgagcctcatcagtaggtgaacatattattctgaggcttgggaacggcacacctttacatgtcaagaatatatcagagaatccatctgccagtgtccatgatgattttactgtaaccgataaagcaaattcaattaaatcaagtataagtgaacatgaaaggaatcagcctgttgaggaaccatggatccttggatctgtcatggcagcaaagaaatctgttgcagcagggaagcacgagaaaaacagatggaagtttgtcaataagaaacagaacttgagtgaagtaagtgaaaacatacctgaacaggatcaacctgtagaggagccatggctatttcaatccaaggtggtagcaaaaaaacctgtagttcaaactaaaggcaaaatagaagcaaaggatattatcagaaagctaaggaaaatggataaacctccagcgcctttggaggaggataaggcaactagtggagagccttcatcaagagtcatagtaattaattcatcagtctgcaccatgcagaggattgcagtattggaagatggaaaactggttgaactcttgctggagcccatcaagaacaatgtacagtgtgatagtatttatttaggcattgtaacaaaacttgtgcctcatatgggaggtgcatttgtggatattggactttcgaggccttcactcatgagcataaagcaaaaccgtgatccatttgtgtatcctcaaattgtcaagaatgctaaaagagattctgcgaatttttctgattataatgatgatagccttccaacatatgaagacgaagatgatgatatgactgatggggagttggcagatgaagaaaatgatgatgagtcatcagcatttccagctgaggtagtttctgaaaatgaagaacacatggcctttttgcccaattctaagataaatatgattcatagtgctgaatttgaaagtatctctagttatgatgaagaaaaagatgatgaaattgatgatcacatggaagatgaatataatgaggatcttttgcctggtgatcagtcagaagtatccaatgatcttaagacattatcttccattcaacatgctttgagagagtctagtgatgatacaaatggaagtaggtggtctcaagttcgcaagggtacaaaaattatggttcaagttgtcaaggagggattgggttcgaaaggtccaacgctgagtccctttccatgcttaagaagccggttttggatactggtttcccgcggtaacaaagttggagtatcgaaaaaaattactgggatagagcgcacccgattaaaaggcattaccaaattattacgacctcctggatttactctgacagctcgtactgttgctgctggccattcttgggaggagttgcagaaggatcttgatcgcttattatctacctggaaaggaataattgagcatgctcaatctgctgccttagcagctgaggagggtgtagaaggtgctgttcccgtaatgttgcataggtcaaagggtcaggctctatctgttgttcaagatgatttcaatgagaaggtcaagaggctagttgtggattctcctcgcacctaccatgaggtcacaaactatctccaagaagttgcacctgagctctgcaatcgagttgatctttacgaaaaaagaactcctatatttgatgaatataaaatagaaaaggagattgacaatattctgtgcaaaagggttccactacataatggcggttctttagttatagagcagaccgaagctctggtttcaattgatgtaaatggtggtcatagtatgtttggtcaggggacgtcccaggagaaggctatactagaagtaaacctagaagctgcaaaacaaattgctcgtgaattgcgcttgagggatatcggcggcattattgttgtggattttattgatatgaccgatgatatttttgaagaaatgaagaaagcagtagaaaaggaccgatcaacagttggtgtttcagaattgtcaaagctgggtttgatggagataactagaaaaagggttcgaccaagtgttacgttcatgatcagtgagccgtgtccttgttgccatggtattggccgtgtggaagctcttgatacttctttttcgaagatagagcgtgaaatctgtcgacgccttgctgcctctggacataaatcagaccctgagaaaccaaaatcatggcccagatttgttcttagggttgaccatgagatgtgcacgtacttgacatcaggcaagaaaacaaaactagggctcctcagcagctctcttaaagtgtggattttgttgaagatcgctagaggttttgctcgtggggcatttgaattgctaccatattctgatgaaaaggaaactgatgagcggaaggaagagacatcagaatcgcctccgaaagaagcaggcagcccaaaactctctgtatttcctatcaagaagtggatgagccgtgcaaagagagcgaagtga

SEQ ID NO: 3267 - DNA, 912 bp, Oryza sativa
  Clone ID: PAT_MRT4530_102967C.1
gactagttctagactcgagctcgaacaatctatatattgtcagagacgcacactttactgatcagctagttagtcccagttctgaagaacaactggaaaaagaaaatcgagctgtaaaaatattagtaccagtgatcagtgacagttcagagcatcaaccatgtcgtccaacaattccatggaggccaacaatggcgatgatgagaagaagcaagagcaggtggtgtgcgtgacgggagcgggaggcttcatcgggtcgtgggtggtgaaggagctcctcctccgcgggctaccgcgtgaggggaacagccaggggatccccgcaagaacgcccacctgcttgatcttgagggagccaaggagaggctgacactgtgccgcgccgacggtcctggacttcgccagcctacgcgccgcgttcgccgggtgccatggcgtcttccacatcgcctccccggtgtccaaggaccctaatctggtgccggtcgcgattgaggggacgaggaacgtgatgaaggcggcggcggacatgggcgtgcggcgcgtggtgttcacgtcgtcgtacggcgccgtgcacatgaaccccaaccggagccccgacgccgtcctcgacgagtcctgctgggagcgaccccgaattctgccagcgagaggacatatactgctacgccaagatgatggcggagaagacggcgacggaggaggcgtcgaggcgtcggctgcagctcgcggtggtggtgccgtgcgtgacggtgggtcccatcctgcagccgtccgtcaacttcagctgccaccacgtcgtccgctacctcaccggcgccgcggccacctaccccaacgccgtcgccgcctacgccgacgtccgcgacgtcgcccgcgcccacgtcctcgtctacgagcaccacggcgcgc

SEQ ID NO: 3268 - DNA, 988 bp, Oryza sativa
  Clone ID: PAT_MRT4530_102968C.1
ccctacttccctcctcctatcctctccacggcttcctcctcctcatctctccactggccaagagatggtgacaacaggcgaagctgcgtcaggcgcaacgttgactcccacagcagatccagtgtcggcggcatcggtggcgggcgggttggcgccagcgatggatcttgcggcggatccggtggctacggtggctggtggggtggcgtcagctacagatcctacgacggatcaggaggcaacggtgtcagcattgggcagggcaggttcggaggcgactctgacgtcttggtagatggatccatgatgcggcgcgtccccctcgcagcctgcccccctctcctcctcctcctcctcgtggcgccctccaagtcgtcgtcggctgtggcggcggcggcggccaaggtgcgggaggagggagaggtctcctcctgcgccgacgacgacgatgtgtaggagggctcccgacggcgacgacggtgacgaggtgaggagggagaggtctcatccggcagcagcagcagtgaggagggctcgatggcgtccaacggcgaggaggtgtgcaacggtggtgtggtgcggcggcgctaggcagtgctaggcggcgaggaggaggcgagcggcggcggcagatccatcccacggtacccccattctcttatttctaatcgattgaattagtgcaaatagaagcacgtcctcaagaacaacacccattcatcagtaattagggagtactaatcctagttctagggacagttaactacaagtactccattcagcacatgaggcctctcctccattcagcacgtcctcactcgctgcctgcctgcctcctcaatctgtcatagttgcagcggactcctccgcatcccagacgtgtatctactactgaatttgtttttttttgtttttactttccgattgaaatcagttctatgaatgctctgaagttttcaatttcacaacatggtcgatgcacttcatt

SEQ ID NO: 3269 - DNA, 441 bp, Oryza sativa
  Clone ID: PAT_MRT4530_102969C.1
atggcatcctctccacccaggtgtccgccgcacgccacgcccggcgcgagagcgcacacagccacgcccgcccgccaccgtacaaaacggtcgccgtcccagccgaaacctctctccatccagcagcgagctagggagcacttggcacaccccgtctcgccgccggccggggtccacgacgccgccctcgccgcgcgtgcaagtggcaaaggcagcagccgcgcgcgcgcgccgggcgtgtcgccgtcgacgaccgggcaagtccgggtcacgcgcgcgcgcgcgcggcacgtcgccgtccgcacgccgtggcgcggcccgcgcctcccgtctcgtgtcccccgccccgtgcgcggcgcgcacgcgcacgcgcacgcgacgacggcgaccgcgtctacagggccctacgggatacggacgcgcgcgccgtcgccgtcgtga

SEQ ID NO: 3270 - DNA, 339 bp, Oryza sativa
  Clone ID: PAT_MRT4530_10296C.1
gtgatctgatcgattcaacgaggtcgacgccttaacgagagagagagagagagagagagagagagagagagagagagagagagagagaggagaagaaaaagaagcttagctcgatcgatcgctccatgctctgtgttgttgcgagatttggagagaagtattgatggttgtgcagaagatgtggatgcccgtggatctccggctgccgtcggggccacaggcggcgcttgggatcctcgcgttcgaggccgcggcggcgatgtcgaagctgctgtcgctgcaccggtcgctgtcggagcaggaggtgtccaggctccggtccgacacgatgcggtcgcc

SEQ ID NO: 3271 - DNA, 330 bp, Oryza sativa
  Clone ID: PAT_MRT4530_102970C.1
attaacccctcactataaggaataagcttgcggccgcgcgcgtcgtggcgctcgtagacgagggcgtgcgcgcgggcgacgtcgcggacgtcgacgtaggccgcgacggcgttcgggtacgacttcttggcgccggtgaggtagttggcgacgtgcgtgctgctgaggttgagcgcacgctgcagcatggggcccatcgtcatcgacggcaccaccaccgccagctccagccccctcttcgccgcctcctccgtcgccgccatctccgccatcgtctttgcgtagcagtacatatgtatatatagactggctgacgtctttttggcggca

SEQ ID NO: 3272 - DNA, 1976 bp, Oryza sativa
  Clone ID: PAT_MRT4530_102971C.1
tccgttccagccaggaattcgttcgaggacgggcgtcggggtttcccggttggggttcatgtgcacggcgccgtacgacgacgtgaacaccacgcgccgcacgcccatgtccgccgccgccttcatcacgttcctcgtcccctcaatcgcgaccggcaccagattagggtccttggacaccggggaggcgatgtggaagacgccatggcacccggcgaacgcggcgcgtaggctggcgaagtccaggacgtcggcgcggcacagtgtcagcccatgaaccctcttcacatgcatgttcagaagttcagcttgatactatcacacacagtacatactgcagatttgcagaacaatggacggttgacacagttcacatggagaacatcaggaccaaagctagcacaggcgttacataataacaccaccttataaagtgcacaatatagctccaccatcgcccaagcgacactatagtaggaactgtggagacatacgatccctaaactgctaaacaccacagaggaagaaagggatcgattttcgtaaagcttaactagctagcttaatttgatggtactaatgacattttattctcctctcgtacgggaggcgcgggcacacacgtacgcatcaggccggccgccctagtttatcgcgttgcagttgacgctggtgctgatcttgtaagggagggagacgttgcacttggaggggagcgcggcggcgcgggtgatgtaggggcccccggaggcgccgttggcgacgttcttgaggcagccgcagatggtgcggcgatcgggggtgttgttggcggcggcgagcaggctctgaatgccgccgcagcacgccctgggcaccgtgccccccgcctgcacgtacggcaggcacggcatcagcgtgttgtacaccgccgagcacgagatcgccgcgcgcaccgccgtcggcggcgccaccacggccgccaccagcaccaccaccaccgccagcgtcgcgcaccttggagccatgtcagctaagctagctagtctcagtctttgctgctgtgtacgtacgttgttgtgctctctacaaccgaagtagtagcgccggtctgaccgcctggatatcgtcggtctgaccgaggttgtaacaccggtcgaaccgccgagatcaatcgccagctcctgtcgccgccgccggtctgaccgcctcgccttagccggtctgaccgccagtaggtcgccggtctgaccgccggtgagatgccggttagaccgccgaaaccagatttctccggtggtcaacagggtttcccaaaccgttggggctagggttaccgtgccccggcggtaagcacggttaccgcgcggtaaccgcaaaaaaccgtacaaaacgtacccccgcggtaagcccgataaccatgataaccgcgcggttaccgacggtaagtcgaaccgacaacgccagctacgttggcgttgatcccttgcccacatggagccgaggacaatcccctcgccgacgtggcagggtctcaacgccaacagatgagcaagcttgccgtcaaatccggttgttccgagctcgtcgccatcgccgccgaccgcgctcctgtcgtggccttgcccgctgggcatggccacactcggcacatcccaacccgcgctggcaccccctccctctacccggtgccccgccctccgacgctctcctcttgcttggagacagaggagagaaagagaggtggatggccatcgccgaggtctccgcgccgtaggctcgtagccccgccattgaggctgacggggagagaggaaggggaaggatggtcgtcgccgccgtcgtcgtcgctgtcgagacggccgacaggaacaaggcgagccgccggcgggagggtggcggtggtggatggcctcaagctgtccaagcgcctcgtcctcccaagcagcaagccctattgtgtcccgttgttgcgatggactgggtggccgcattag

SEQ ID NO: 3273 - DNA, 1528 bp, Oryza sativa
  Clone ID: PAT_MRT4530_102972C.1
cacagcagcaggagaagatacgaagttcccttgaacatattgatgctgtagagtttcagttgtattgacatggctgaggcttgtcatctcaacctcagattcagcagtaagtaaatgaccactaggtctctttctcttccttgattcattggtccccgtcagcacgccaaccttccaaaccttcttaagatcatgcggttttctgtatggtggtgatattcccattggaaggcctaaagaaatccaccaatcctcatttcctgatggccaccatgggggagggacacccttatccagtgggtacttgcgctgctgcgggctgcaatgctgcatcaacgatgagagcaatgatcccagggtagcatcctggagatccatcaagctatgctggttcaagacccctctgcgcttagcatcaaccagcattgagttcttaacctcatactttgcaatggcaaccggcccattcacatcgaaccgaaccttctccttccaccaagctctaatgttatccgatgcaccactgacaggcttccctttatgaggaatgatcccataaacaaacccacgagcattgcacacctccatcagcttgagcatgtacctcaagatcccatcctggactctcgccgtcttcttgcggagagcctgctcagacatcttctttgttttggactcctctagtgctgcctgctgcagagcaagcttctgctgcctctccttgatcctcttcagcttgatcttgtctttccacatccgtcgggccagctcctcggcatcaatctcctcatcactgacatcattctccgtgaggttctcgacgccatcaacctcaaagtcagacgtatcgccacgcctaggtggcactgtagtccaaccatcagcgtcaggaacaggcttggaaggttttggctcgtccaccgccatcttctccgcgctgcctgcttcattatccatcatcgaaggctcaccatcgtcatcgtcgtcctcgtcatctgagctatcatcgtctccatcaaccaccatctttctactctgggaaacagcattcccttgagcacgtgagttcctaagcttctcaactgaagaatagttgctttgcaggcattcttcatgcataatcaacaattgttcagcgacctcttcaacactaccatcctcaaagtccgcattgaaggatttggacactgtgtcatacatcatatccaccaaatcttcataataatgtttacccttggagttggcgaaccacgagaggatggattcggcgagctggtcggccttggcgcgggagtcgcggccgccccactggttctccaccgccatctgcagcgccgtccagcgcccgaacaccagcccgatcccctcgccgagggcagccgccgcctgggccgagagcgccccgccgccgccgctagtggatccagccatggcgtggggagagagagagcgcttgggaggggagcccaccagggcttggggttttagccgcggcggggatgcgcgagagggagaccgagcctcgtgc

SEQ ID NO: 3274 - DNA, 381 bp, Oryza sativa
  Clone ID: PAT_MRT4530_102973C.1
atggctctcgcgcatggaggcaacagcggcagcggcaacctcgacatcctcgacatcccacttcaggaactaccacagtggtggaaccagcccacccgggttcaactcctagatttgacacgggtactcgcatttacggctaattattctttcagtgataggcgatgtacccgtcgacagcgaggcgcctgtggtgacttcgtcaatctcaagatatgccggcccagtcttccggaggtgctcatatggagggcgatcgacctcgtaactttcgatccatggcagctgactttgacgaattcaaactgggggccacacggaatacaagctagcaacaagaacaggatgtatgcggagattgggatgagtgagatgcgctga

SEQ ID NO: 3275 - DNA, 261 bp, Oryza sativa
  Clone ID: PAT_MRT4530_102974C.1
atggatggatggaaggatggctgcctctgcctggccgacgcgcggcggattcggaggaaggcgttgtatggggcatgggcgaatgggctagggcggagcggccgcggtgacgcgcaggcaagggtgaggtctggcaacggcggcggcgggagggcgagggcggagcggccgcggtcgtcgctgacaggggcggagctacatagggccatggggccaatcaggccgagcaagagcaataaaccaattgaagacacacagtga

SEQ ID NO: 3276 - DNA, 337 bp, Oryza sativa
  Clone ID: PAT_MRT4530_102975C.1
ttcccagattaggagcttagaacgggggagaagacagctcacacttcgtctctccccaggccgggcccgcttacatctaatagctttcataggtcatagactgtcccatggcgtgaattaatataccacttagtcattaacccattgtaacgtctcgcctgataagaatttctcggtcggtcacccatcccaaattgctccaggccaagcatgcttaaccctggagttctttggagatcagcttccggaaaagaagttgcaacttgttgatatgagtattctattaatcctattaacccctaggtcgggatgtcacacggggcagccaccgcgccac

SEQ ID NO: 3277 - DNA, 251 bp, Oryza sativa
  unsure (1)..(251): unsure at all n locations
  Clone ID: PAT_MRT4530_102976C.1
ggggggggttttttttttggggattataagactttnagggttcatgatttattcaccaaaaataaaaggtgccaagcaaaaccgaccccaccggggccgcgggggacgcccaggaaattccggcccggcccctgggggcgacccgggtatccctaaagggagccgtagaagaccccggcaaaccataggaatggcggtttcctgcgcgaaaaagtcatccgcccacaatgccacacaacaaacaagccgga

SEQ ID NO: 3278 - DNA, 1588 bp, Oryza sativa
  Clone ID: PAT_MRT4530_102977C.1
ccgcgacacgcgcgcgagctcaactgcctcgcttcctccctcctcccgatcgaccgcgccatggctgccgccgccgtcaccaagtcgccgccggcgctggtgcccccggcggggcccaccccgggcggctccctcccgctctcctccatcgacaagaccgccgccgtccgcgtctccgtcgacttcatccaggtcttcccctcctccgccgaagccgccaaggaccaggccgcatcggtcgccgccatgcgggagggtttcgccagggcgctcgtccactactaccccgtcgccggccgcatcgcggagccggtccccggggagcccgagatcgactgcaccggggaaggggtgtggttcatcgaggccgaggcgagctgctcgctcgaggaggcgcgcaacctcgagcgccccctgtgcatccccaaggaggagctgctccctcgcccgccgcccgaggtccgcgtcgaggacaccgtgctcctcgcgcagattacgaagttcacatgcggtggatttgctgtgggcatttgcttcagtcacttggtgtttgacgggcaaggtgcagcccagttcctgaaagcagttggtgagatggcaagagggctccctgagccatcactcaaaccaatttgggccagggatgccattcccaaccctcccaagccacctctaggaccacctccatcgtttactgcattcaactttgagaaatccgtcattgagatctcgttggatagcatccccccgcgtaaggccccgcgtccgcgtgagcgtgggcagaaatgctccaccttcgatgtggtcactgccatgatgttcaaatcccgtactttggctattgactttgcacctgatgccgatgttcgtctgggttttgctgctagcacacgtcacctgctgaacaatgtgctgccttcagtcgacggctactacggtaactgtgtctaccctggtggcctcgccaaaaccagccaggaggtcaaggatgcgtcgctcgtagagattgtgacagcgatcagggaagccaaggatgtgctctcgacacggttcctcgattggatgagcggtggtgccaaggagaaccattacaatgtgtcgctggattacggcacactagtcgtcacagattggagccatgtcgggttcaacgaggtggactacgggtttggcgagccgagctatgtgttcaccctgaatgatgatgtgaacattgtgccgtccgtcgtctacctgaagccgcccaagccgaagcagggaatcaggttggtgctgcagtgcgtggaggctcagcactccaaggttttcggtgaggagttgcagaagcttgcatagaggtaacttcgtgtttatacgcctacacttcgcagcgttgagagctgttgtattctggtgtgttgaatagccgcttcttgaacttggttacaaataaaacaaggtggatcgtgtttgtattctgtattgttgttaccatactacattatacattgattgacattgttgaggcagtactgttacagttgagaacaaatgattccattgatttcaagaatttgtacaatatagtcctacatgaacattatctttc

SEQ ID NO: 3279 - DNA, 291 bp, Oryza sativa
  Clone ID: PAT_MRT4530_102978C.1
ctagcccccagccttgtcgtcggaggaattttcttggaggataaggctcttggactcttgacctgccttggttgaataagctcttatcctaacccccagccgtgaagttggaaaattgatttccgatttcacgacttggttaatacgcacggcgagaactcttacacgaccagatcttacatggtctttcgtctctacaggatctgacaaggccttatcggctctgggcgtccccagtcgaagatcccttaggttcctcggaggccttatcgagacggcgtaaagggacat

SEQ ID NO: 3280 - DNA, 194 bp, Oryza sativa
  Clone ID: PAT_MRT4530_102979C.1
atagtagcgccgttcgtgacgccacgatcggactccaatggccattttgtaacagactgcgatcggtgacgaactgttacgtccgaactgcgctaacttaaccacaaggtttgttcgataaacacagccgttgtcatgaatcgaaatccttaaggagtgtgtaacaactcacctccgatcaataccccgattgg

SEQ ID NO: 3281 - DNA, 2511 bp, Oryza sativa
  Clone ID: PAT_MRT4530_10297C.1
ttacattgctgagtttgacctgccatgtccgacgccggcgaactccctcgtgtggaaggggctggggtcgtcggactccgaccgcgacacgtcggagccgccgtgccgcgagctgttctgctgctgggcggcggcggagctccggtctacggactcctcgcagagcgtgaccgcccactccagctcggcgaccacctccgacatcaccggccgcgcgcgcccccgcggccgcacgcactcgctcgcgatcctcgccacgcgcgacaccgcctccgcctcgttcccgcgcggcgccggcacgcgcccgtccatgatcctcccgacgccgcccgcctccaccgccggcacggcgaactcgatcacgttccgcggcgacccgctcccgccctcctgccggtggatcgccttcctcccggtcaccagctcgaggagcaccacgccgaagctgtacacgtcgctccgctgcgtcagctcctgcagccggtagtactccgggtcgatgtaccccaccgtccccgccgtcgacgacgtcgagcacgccgccggtggtgtcgcggtcgccgacgacgacgatgatgatgccagcgacagcccgaagtccgacaccttggcggtccactcgccgtcgaggaggatgttggacggcttgatgtcgcggtggatgatcggcggcacggcgtagcaatgcaggtactcgacgccgcgcgccgcgtcgagcgccacccggagccgcgcctcccacgacgcgaacagcggggagtggccgtcgacgcggccgtggaggtggtcgtgcagcgcgccgtgcggcatgaactcgaacaccaggatgcgctcgccgcgctcctcgcagaagcccagcagctgcaccaggttgcggtggttcacgcgggacagcagccggagctccgcccggaacgcgcgctccgcgtcgtaccggcggcgccggcgacgcccgccgcccgacgccgcgcgcggacgctccgcgcgcttgatggcgacctcgcgcccgtcggggagcttcgcgcgatacaccgacccgaagctgccgctcccgatcttcctctcctcggcgaacccgttcgtcagccgcgagagctccttcaccgtgaactcttcgcacccgagcggcggcggcggcggcgatgcctccggcgccggcatgatcacggccccctccaagtcgcggcagagggtcagcgtcgacgactcgccgagctgcacggtggcgttcttcttcccgccacgcttcctcacgacggcgaggtacaacaccagcccagccaccacgagcgccgcgacgccgacgcaggccgcggtgaccgcgaccttgacggccttcctgttcttcccggaatcagtcggcgccgccgcattcttgctggtcccattcccgacgacgagcctggacgcgttgagcggcagcttgcagggctggcacacgacgagctgctcgccgccctcgccgccgccgttgccgcagagcgcggcggagccggggacgaagccgcagctggaggagcagttgccgacggtggcgcacgcgccgggcatggtgtcgttgaagatgaggtgcctcccatggaacctctcgttgccccagcacacgacggagaagttggtggtgaggacgccgcagacggtgtcgccgtcggcctcgatggacacgaacgacgcgcgcctgtactcctcgggcacctccacgccccagcaccgcaccatgtcgtcgccgtcgaggatgcacgtcgtgttccgccccagcgccatggacttcatgtcggcggggaggtcgccggggcgcatgtccgggtacccttcgccccagcacgacatgccgccgtcgtcgtcgacggcgcaggcgtggcggtggccggcggcgaccgccacgatggaagcagccccggcgaacgcgggcggcgccatgccgccgccgaagcaggtcatggcggaggcgttgcccttgacgacgccgcagaggaagtcgcggccgagggcgatgcgggagaagtcgaggcccttgggcaagctcaaccccggccactcccagcacgtcgggtcgtgggcgtcggagaggccgcagacgtgagggccaccggcggagagggcgcggagggaagggccccagtagaggcggcggccgacggggcgggagcggttggcggcggcctcgtcggagaaggaccaccagcgcatggcggcgtggccgccgttgggcgccatgaggccgcacaggaagtcggtgccggcggcgatggcgttgtaggggacgtccgcggaggggtaggacatgacctcgccggtgggcatggaggtgcaccgcagcttggcgccggggacatcatcgggcacgtccttggggcggacgagcgcgcacacgaccgtcgcgtcgggggagttggagatggcgacggtggagaactgccgcgccgccgcgtgcccgggaaggaagacggcgacggccgcgaggaggaaggaggtggtcagagcaagggcgccatggcgagacattggcat

SEQ ID NO: 3282 - DNA, 510 bp, Oryza sativa
  Clone ID: PAT_MRT4530_102980C.1
tttttttttttttttacataaacttgcacacactgacattgaattgattgaacaattcagtacaaacatagtttagaggtaacatggactgatggacatggttcattacagacagtttagatgcaatttggacatagttcattacagacatagacacatagtttaaatgcaacttgcaaaattaaatcaacaaggtccggtcggtgtacattctatccctaccggagggaggccggagcacggaaaacatccataaaactatttaaaaaggctatgcttatttcaaacgcctgtgaatatgaatggttcgtaggcgtagcttaattgtgtttcaaagctttccccttcaacttggcgccataagccagcggtcacgtctctccaggcgattccagcgagcatgactccgggcgtagttcgccgccggccctccaccgcggtagcacctgggacagcagcgtgtccgcgtcgaatgtagcctccgctcggtgcatgctggacggtgccgtc

SEQ ID NO: 3283 - DNA, 1362 bp, Oryza sativa
  Clone ID: PAT_MRT4530_102981C.1
atggcgcccttgagtttccggtgttccatagaaaccatccatgcgcccaatctgtccttgggccaacagcagcagcagcagcaggaggaggaggaggaggaggaggaggagacgtcaatcagtgtgactaaagattcaaagctgaacgactttgccttcttaataccggtgaaactgggcacgccagccgtccagtacctggtgaccatggacaccggatcaagcctttcatgggttcagtgccggccgtgtaccatcaagtgccatgttcaaccggcgaaagtcgggcccatcttcgaccccagcaactccagcacgttccggcatgttggctgttcaacctctatctgcagctatcttggtcgcaccctcagaatccagtccaaggcttgcatggagtgggaagacatctgcctctataccatgtcttatggaggtgggtgggcttactctgttggcaaggcggtgacagacaggcttgttcttggtggtggagaaacgacgaggacgacattaagcctagccaatttcgtgttcggttgcagcatggacacccagtacagtacccataaggaggctggtatctttgggttgggtacaagcaactactccttcgaacaaatagcacctctgctgagttacaaggcgttcagctactgtcttcccagtgatgaggcacaccaagggtatctatcaattggaccagacagcagcggtggtgtccctacctccatgttcccaggaacccctaggccagtgtattcgatagggatgaccggcctcactgtcactgtcaatggcgaggtccgctcgttggtctccggctccggctccagccccagcccctcctcactgatggtcgtcgactctggggcgaaattgaccttactgttggcctccaccttcggtcaactagaggatgcaatcatcccagcaatggagtctcttggctattcactcaacactgctgccggccaaaaccagctttgctttctcaccgagagtgacagacaaaactacctccagcgcaaacctccacctcccagcaattggtcagctttacctgtgtttcacatctcctttaccctcggtctcacgctgacattgcctcccaagaatgcattttacctcgatgctagataccgtcaagaattcctgactattgcatggaaacagatttatgttagaagtatttttcctttccaatatttttctgacattcttggactgtgctcctcctttgctcgcgacgactacttggagtctggttatcagatattggggaacttggtcacaaaatcgtgtggaatcacttatgacatcccgcgcaaacaatttcggtttcgtaccggcgagtgctag

SEQ ID NO: 3284 - DNA, 205 bp, Oryza sativa
  unsure (1)..(205): unsure at all n locations
  Clone ID: PAT_MRT4530_102982C.1
gccgcctacgccgagtggctctccgtgctcagcctctaccgctcctgcaagcgcgtcgccgcctgttttcgccgccaaggccaagccgccgccgccggcccggcgccatgagagctcgcgcgcgtgccatctctctctactactcgtgtacgttttactattataagtttatatnattataattgtgggttaaaaaaaaaaaaaa

SEQ ID NO: 3285 - DNA, 770 bp, Oryza sativa
  Clone ID: PAT_MRT4530_102983C.1
cgactacctcctcctcctccgccgccgccgcctcggctcccctccgattcaccgcgatgtcggcggcgatctccggcgccagcctcgtcctctcctcgccccccgcgcccggggcccggccccagccgcgccccgcgcgggtgtcggtcgccgccgccgcgcccgccgcgcgacgcggggtcgttgccgccgcagcggtgtcgagccccgccgtgtcgtcctctgctggtaaagatgccaaacagattcctaaggactttcttcatattgatgatttcgacaaggatacaatcatgaagatccttaatcgggctattgaggtcaaggcaatgataaagtcaggagacaggagcttccaacctttcaaagggaaatcaatggcaatgatatttgccaagccgtcaatgagaacccgtgtttcatttgagacaggattctttttgcttggtggccatgctatctacctgggtcctgatgatatccagatgggcaagcgtgaagagacccgtgatgttgctcgtgtgctttctggatataatgacatcattatggccagggtttttgctcaccaagacattttggacttggcaaagtatgcagctgtacctgtcataaatggccttacggactacaaccatccatgccagataatggctgatgcacttactatgctcgaacacattggtcgtattgaaaacactaaggttgtctatgttggagacgggaacaatattgtccactcatggcttcgattggctgctttatttcct

SEQ ID NO: 3286 - DNA, 421 bp, Oryza sativa
  unsure (1)..(421): unsure at all n locations
  Clone ID: PAT_MRT4530_102984C.1
cgaagggggactcganggcggtggtcgacgtgntgcacgggcgcgccggggtgcggtcggaggaggaccggaggcagtgcggggagatcnccgcgntgctcccggcgctcgnangcgtcgccgtgtcgcacctgtgccgcgacgagaacaaggtggcgcacgggttcgccaagctcggccacaaggcgcggcgccgccgggtntgcacgtcgtgccncccaacgaggtactcgtgttcctgcaacgtgatgctgatagagggtaaaagtacaaggaccgaacaacacaacgttagtcgttgatcgatgtgatctttctctgtaaaaaagaaagttaactgagaattaaacaccatctaaccgaatctgaacacgaggttatcggtaacattagtcattaaaaaaaaaaaaaaaaaaaaaaa

SEQ ID NO: 3287 - DNA, 826 bp, Oryza sativa
  unsure (1)..(826): unsure at all n locations
  Clone ID: PAT_MRT4530_102985C.1
tgtgatagtagtatttatacctgaagtcagattcagagatttttctggagactagattcagagttcagaggttggtaggtagtttaggtagtaggtttgttagttatgcagcagctgaactgggtcagcctgttgctcttgctgttcttcatggttgctgcactcagctccttcgttgccactgcacacagagagctgccaatggcaagaaaagtcgatgaaattggagaccatcttcaggccaagctggataatcaagctagctctgtcagtgtaaccagagcaacggcgaaggctgaacatgatcatcaggaggctgtcatgaggaaatgcaagaacgggaggaagaactgcaagantttcagaccaagaaagcttcctgcanatgcagatggcaagatccatttcgatggccacatgccattcactgcagattaccnctcagttcgtcggcatcctcccagtcacaactaggagttaatcttaacactactagtaccagctagttgctttgcttagaaatatatatccagtaattaagtagcctaatttaatcagtagtgacagtccatatagctaagctgtagtatcaattcttctttcctttngtcctnggatggtcatcnctgtcaggctctcagcttccagttagcattgcatggctttgctctttgctttgctgacatttttgttagttagcaanagtagctcncagtgatggcatgtcnccacccttgatgttccctaatttaagctgttaatccatcaaagttaaaaaagatgtaaaaaaaaaaaaaaaaaaaaaaaaaaaaaaaaaaaaaaaaaa

SEQ ID NO: 3288 - DNA, 142 bp, Oryza sativa
  Clone ID: PAT_MRT4530_102986C.1
gtcaccactctcctactctttcaacgccgaggtggcgccaccgtggtctcttgctgccctggccacctacacaactagccgctactgtcctagccatccttctaagtcgggcactaccttccgccctcagccccaactctga

SEQ ID NO: 3289 - DNA, 616 bp, Oryza sativa
  Clone ID: PAT_MRT4530_102987C.1
gcgcgcgcgcgtcccgcgctctttctctctttctcttagcagcctgatggagttggcggcaacggcccgatggcgagctctcccctccaccaaatccggaaagagggaaggcggcgacagcccagcgacccggggtggtgccgccgtccccaccggccaccgctctctctctctctctccctctcaacagcccactggaggaggtggtgatggtggcccggtggcacgccctccgctccgccagatctggtggaaggggaggcggcggcagcctagcgacccggcggtggcgccctccctcagccagatctggaggaaggcaacggcggggaggcggcggcacatcctcgggccgtcaggcgatggcggcaatggtggtgaaggccctcgtcctcgttaacatccgacgacgtacgcggtggtggagaaggccggcgcggagggcgatgtgacggcctgcgacgcgaagtgttatgtgttctgtgctgtgttcatgatgttcttgacatgtttttgaagttcttgatttgtgttcttgatgtacttggctttattcgtgcttggatcagcttgattcgagccgagccggtattattttaggctcgttcatcttaac

SEQ ID NO: 3290 - DNA, 513 bp, Oryza sativa
  Clone ID: PAT_MRT4530_102988C.1
cggaaaaaaaaaaaaaaaagaaaaaaaaaaaaaaaaaaaaaaaaaaaaaaaaaaaaaaaaaaaaaaaaaaaaaaaaagaaaaaattaaaaaaaaaaaaaccaaaaaaaaattcttcagttcttccccaccaaacaatacgggaaaaaaaacatatacacttctagtgattgtctgattgatcatcaatggctagcaaggtcgtcttcttcgcgggggggctcatgggggccatgggggccatctccggcgcgcacttgaccaagtcgaaaatgaggttcaggaacaggcagggccagcggaaggggcagaacagcccgttgaacccgtgccggaaggggttcaaccggaagttaaccggccggaaaaggttccagccgatgttccgccgcccgggcgcgctcggcctgcgaatgcagggctgccaacacttgcaggacgtgagccgcaagtgccgttgccccgccatccgccggatggtgaggagctacaaggaaagcatgccgatgcccctg

SEQ ID NO: 3291 - DNA, 308 bp, Oryza sativa
  Clone ID: PAT_MRT4530_102989C.1
attcggcacgaggaaatcctcacgcctcgcgtgccgcgccgcgccgggccaccgcgacggggcgcagatccaccgccgcaatgcccgcgaccccgatgacgaccaccggcggcggcgagcgaagccccgtcgacctcctccgcggcggcggatgaggacgaccgcgtcttcctcgtcctccacaggtggtggagggaggcgcaggaagggggaggggatcgaggcggccggggtgccgtacgccgcggcgccgtcgggcccgacctcctacggcatcggcatgaaggtgctcagcatgttcatctccg

SEQ ID NO: 3292 - DNA, 567 bp, Oryza sativa
  Clone ID: PAT_MRT4530_10298C.1
atgggtgaagcaatcaataacgtcgatcgggtgtcggcttcaatcgttcagacttcagacctcagcggccttgtcgaggaagaaggggatactgtcatggagaagagagatgggatgtatccactgcaaatggcacaagtgggagaagcaatcaacaacgtggatcgggtgccagcttcagtcgttcagacctcagttcgctttaagctattattagcagatggcaaaaatgccgtcccttccgacgtcgccacgccatgggtcgtctccgtcgcccgggcgctcctctgcatgagggcctccactctccgcgccgcggctgctggtactgaggctttgagggagaagggagaaggcgacggtggcggtgggggaagggagaaggcagcggcggccggcggggattgggcatgcggcggcggagttagaggctggactggaccgaaccttcgttggattgggccagaaatgggtcgcgaggcggcgacgctgccgggggcggcggggggaggagccgcgctgaacctgctctcgaggaggatgaactgctgcgctgcagctcaatga

SEQ ID NO: 3293 - DNA, 1353 bp, Oryza sativa
  Clone ID: PAT_MRT4530_102990C.1
atggatcttgacaagtccacttccaccggcgcgtcgctgaagaagttgcaggaagacggcgctctccccggtcgcgggaccatggagagagaaccaggaggtattgaacccgagcttgtcctgggccgcatggttgcggttgaggactacattctctgtggttttcttcttcctccttccgagtttctacttttggtcttgaatttctacgatagaaaattcggatcgggtgaggaacaaccagacaagatttcgtcttggaccgccaaacccaccttaaccccttcccttcagtccttcatcgatatcatcgatgacctccgagtacgagggttgtcggggtatgaagtcgctgccgacttcattggtttgaacagcgaaaccgtggagcgccgcgtcggtcaagtgatgatcagtggccctagaacggtgagtaacgtccccatccctctttgcgagaagggggcagccgaacgcgaagccgcaatcaacgaggagctccaaatagagatggggagcatcctacaggccggcgctcgtggcataggtcgcgagattgcggaggcgagggcggcggcagcgtcgtcggcgaacgaacgcgctgacctggcggaggtccgcgaggacctccaaaagatgaggaagctggtggccggcaacgagcggcaacgagatgtcgatgtcgaggatgtccagcagcgcgggcggcctgagttgcctgtaatcgttccggcacttgcgctcgagccgtatgtgccgctggacgacgtggaccaaaatctgtctgtggaaacgggcatggcgacgacttccttagacctcgagagtgcgcttgccgaccgagatcgtcgcatccaatactggaggacgaagtttgaggtggcagaactcgagaggactatgttagaagtgaacaaggatcgggccgtggaagcactccgaggttgtgaggtgtggttcaactcgtacctttggagttgttgtacaaccatggcgggagtctgcaaggaactccgagtacctcgcggggatcccgaggagtctacggccggatacatctcatggctgaatgggcctgcgcccaactcgaagtactatgccgtttgccctcttgacctatccgttgctctgcgggtgagaaacaaaggcgaagcagatcttgactcccagcctgatgcagtaatcctggaagtcgacactgatgaactgggagccgttgtctgttatgatgcggtgaggcaatccgtatctgcagaatatccctttgatgaatttgatagcgttttcggccttgatttcccccgttggtgtcgcttcaatccacatagtgaatttgtcaatcgtcacgaatag

SEQ ID NO: 3294 - DNA, 3631 bp, Oryza sativa
  Clone ID: PAT_MRT4530_102991C.1
tgttgatttggtttgtgctttatgtgataacggtggtgaaattgcaaggtgcacgtccttttctttgctcttggataatttttatatacagcaaacagatatagttcacttgttcgactgtgtcatcccggtccctaaacttgcagatcactcgtttaggtcctccaacttgtttagttgtgtcaccctggtcccgtcctatttgacccagataatattcaaatccaagtttagggaccggggtgacacaactgaacaagttggaggacctaaacgagtgatctgcaagtttagggaccgggatgacacagtcgaacaagtttgaggacctgaatggtcgatttgcgagtttagggaccgggatgacacagcgctgcgaaggcaagtgcctcagatcttttcatgccgtcagggatgctggtgaagattgtcaaacactaggctacactaggcgtcaatttgatgtatctgttctgaatcttccactcatgaatgataccgtttttacttcacatgttttacacatattagatggtaacattcacttagctttcccatatttacaggcattgaatccttttttgtgcaagaattgtgagcttgaaaaatatcaatgttttgcatgcatgaggttgggttcagctaaaacagatactcctgaggtatttccctgtgcatctgcgaattgtggttatttctaccatgctaaatgcgttgcacagttactctttactgaaaatgaagccaaagcattggaatatacaacaaagatagccagtggggtaaaatttgcatgcccactgcacaaatgtgatgtttgcaagtatggtgaaaacaaggatgaaaaggagctacagtttgctgtgtgccgacggaaaatcgcctttgatgacttcgttgacaatggtgtatttcatttccaaagggcgtgggagggccttcttcccaataaccgaatattaatattttgcctgaaacatgatattgatcctaaacttagaaccccgacaagagatcatattaaatttcctgataatcctgctgtcacgagaaagcccttcgatgtaaatggaatgaacaagaaggtggttaagatacggcttcttgaggattgtccacctgccccattgtccagtgacaaaaaatcatttggtacagtgaaccgtttttcctcaagtgatgtgataaccaaaaagaggaaagtgcttgtgtctggaggtacaaaacattgtgctcttagtgctgtggctagggaaaaaacatcagttccgtcatttatccccttgagctcattccctgttattgataaaagcactgagaggaggattcatgagttcgcacagaaagtgtcatctgatataaccattgaggatatacaaaaaaagctagtggttccatctacacacacaccggtttcgaagaatactgataagattacattgggaatggtgcaaagatctgttgaggctataaatgctgctctgcatatgttagaaaatggtgcatccatagaagatgtcaaatctgtatgtgcacctagtgatcttttccaacttgcaaggtggaagaataaactgaatatatatcttgcaccatttcttcatggcatgcgctacacatcttatgggcgccacttcaccaaactggacaaactcgagcagaaaacaacctgtgggcaagccctcgtgtacgggacaggggcctcaaagcacagattaaggcccgaaccatggggggcaggtcctcgtgtcaagggaccagggttcatggactttcttggctggctttggctgctgaggcttcttcgtgaaaaagccgtgggggtgattgtagataggctacaatggtatattgaaagtggtgatacggttgttgacttttgctgtggctcaaatgattttagcttattattgaaggaaaagcttgaagcttctgaaaaaagttgcttctataaaaattttgatcttattcaaccaaaggtggggatcatgggattgaatcctccgtttgggtttaaagcttctcttgctaatcaattcattaataaagccctcactttcaagcccaagctgatcatactcattgttcctaaggaaactgaaaggctggacaggaaatacccaccatatgagctaatatgggaggattctcatcagcttgcaggaaagtcgttctatttgcctgggtcgcttgatgctgataacaagattatggaacaatggaatatgtcaccacctcctctttctctatggagccgtagtgattgggctcggaaacacaaggaaatagctaaaacaatggggcacatcagtaaaaatgtgtggtgcttagatgatactcaaaggtctgttgtaaacacagggcatgcacaaatggctaatgagggggatgatgaccttgacaacaaagaaagacaagaagaggcaccactaaatgcctctgttatagatcagttgttgtctgacacataccatgatcctactagctcgccaggggactactggacagataccaatggaagatcacggcagccttgcaactacgagggaagaaatgatccaacccatgaatatcatgcaggcatgggttgtggatctgacatgagcatttcatcatctgacaagagcgattgtgaaaaacaaaccgaaactatgtcaaactcagagcatgggcatactggttcagaagcccacgatcatgttggaagtgcacctgtggaacaaccaactggttttgcggattgtgatgaggtgacatcagctggcattgagtaccatagcctggaaaattcaccactcacagagagacctgcagatgcagctggagttcaatacaagatgctggaagacacaccacctcctctggatgaactcgtacctggcttttctgggcagccgatcgtttcacttcctggaggaggcaggctttcagctgggttgcaatatcaaaggctggaagacacactgtccagagggacacctgaagctggtgctggttgcagacagctggaagattcactacctgcaccccctgctgcttctgaggtcgatgcagtggttgcaaaatatctgccacagacaacgagtgatctccctgcattaccgttcgttcctgctccaagaattcccttccctggactccagttcgccccaagaaatgacttgtggcaaggatggtacccacctccagaatttctgtccagaggcatggaccatccgcctttcatgcacggctcctctggttggctcgacgactagaggagtgagacattaacccaagccctagtaaagattactgacagccgctgttagcaaagaccacttgtgcagttgtgcttcaacctggcgaggaaggtgaaaaggtgaaaacaccagacttggttcttctcttgtcacgagccaccgtgtagagtctgtagagtacagctacttgtgctgtgcctcggcctatcttttcaaggtgcgagcttgttttgtcctacggcctgcttttagaatacgctgaggctacatgctactaccaattttctggacaggaaacttccaaaactctccttgccaatccacgcctgttgatgtactaggacgtattttgcctctttccttgttggttggttggttggttgcactct

SEQ ID NO: 3295 - DNA, 1440 bp, Oryza sativa
  unsure (1)..(1440): unsure at all n locations
  Clone ID: PAT_MRT4530_102992C.1
cttcgggtcataagggtattgagcttttagaatggtaaggcgggccataatcaaatttttaaggggcggaagnaggatatgtacaacgcggcttttttaaggtgcccggnatattgtggggtttgtttgagtngggttgtcaagacttttgaattgaagacgtcaggggcaactatccaagggccaaagattttgattattcatggattggctaggtatnatcttagtgatctaaaatggagaatgntggtgtcaaatcggattgtatgnnatgacacagacccaatttgagaattagcttttagagnatgcgccggtatggtttaaagatgaacccacttaatatgtgcttttggtgtgtcggcggggaagttcttaggattcatggtgcatgagagaggagttgagatcatcctaaagaagatagaaaaaattcgtgatttcaaagcgccgacatgcaagaaggaagttcaaaagttgctaggtaaggtgaattatttgagatgatttatttctaacctagcaggtaaaatcgatgcttttgttcctatacttctcttgaaaaaagaagccgattttacttgggagccaaaacaacaagaggcgtttgaggagttgaagaggtatttgtctactttacccgttgtgcgagcgcctaaagccggaaaaccttttcggttatatattgcctccgaagacaaagtcattggtgccgttttgacgcaagaggaagatggcaaggaatatatcattacatatttgagccgccgtcttttagatgtcgaaacaaggtatgtctttattgagagactttgtttatgcttatactatgcttgtaccaaattgaggcattatttgttatctagtacatgcatagttgcttgtcaagccgatgttattaaacacatgttgcaaaggccaattctaagtgggagaattggcaagcgggcatatgctttgatagaatattatttggcttatgaaccattaaaatctatgaaaggccaaattgtatgtgattttatagtggaccatcatgtagnnnnnnnnnnnnnnnnnnnnnnnnnnnnnnnnnnnnnnnnnnnnnnnnnnnnnnnnnnnnnnnatgcatagcttgagtattctataggggcacctaaatagcttggcgcggtgggctcaactggccggtttccaagtgggaaacctgtcgtgccaactgcattaaagaatcgggcaacgcgcggggaaaaggcgggtttgcgtaatgggnnnnnnnnnnnnnnnnnnnnnnnnnnnnnnnnnnnnnnnnnnnnnnnnnnnnnnnnnnnnnnnnnnnnnnnnnnnnnnnnnnnnnnnnnnnnnnnnnnnnnnnnnnnnnnnnnnnnnnnnnnnnnnnnnnnnnnnnnnnnnnnnnnnnnnnnnnnnnnnnnnnnnnnnnnnnnnnnnnnnnnnnnaggc

SEQ ID NO: 3296 - DNA, 411 bp, Oryza sativa
  Clone ID: PAT_MRT4530_102994C.1
atgaggaggcacaagaggagcatgaggaggaggcatggggaggagctcgagcacggcagccgccggcccccgctcgtcgcgaccgccgacctccgcactcgccgtcgtcatcatgtcgcgcgtgcctatatctcgtcgtcgccgccttccacctctcgcgcacctggatctcgtcggcgccaccttccacctcgccgcgcctggatctcgtcgtcgttaccatacacctcgcgcgtgcccggatatctcgtcgtcatcgcctctcgcccgcccggatcctcgtcgttgttgcctcctgcctcatgcgggcggatccccgtcgccgtcgccccccgcctcacgtgcgctggcgtcctcgcttcagagagggccagtaaggagctcgaggatgggccgatggggttgccctag

SEQ ID NO: 3297 - DNA, 432 bp, Oryza sativa
  Clone ID: PAT_MRT4530_102995C.1
tttttgtttttttttttgttttggttttttttttttttttttttttttttttttttttttttttggaacaaaataataaaacattttacttatcccggaaaaaacggggggggtattcttgggatcgggggggcccccaccaaaagggggttcccaaataaaagggggcccggatttccccgaaaggccccaaaggtaagctactggcggggccccaaacccccaggcaactttgaggcccgaagaccccccccccttttattgctccaagggtttttttttttgaaggaatgaaggctttgatgacttcatacaatttaccccatgattttggggctgaattgggctccctcttgaaccaaaaacccctttctggctcaaaaaaggctgggtgaaaatgcctggtgcttttacgggaccaaacaaaccctt

SEQ ID NO: 3298 - DNA, 734 bp, Oryza sativa
  Clone ID: PAT_MRT4530_102996C.1
taaccagacaaaaaatcaccccaaaaaaaaacgaagcgtgcgaggagaggagtgtcggcttcacggataaggggttgtcgtcggcggatgtcatctctcgggttttctggcctttggatggtgaaataatcaaatcaataaggctctccagtcggcaggatgaggattttatcgcttggcatcctgataaaatgggccagttttcggttagaagtgcttatatgttagcggttcagctcgcaaatgctggggagagctctagctcctcaggaaatgatactaagaaagcgtggaaccatgtttggaagtgtaatatcccccaaaaggtcaaagtgttctcatggagagctatctcaaactgtcttcccactatggtgaataaaaagaaacgaaacctggaattgtcggacatctgcagtatctgcggcctagagcctgaagatgtggcccatgctttgtggcgttgcccgcatgccaggcgataccgggacctaatgagctccgagatgcaagtacagcgtatcctgcacgggtctggggaggggtctggttggatccttgatcttttggaatcaatttcagaggatgatcgccctgtctttcttatgtcattgtggcgaatctggtatacacgcaatgagattactcacgataaagcggcgccatatgtggaagtttctaaacgcttcgttctgagttatgtaaactctctgatggaaataaaaatttctatc

SEQ ID NO: 3299 - DNA, 345 bp, Oryza sativa
  unsure (1)..(345): unsure at all n locations
  Clone ID: PAT_MRT4530_102997C.1
tgtgtcttctctgctctctcgccattgccgccgcggcgccgcctcctcctcctcttcttcccccgctggtncggcgaatacggcggcaagcngnngccggtggagacggggtagcgtccgncgccacactgcgccgacctgggtgaccgactgaagttgaaggtgaaggaaaggggacgacgacgacgtcaggtgtggaggaagtnacttgcaaggttgccggcgccgcgtcttccttcggagttcgtactcgaggggngtcttcctccctagaggagtgtacgnttcttctcccggcctctacggcagaggtagtagtagtactagcccaagaagaggaagagc

SEQ ID NO: 3300 - DNA, 6076 bp, Oryza sativa
  Clone ID: PAT_MRT4530_102998C.1
atgggttttgtctccggcatcgacgacttcgtcttccctcccgggcaggcgttccagttcggcagcctcgacttcatcactaacgactttggcaatatttctctccttgactcggatccgaaccagtcagggagaggtcaggcctctgccccgttcggtctcccaaactcggccgagatctactccaagatcatctcatctgagtcggcttcaaactactcggaagagatccaatctacttcgacacgacctgatcaagacgatggggcctatccttcaatcctgatgaagctccccgatgacttggctgctatttttaccacaaggatgtctcctccccgtaggtctagacgggatctggtctctgctccaatccaatctagctccagggaagtcggcgtcatactccagcctctcgggacagtttcgacggaagaattggacggctacctcagcttccccggtgtcgactctcgaccgacggagatcctcgagtacgacaacttcggctaccactacgactacagcaacctcgacgacttcgacgaaggctacgaagacaactacatgcctctcttctttggcgttttcatggctaataacgagacggcataacagcgccaagcccgagaagcagaagaacaacgcacatgacaagaagctgagcgtcgccgactggaggaggagcgactagcacaagagcgagaccggctgcagcgtgagcaacaggaacgcgaacaggctgcgaaggaggctgaggaccggcaacagcgagccttggaggtcgggcgacgagcacgagaacttattggacagcaagatgttgaggggacagcggtttttcgcaccctgcaatagaacgcggtagcggcaatcaccctcctggacactctgcttcaggaagatgcacccaaccacgtcgtcaacatcttaaaccaaaccaagcccatgatcgcctcctcggtcccaattaactcctcaagcatccgtacgccgactggcagccgagttccatctcttcgatttcaagattatcatcaaccaagcctcagcgttgccgccgtaggatccaatcgtaggagcagggatcatggtgaacgatctgttcactcacctgtcgataggcatagggagcgcagggctgaacagccccgctcttcgcgtcgcaggcgtcccgtcgatcttcgcgatactatcaatcggcgtcacgcgaaagaggctatattccccaccattcaccagatcgttacgacgacgatgtggatggagttgccgccttcacaagcgacctgcgtcgagtggattggccagccggcttcaagccgactggaatcgagaagtacgacggcacaacaaatcctgagtcttggctcaccgtctacggtctcgcaattcgtgcagcagaaggagatagcaaagccatggctaattatctgcccgtggccttagtggactctgcccggtcctggcttcacgggttaccccgtggcacgattggatcttgggcagagcttcgcgagcacttcatcgccaacttccagggcacttttgaacgccctggcacccagttgacctctacaacgtcatctagaagcctggagaatcccttcgagattatatccgacgtttttctgaacaacgcaacaagatctctgacattaccgacgacgttatcattgccgccttcactaaaggtattcgtcatgaacttttagtcggcaagtttggacgcaagcctcccaggacagtcaagcagatgttcgaaaaggccaacgaatacgccaaagcagaagacgatgtcactgcatctaagcagtcgggcagtacctggaaacaaaagaaagatgcgccaactacaggagggagtggaagtgccaatcacaaggatcgcaagcgtaagcccgaggaacttgtggcaactactacaccatcttcccgacagcaatcacgtgtcaatacctttgacaagattatgaatgcccaatgctcacatcatccgaactcaaaccatgcggccaaagattgcttcgtttataaacagttcgcagaacaatataccaagaaagcgcggaagccaactgatggagaacagagctcgtcaaaaaagaaagatgaagaagacgatgcaccgattggctttcaagatcctcgaaaggaactcaatcacatttttggtggccccatggcatatgagtccaagagcaagcaaaagctgactgaacgggagatcaacgccgtccagcccgatacaccccaatatcttcggtggtcggagacaacaatcaagtttgactgctcggatcatcctgaccgagtggtccacccggggcggtaccccctggtactagacccagtggttcacaacgtcaaactccgacgatccctcattgatggtggcagtgcactcaatatcctttttgccaagactctggatgacatgcggatccctcggactgagctgaagccgagtagtgcgtcctttcatggagtcatccccgggctatcttctactcggccagatcactttgccggtcaccttcggcattcgggagaactttcgcacagagaacatttgcttcgaagttgttgatttcgagacagcgtatcacgctatactcggacacccggcgttagccaagttcatggccgtcccacattacacctacatgatgatgaagatgccaggacctcgaggagtcatatctttgcggagcaacatcaagcaagccgtcacctgcgataaggaaagctgcgagatggcccagacacgtgagatcacacttgctcgagaggagatccgactggctgcatcaacgacaaccgaaggagaagtgcctgcacccaagatatcaaagaacagagaaagcgacgccaagaccaagaaaattccccttgacccttctgatcctactaaaactgctgctaataaagatatttttgcatggaaaccatctgatatgcctggtattcctagagaggtgattgagcactctttacatgttaaggaaggcgctaaacctgttaagcaacgactccaccgtttcgcacaagatagaaaagacgcaatcaaggaggaattaaccaagctgttagcagccgggttcattaaggaagtcctacatcccgactggctggcaaacccagttctggttcggaagaaaacaggacaatggcgtatgtgtgttgactacaccgacctcaataaatcttgtcctaaggatccctttgggttacctcgcattgaccaggtagttgactcaatggccggctgcgagttactcagctttttggattgctactcgggttatcatcagatcagcttaaaagagtccgactgcttgaagacctcattcattacgccttttggggcttactgctacatcactatgcccttcggattgaagaacgttggagcaacttatcaatgcatgatccagaggtgtttttcaacttagattggccgcaatgttgaagcctatgtcgacgacgtcgttatcaagaccaagtagaaggatgatttgattgcagatctagaagagacctttgccagcatccgcgcattcaggatgaagttgaatcctgagaaatgcaccttcggagtaccgtcagggaagctgcttggctttatggtgtcccgtaggggtatacaagccaacctggagaaaatcaatgccatcctcaacatgaaaccgccgagttcccagaaagatgtccaaaagctgactggatgcatggcggcactcagccggatcgtttcacgactcggcgagcggggatgccctttttcaagttgctgaagaaaaccaacaatttccagttgggacccgaagcctagaaagcctttgaagacttcaagaaacttctcacaactccaccagtcctggcttcaccacatccgcaagaaccactgctattatatgtgtcggtaacatctcaagttgtgagcacagtcctggttgtcgagcgggaagaagatggccatgttcaaaaagtccaacgaccaatttacttcgttagcgaggttttggccgactccaagaaaagatatccccaggtacaaaagttgttatatggtgttttaattaccatcgggaaattatcccactattttcaaggtcactcggtcacggtggtcacgtcatttccactcggagatatacttcgtaatcgtgaggcaaatggacggatagcaaagtgggccctagagttgatgtctttggatctatccttcaagccacgcacctcaatcaagtcccaggccttggcagattttgtcgccgagtggaccgagtgccaagaagacacgcctaaggaaaagatggaatactgaaccatgcactttgacgggtcaaagaggctttcaggcactggagcaggggttgtactgatttccccaactggagaaaggttaagctacgtactgtggatacatttttctgcatctcacaatgtggcagaatatgaggcacttcttcatggattaaggatcgcggaatccttagggattcggcgtctgatagtacatggagattctcagttggtcgttaatcaagtcatgaaagaatggtcctgcctcgatgacaatacggctgcttatcgacaggaggtacgcaagttggaagataaattcgatggcctggagttaacccatgttctccggcatgataatgaagcggccgacaggttggccaattttggttcgaaacgagaaacagctccttgtgatgtgtttgttgagcatctttatgaaccaaccgtaccaagaaaagaaataaccgaggcggtagacattcaaaaagtaagcatgatcgacaccgactggagagagcccttcatcaagtttttaacaaagcaagcactccctcaagataaagacgaagccgagcgaatttccaggcgcagcaagctttatgtcatgcataagaccgagctgtatgagaagagcccatcaggaattctgcaacgctgtgtttctttggaggagggaaggcaattgctaaaagatatccactcgggcatttgtggaaatcacgctggcgcacgaaccattgttggcaaggcttatcgcagggttttttctggcccaccgcagtatccgacgccggcaaaattgtgcgaacatgcgaaggttgtcaattttttgccagacaaattcatctaccaactcaggagttgcaaactatcccattgtcctgaccgttcgcggtttgggggctcaatatggttggccctttcaaaaaggctaccggtggtttcactcatctttttgtagctgtggacaagttttccaagtggattgaagccaaaccaatcatcacaatcacagcggacaaggctagagatttcttcatcaacatcgtgcactggttcggggtacccaatcgaattatcactgataatggtactcaattcactaatggtgtgtttaaagatttttatgaagactttggcatcaaaatttactatgcctccgtagcgcatcctatgagcaatggacaaattgaacgcgccaatggtatggtacttcaaggcatcaaagcacaagtctttgaccgactacgtccctacgccggcaagtgggttgatcaactgccatctatactttggtctctgcgcactacacccagtcgggctacagggcaatcaccgttttttctggtttatggcgcggaagcaatgttgccgagtgaggtagaattcgaatctttgcgatttcgcaacttcaaggagcgctacggagaagaccgagttgatgatcttaaccgactggaggaagctcgcgaggcagccttgattcagtcggcccggtatttacaagggttgcggcgctatcacaaccgcaatgttcgatcgcaggcattcttggtcggagacatggttttgaggaagattcaatctacacgagatcggcacaagttatctcctctatgggagggaccgttcataatttctgaggttactcggccatgttcttatcgactcaagcgcgaagacggtactcacgtcgacaactcttgaaatattgagtatcttcgttgtttttatgcttaggcattactcatgtatattcttttcc

SEQ ID NO: 3301 - DNA, 668 bp, Oryza sativa
  Clone ID: PAT_MRT4530_102999C.1
cgggctgcaggctcccatatgttgttgacgtacatgctttggtcaccggctcaccgctagggttttgcactgactcaactataatgatgtgatacattgcactcgtggtaatacgatgttgtacttctatttactatcacagttaccatttgccacgacaaacatgataaatattatttacagttttgtataattatggccctctgctaatttatggtaagcctactaggctaatacatagcataccctcaggtcgcctatatttctatttcctatcaagcttgtattaggtattaattttgcatttttctttatattccagattttgtacttgaaggtagtgctggcacaccatttgaaggtggatattattacgggaaactcaaatttccacctgattacccttttaagcctccaagcatcaggtaatggaactttattttgtaatattgaattactgaaattgaaggaatgcttacaatgtgatagaagagttatacgtatttgggattagtgaacattttgaaactttggttttcatatctgacttgttttattgggattagtgaacactttgaactttggttttgcatatctgacttgttttattgttcagcatgacaactcctagcggaaggtttgcccctcacaaaagaatatgcctatca

SEQ ID NO: 3302 - DNA, 3971 bp, Oryza sativa
  Clone ID: PAT_MRT4530_10299C.1
catctctataggcattaccatttttttctcttctcttttttaccttattcatgtacagactagtacagagcaagccatggctcccttccaagattttgtacaggagacaggccgcagaacaggaggttgagggggcaaaaaaaaaaattttatttctgaggttgcgccttggtagagggggttgccatggcccgtagcctcttgccaacctccgtgaagctcggtctttctgacggttccgacgaccagcattgctccatcagtgacctccaccgagggtcgcatgactcgggcaccggagggcgcagggtgttgtttacaatcccgcctatgatggcgccataatgcaattcggcataaggctcttcaccagtgagcagctcccacattacaattccgaaggagaaaacatcgaccttttcagaaacaaggctgctgcttccattcaacagctccggggccatccaaggaagtgttcctcgcaccccaccagatattagcgtctggcatttaactttcgacaagcccaaatcaccaaccttgcatatagggtgctgaggatctcttagattgacaagcagattatcactctttaggtcaaagtgtacaatgttcttctcatgcaaatactccataccaaacgcaacatccattgcaatcaggagacgcctacgccgatcaaatatcttttcatgtctttgcaatgcttgtcgaagagaaccattagccatgtattcagttactgttgcaacagatccacctggtccatccagtacaacaccatagaaagctacaacattcggatggtgcaatgatgcaagcttgtcagcttcattccagaaatcagttctcatccgctcttgctcagatgccttcccagcaaagcatcgatcattgatcctttttatagcaacatcggaacctctccattttccatggtaaacagtaccaaaggttccagaacccagttcccgcaattcttctagatcactattctttattatctgaagattatcaatatcatctaaaactttaactccttggcttgttttgtctgattgattgttcaccgcatcctccaattttggatcaattacagctccttgtttatctgtgtgatcaccagagaatacggttggtttttcagggaaaggtgactgaaggacagatgctgccacaccctcagcaacagcttgtaactgtcgcttaatagtttcttctccgtatcctttgctcatttgagagggttcaggatagatgtccttaaaagtgcggtcctggatgagtggaagattgccttcttctaagagtgtagcagcatttgaactgttgatggcaagcccatggccttccacatatggatctccagaaacagcaggctccttagccaacttattcagtcttggaggcgctacagaagcatttcccactgcattccaaggatcctgatttgagaatagagaatctgtgtaagctggatcacgtgtggcttccacactatcaataccagcggtcgcctgcagtggaatttgactgttgccattagggggagcggaaaccacatgattcagcatttccgcaggtcgcagtggagaatgctcaacaggaacctgaacaccagcactagcaggtcttgcaagaaatctttcgttagaaatatgtggtttggcaggtacaccaaggttgtttgagacaggcacattctgtaacacatttagctggtggcctatctcagaatgaagatgttgtgaatcaaaagctgaagatgactgttcagtatgtctcacaagattgtcctcagctggtgcagaaaaggcattagtaatacccaaatgataacctccagcttgagacttgtagatggaaccaccaccaatattcacatgcgatggcttctcaagttttccatcaccaatagcaccatgtggactggcaggctttccttgcacactagattctggaggggcaataggtcccaaatgaactccttgcatctgtgcattgatagctctgacataatcatggggaagatcatggccatattctctaaatgggtctggtacctgattatttgaattcttaaatgcactagcatctatcccttgtggattgctaataactccatttactggtatcagtgatggttgcatgctataagaattctgctgttgatgctggtacatgacaggatcttcagaacggggctgtggtggattccccgcaaatgctagtctggaagtaaccctggtgtttggaaccaatccactagcatctggaaatgatgttggctggagtacatgattgtttgcagcaaagttttgttcagtttgcatcatccctgccgtgacctcagatcttggctctactatgtaattagcaggagttcctgcggttgcacctggaatatgttgtttggtaacattctcttgatggaggctgtaaaacactggagcagcatcaggattgttcactccatgtggagtgccctgctcttggatcatgttgtccgaatgagcatgaggcagtgctttctggcacattgtgcaatcatcatacctcaatgcaggcatggtagccgagctaatcaccattggaattgtacctgaggttgtcaccaacggcgtgctcgctgaacttgtcattactgtctggacgccatatctgtgtgcatcactagtctgcaaatgcacaggaggcaaaggaggaagctgtgacagtggctgtagcaccctgtaactctgatcacctgtagcttgcattggccttgtgttatgaacgttctctaaaacaggttctgaagctggagaagctggcttcatggtgccgacttgagcggcagaggttggcatggagttcgtcaccggaatgctgggcatatatgggctcatttgcacaggaacaaaattgacagattggggcacaccatgcacacccaattgctgcgcattgatgtattggacttgctgtggctccctgaacgactgcgccatctgtggaatgtatgaagcaacttgaggctgctgctgctgctgctgctgctgtggtgcataagaggcaacttgtggttgttgatgcggcgcataagaagcaacttgtggcggctgatgcgatggcgcgtaagaggcaacttgatgcggctgcggcggcaatggctctgttctaaccatgatatgattttgtgcctggatacccatcgccggagatgaagctgtcacggcactgaatcccaaggagtccgggaaggcgccatggtatttgttcccacctgaatacagatattccggcggaagcgaaggcggcggcacggcagcctgcggcgacataccttcgacggcaccgccgtgctcggaggcctcggagttgtgcgccgatgacccagcgctggcgacgctctccttccgccgcatggccgcgacggactccgcggagacgcagttgatggcgtcgatgtagcgctgccccgactcgtcgacggcggcagcgaggtgcgacccggagccggacgcccccgcggcggccgcctcgctcccggaggccgggaagaggaacacccggagcttggcggagccgtcgggcgcggcggcggccagcttctcgtactcctccatcatgttctcgtagtcctccgtgcaggacacggagatgagcgagtcgaggtcctcaccggggagctggtacttgacgagcaccccgccgccgccgccgccgccggctccccccgcgtcgtccaccgcctccaccttcctcatgagctccccgaacgaggcgacgcgcggcacggagatgagccgcatctgcccgccgacgtagcgcagcgccccgtccccttgcctcggcgcgatccgccccccgaagctgcacagcagcttcaccttccccgcccccgcctcctcctccgccgccgccccagccctcgcgctcgggctactcggatcccccactcccatccccacccccctgctccccgccat

SEQ ID NO: 3303 - DNA, 860 bp, Oryza sativa
  Clone ID: PAT_MRT4530_1029C.1
tcacgactccacgtcggagccgagccgagctggcacgcctgctcgtggtctcgcaggcgcgcagcgagcttgtagaagaatcgaaggaagcaccgcgcctgggctcgcgagccatgaagccacgagccaaaccctcacgttggaggagtcggagccccaggcgtcgcctcgtccggtccccccatgcaactgccccaaatccctcggcggcggcgccagatccgccgccgccgccgccgtggtcgtcgtcgtggtcgtcgtcgccgccagatccgccgccaccggtgctctctgccgccgagctcgcgccggagaggggaggggagcagccggtgagctccccgccaccagatccgcccgcggcgcctgaggagctccgcttccggtgcaccgtctgcgggaaggccttcgcctcgtaccaggcgctcggcggacacaagtccagccaccggaagccgccttccccgggagaccactacggcgccgccgccgcggcgcagcagctggcatccgctggtgactcgaaggaggactcggcgtcgtcagcggccgggagcactggcccgcaccggtgcaccatctgcaggaggagcttcgcgacggggcaggcgctcggcggccacaagcgctgccactactgggacggcacgtcggtgtccgtctccgtctcggcgtccgcgtcggccgcctcgtcggccgtcacggcttcggcgtcaggttccgggtcgtcgagcgtgaggaactttgacctcaacctgaaaccggtgccggagacggtggccgctggcgtcagaaggtggggagaggaggaggaggtgcagagccctttgccgttcaagaagcgccggctgtcaagccca

SEQ ID NO: 3304 - DNA, 633 bp, Oryza sativa
  Clone ID: PAT_MRT4530_102C.1
atgatgaacgaggctgagagagaggcggtggcgatccagctggggtggatctcggacctcctcgcggacaccgagcggttgatagccagcaacagaggctacgtgcgtgacctgctcgaatccatcgacgacggcacatgccccttcaccttcgccgagctccaagacgagatccgcgacctccgcgagtcaagggccgtcgacgccgcgctggacgggatcaaggagatgctcgacgacgtgcgagccatcctcacccgcgcttcgtcccatggtgctcgcgatcataagttgaagttcagagcactacagcaaatggcatatttaactttttgccactccggagaggtgaggtggcaaaggatttgccactttgttcttcgttacatggatatattgccacagacaagaaggggggaaatcaaaaccgcccatctgtataaaaatacaggaacaggttatgaaagagttgccttgtattcagacttgatcataacatttcagttgtcaaaaatagagcataacattccacaccgcaaatttatgatcaatcatattatatacagatatccaaggaaagtaggaaactacagcaaatgccagaacgcacagttgttcatgcatacattctag

SEQ ID NO: 3305 - DNA, 1673 bp, Oryza sativa
  Clone ID: PAT_MRT4530_103000C.1
gctattccaaattctagtgcagcctacgtattttaactgaacaacacatagtcaaataaaacaaaaatatttacagtgatataaagacatcaacgaattgacgcatagccaattgccatttgataacaccaagtttagtttacaaacgtatccataacataatcagcacagctaaaccaattttattggccacatttcagtatcttgcacaagtaattggcaaaaaagtatagagatacaatcaacacttcataccaggttggcacgttgttttttcagccttatcatcatcaatcatcctcgatatcccagctcaaatcctcatcatcttcagcaacactgagcctcttccgcaattcctcctttaaagcagagcttgagtcattattgctccctctcttctcttcatgctccccaagatcctcaatctcatcccactcaagatcctcttcctcggtcgttgttcgctgcctagacaccatggagtagtcactatccttgcttgagtcgcttgtctcatgctttgctccgtctttcaccgcatcatctcctgtgcttgaacgtggttcttcagtgacagctttcttgtcacttgattcttcaatgttcgaaacggatgcctcttccttctccctcttgtccaccaccaccatagagctgccgaaaacctccggttgcggtgcatcggcattctgctgttccttctccaaaccgcgtgattcttccactgcctcaacttccttttcttccacaatcctctcgctttccttatcccccgctacacgttcgacatcttcttcgatcggttcttgctttgatccttcctcattcgcttccgctctttgttgttcttcctcatcctcatcatccacctcccagctcaaatcctcctcgtcctcctccgccgcgaaaacccgcttcacgagctttgctctagcatcctcctgctgcttcaacctatgaacacggtagaagtacctcgcccagaacacctcgctctccaccgtgcccggcacgagcttctccaccatcccttccaacgcatcgctctcgtagcacaacgcctcgatctccccactcctctcatccacgctaaaccctaccctccacgccgcgaagtcatcggagtcctcaggatcggaggtgaacgtggccggatccgactggagcgcgcggagctgcgcttcgaagcggctgtaccggacctgccccgaggcggagctgggctcggattcgccgccgccgccgtccgagtgcccggtggcgggggctgcggcggcggcggcggcgacctgcgcgatggcgtccttgccctgcgcgacgatgtcggcgaggccgtcgagcgcgtgggcgtgcgccgggaggtcccgcgcggcgcgggccgcggcgtcgcggagcgcctcggtctcgcggcgcaggccggtgccgaactcggcgaggtcgcggcggtaggcctcgagcacggtctccgactgggaggtgagcgtcttgagcagcccgccgaagccccatcccccgcccccacccccacccccgccgccgccgacgtcgtcgtcagtgggtggggtcgacgtggatccggcgtgctcctgctccgtctccgtctccggcggcggcggcggggaggacgggccgggctcgggctcggcgaggatggacttgaagaaatccat

SEQ ID NO: 3306 - DNA, 364 bp, Oryza sativa
  Clone ID: PAT_MRT4530_103001C.1
ggatgaaaaatgattcttctttttgttgaacacgcacgaggaccacactccattccattaagaagaagaaaaaacacacttacacaggagagaccccttagatgaaaaatgataaggaagctattcccactaaacaagtggaattagtgtcttaagtggtgcttcatactatcgtgatgagcaatgcagacaaaagaactgccatggaggcaccgggcggggcggataacactatccaattccttgctttacaaaaaagaaatgcgctcttctgtcgctcggtgaggtaaagacttaagcctaccaaccgacttacctagtacatttgtacaactccacattcccaagaggacatcaccataac

SEQ ID NO: 3307 - DNA, 1131 bp, Oryza sativa
  Clone ID: PAT_MRT4530_103002C.1
atgaccggcgtcgatctctctccccggcgaggttggagagcctgctcaagcggctggacgctgcgggtggagcaggtcgctgcccacatcgaggagctcatcagagaagggggtgacgccgtggcgcgcggtccggtcgagcacttggtgcgccgtgccgccgagccgaaccgtcatctccgtctgcaccgctgccttcccgtccccagccatgccgccgcgtcgccttccctgttcccggtcgctgtcgccaccgccgacaacctgcgggtgaacctggtgagctatgttgtcgagctggtgaatgcggcgaagggcaaggtgaacatggagtacatgcggttggtggtcgacctcatggtgaagcgcggatggtattttagcgaagccacattcggtgatggcattctggcgaaaccccaacccgatgatggtaaaatgtcaattttctcgaatatatgggccgtcaaggaagacctcgaatccacggcccatgacacgatgggccctctcagtgtgctctcaacgggaaacaggacacaggcctttctttgggaaacaggaaaaaaaatgctagaaccagctgcaatatcgcttaacaagatcgtcttaaatcattacatggaaaatggaacacctactttcgcagcttcgcttcaacagatcaatgcagccagggcgtcattttgtttaccgatggacaagtccccacctaccgccgatttctctcctctccccacctaccgccatctgtcctcacactcaccggcgccggcgcaccgggtggggaagcctagaagggcggcggtcgaggagctccttgggcggcacggcgacgagctccctggcggcaccggtcgctgcctctctgtcaacccgtcgacgacgccacctccgctcgagatccgccactggggcgatggccggcggcgtagagatccacgagcggtcgtggcaggcgacggttgcggtcatcgacgggctgacgggagggaggcgcggtcgtggcgggcggcggtggcggtcgtcgacgggctgatgggagggaggtcggcgacggcggcagtggcgcggtcgtggtgggccccggacgacggccacgcttggcgccatggctctttgttcctatag

SEQ ID NO: 3308 - DNA, 1328 bp, Oryza sativa
  Clone ID: PAT_MRT4530_103003C.1
ccggccggagaaggctcaatcaaggctgggctcgtcgtcctcctctcctccccctcctcctgtctcaacagaaaacccaagtaagtcgtcgccgccgccgccgccgcaatcgtgggtgatgggtcgtgctcgtcggagcgccggcggcggcctccactgctgcctggccttcctcttcaagttcctctccttcctccaggccttcgccgctgtctccgccctactctacgccgcatggatcctctcccgttgggcgcgccaccaccatctccacctccaagacctactccccgacctctggttcgtctgcgccctcatggctgccggcctcttctactgcctgcttctcctcgccggatgcgttgctgccgagatcaacagcccctgcttcctctgcttctacaccatcttggctgtcgttatgatgctcctcgaagctgctctcgccgctgatttattctttaacaaacactggatccaggatttgccatatgaccgcactggagaactcgataatctactttccttcatccaaactaatctcgacctctgcaagtgggctgctcttgctattgttgctacacaggcactttcacttctcctggcaaccatcttacgatccatgctttctaccccgagtgccgactatgacagtgatgaagattttgtggtcataaggaggccacttctggttgcccaaggtgctcccgcttatcttcctaccaccgccgatactagaggtttccatccagacctatggagctcaagaatgagacacaagtatggattgaactcaagcaactacacctacaacacactggatccaaatgcaccaccacctcagtaagcagcgtgtgactgatgatgatgttagagatgatgaagaagcatgcctttgtcccaaacacctagtatatacaaacaccatttcttctaatattgtactatcattgtttgcatggttagtaatttttcattttatgccctctggattgtacatagttgcatatttcattgcattttagtactttcatcagttgatatctgcacatttgtgtttatgtgggtggtacatgttggagctctgcatctgtacaagtgtatttgtgcatgagggtgcaacattgtttaatagttgggagtatctcttctttctacaagataagctgttcagtggtcggtgtaaagggggatcatatatgcgagattcaggcctggtactccagctcgtagctttgaatttgtcacatctagtgattgtatacatatatagcttgggggctgattttgccatccaattctattgaatttatcagctcttttttttc

SEQ ID NO: 3309 - DNA, 438 bp, Oryza sativa
  unsure (1)..(438): unsure at all n locations
  Clone ID: PAT_MRT4530_103004C.1
gccacgcgttcgtgtacgcgtccgatcacgcgtccgcccacgcgttcggtcactctgccaatgcgcctgagcccgagcgcgcgcgcgctctcccgcccttaacgccggtgacgagctagagggggctgtgccctcacctacctcctgagggcggagcggggggatcgagcccatcagcgtggaccgctgctggggatgcggcggcctggacacgccgatcgtgcacctgttgcagagtcagccgctcgcccagcaagaggttaaagcactgtgctagaaggccaaggagatattgatggaggaaagcagcgttcagtctgtcacaagcccaatcactatatgaggtgatattcacggacaatgccatgatcttgtcgaactgtctcggatcggtggaaagagcccanatacttattatttattcatgggggattatgt

SEQ ID NO: 3310 - DNA, 1180 bp, Oryza sativa
  Clone ID: PAT_MRT4530_103005C.1
caaactcggtatgcattcggatagtaatagtaatgtgatcagctgagcatttgctgacattcgtgacatgcgatgcaactggtggttactcagaaactggagtacatggaaattgcgtgcaagctttgttgtggtggttagtttgattcagtgcaagatggaaatgctcagccgagttgcttgcctacattggaaggatggatcagttggctgccatgaaacatttcaatttccatgtactccagttgtgacaccatgtcttctacatttgcgagccaccagccagacagaaacaccaatcgcattgcaagttttaacaccaaatctccagtgctaagtgctaacctaccaggaataatcatggtctatctatgcttgctcactgctatccttgactcgccggagttcttttctttctaccttcctcgctgagccacccagcctgcgtttgcttcctttttccattggcacccattggcgtcttggatctgactgcctcagactcagagtcactcgcaatgctgggaaaatacgcatcagagtcacttaagagagccagtctatcaaaaacacttggatcaattgaggtttccttaagtcgttctttcaaagtttccagcaaaacaatcccaagagcacgcagcgtgggaagatcatagtcgtgaccaagcacagcgaggctggcattttccgtgcataccatggccaaatccttcaaggtgatgagcaaatcaagctcggggtcggagagggtccggagccgtcgtgagtcttgttgctgcccgccacgagtaggagatgatggctcttcagcgttggtagacgcaggttttttagcatcacagataaatgtgtcaagttgatctctgaagactatacaatcatattcaaaatagtctgccgcatatatcttagcaagttcaatgagcttatcttcatcataattggtaaaagaattccttggatcaagacaagtaatgcatctcaatagccgagtagacctttcagcaaagcgattgtttaaatcaacaataatttcatcaagtaccacattaaatatttcattgctcatttctcctatgcgagctccgcctggcctcctcttcctcagctgctccctcatcaacgtgtccactagccctgaggagattgtttgcgccaatagcccaaagcccgtcat

SEQ ID NO: 3311 - DNA, 1020 bp, Oryza sativa
  Clone ID: PAT_MRT4530_103006C.1
atggcgaacatctgtgccaacatgaagcgctgcttctcgccgccggcgctccgggcgtacttcgccgagttcttctccaccttcctctttgtgttcatcgccgtcggctccaccatctccgcccggatgctcacgccggatgaaacatccgatgcctcgtccctgatggcgaccgccgttgcgcaggcgttcgggctcttcgccgcggtgttcatcgccgccgacgtctccggcggccacgtcaaccccgccgtgacgttcgcctacgccatcggcggccacatcaccgtcccgagcgccatcttctactgggcgtctcagatgctcggctccacgttcgcctgcctcgtcctccactacatctccgccggccaggccgtgccgacgacgaggatcgcggtggagatgaccgggttcggggcggggatcctggagggggtgctcacgttcatggtggtgtacacggtgcacgtcgccggcgacccgcggggtggaggcttcggcggcagggaaggggcccgcggcgacggcgctgggcgcgctggtggtcggggccgtgacgggcgcgtgcgtgctggcggcggggtcgctcacgggcgcgtcgatgaacccggcgcgctcgttcgggccggcggttgtcagcgggcactacagcaaccaggccgtgtactgggccggcccgatggtcggcgcggcggtggcggcgctggtgcatcaagccctggtcttcccgaccgtgccggagccggcgccggcgccggcgacgaacgagtcggcgcgccatgggagcgtgcaaacggtggtcgtgtgatgaaatcattctggcagtctgtcaccctgacgaaaaatctttgtttgtcgtgttagaatctttgttgcatttggtttcgtgtagttacatgtagtatgtgtgtaagatctgtgtctttattaggttgtggatttgtggatgtttgaaggaaagaaagcaatgtaatctagtatagtaggcagtttgatcctagtgaattgtgatggact

SEQ ID NO: 3312 - DNA, 221 bp, Oryza sativa
  Clone ID: PAT_MRT4530_103007C.1
atgctcaagaacagccctgcgttcatcgatttgacaaaagaggagtgcttcaagaaggatcaaagaaaactcacatttccactaactagcgattttgtcgtcaaaagttgcccccacaatgatcctcccatcaacatgcattcaacttaccacagctgtcattttgaggggctgacgtttggtggacagcgcagtttcgtcgaggcatttcgaggtgtcga

SEQ ID NO: 3313 - DNA, 189 bp, Oryza sativa
  Clone ID: PAT_MRT4530_10300C.1
atgtcgccgccgtccgccgtccatctcggcctcccccatcttcctcctcccgccggcccgcgtggctgccacgaaggcaccacgtcggcgccagctcggccggactgggtcaaagctgacctcgggaaacctcgcatgccaatagttaggaacgccggggcggggtcggacaaaccgggttcctggtaa

SEQ ID NO: 3314 - DNA, 495 bp, Oryza sativa
  Clone ID: PAT_MRT4530_10301C.1
aagctttttttttttagaggagtttgattctggctccgagtgaacgctagtggcatgcttaacacatgcaagtcgtacgcaaacatagtttgagtggcgcacaggtgagtaataaatagaaacttacccgcagtctaagtacaagtgctgttcctttcggggaacgatgaaaaactggatataaaaatgcgtaagcagctgtgagatgggtctattgggattaggtagttggtggagtaaaagcctaccaagccatttatccgtaactgttctgagaggttgatcagttacatcgggcttgaaaagtgctcgaacttcaattagaaggcagcagtgaggaatattggacaatgcacgaaagtgtgatccacatgtcccgtgagtgaagagggctatttaggttgtaaagctcttttgcattccatgccataatgattgtggaagcgaataaatccccgggttaacttcgtgccacattcgcgggtaaaaaacctt

SEQ ID NO: 3315 - DNA, 102 bp, Oryza sativa
  Clone ID: PAT_MRT4530_10302C.1
atggacagctgccagccgagcggtgcgccgtcaatgggtggtgcagtggggacaagcgaggtggagctactgggcggtgtgggcactccaccactcggctag

SEQ ID NO: 3316 - DNA, 373 bp, Oryza sativa
  unsure (1)..(373): unsure at all n locations
  Clone ID: PAT_MRT4530_10303C.1
cagcaacacaagcagaagcacagtagaacgcctaggaaatactacgtcgatngcgaggtgggccattgcgatccacggcggcgcggtngngnacccgaaccttccggagcacaggcaggaggaggcgcgaccagggtctagaggtcgtcgacaacagctacttcatcaccgaggacaacgtcggcatnctgaagctctccaaggaggccaacagcatcttgtttgactaccgtatcccgctgtccgngtcggagagtgcggcgaagngccgtgtcgtcggacaacagccactgcaacggcatggtgatgaacngcctccccatcagcatctacgcgccagagacggtnggggtgcgcggtngttgactccagc

SEQ ID NO: 3317 - DNA, 809 bp, Oryza sativa
  unsure (1)..(809): unsure at all n locations
  Clone ID: PAT_MRT4530_10304C.1
atggccgcggcggaaactgagctgggggatctgaaccagagggtggtggatctcacaagcaacctcaacaacatccttggatcgctcaccaagctggagacatggatttcgacggttgatgcgggaatccaaggcttgaacaaggtggtggaggagatcttggcaaggggcccgacaatgtcgaggagcaccaaggtgatgcatccaaagcccttgcggctcaggagcgacccctggtcaaggcggctggttttcttcaataaaatcaagatgagaaagatgagcttggtgcaaaactgtgtcgctgagaaagccgcacccgctgaacatgccggtgcagttgaacccgtacgccacctcgccggtgccggacaccgcgatgagcccgatgaacccttcgtccagccgttccttgacgcagtagtcgatggcctcctgcagcccggcggcgacgtcgcgcgccagcgtggagcgtatgatggcgttgccttccccgatccgatcaacggcgagtcgccaatgcgcccggtcatcttgttcgtcagcccgcccgtggacatggccgccgcggtgtggccgtttgagtccaccactgcgcaacccaccgtctccggcgcgtagatgctgatggggaggccgttcatcaccatgccgttgccgtggctgttntccgacgacacggcctgtgcgccgcacgtctccgacccggacagcgggatacggtagtcaaacaagatgctgttggcctccttggcgagcttcagcatgccgacgttgtcctcggtgatgaagtagctgttgtcgacgac

SEQ ID NO: 3318 - DNA, 712 bp, Oryza sativa
  Clone ID: PAT_MRT4530_10305C.1
ggtcagcgcgagacgcgccgcggagtcgaggcgtgcggttcgcagcgtcacggtggcgactgcccgcagcagcctccaccggctcgtggtccagcacgacgacgtgctcgccgcggacctccccgctcagtgccgctgcacctctttgtcatgggctgctacctcggcggtgccgacgcgtgcgccgagctcgttgagagcggcaagctgtcggtgatggtgaagaggttgggggaggagcggctgatgcaggagctcgctagtggccgggagggagaagcggagcacgccgtcgatgcggcggcggagaaggaggagcacgctggccaccgcgccgcggcgggatccggcggggacgagggagacgacgacactgacgagaaggagaggatcccgtcgggagtagcgagcgcggggcacgctgacgccgacgaccaccatgccaaccgctagggggctaccgcctccacaggctccgcctccgccaccgctgcctactggccgccacgcgctcgactgcccgccgccaccgccgcgcatttgctccactccgcttcgctggccgtcgcgcttgcacgccgcctccgcgaccgccgtccttctctcccgcctcgcccctgccaggttacagagaagtgagagagaggagtctaacgtggataaccctgacatgtggggcccacgtgggtcctacggtgactcagccgctacg

SEQ ID NO: 3319 - DNA, 1282 bp, Oryza sativa
  Clone ID: PAT_MRT4530_10306C.1
agcaatataacttttcacattattatttccagacgaattatcgccatcatcgtcattattcaagcccacctccaatctccccaatccactaattaatacccactaattctagcccacgaacacacgggaggcggcccatgaccccaagacaccactctatggcaatcgcatgatggccacaggcccacgcacgcacgcacaaaggctgcccacctcactcccagatgccgacctccatgaatccgtcctcggtggcgcaccctctgaacatgccggtgcagttgaacccgtacgccacctcgcccgtgctggacacggcgatgagccccgcgaacccttcgtcgagccgcttcttgacgcagtagtcgacggcctcctgcagcccggcgcccctgtactccatcacggcggcgacgtcgcgcgcgagcgtggagcggatgatggcctcgccttcccccgtgcacgacaccgcgcacgcgccgcacgcgtaggtccccgacccgatcagcggcgagtcgccgatgcgccccgtcatcttattcatcagcccgcccgtggacgtggccgccgcggtgtggccgctggagtccaccaccgcgcaccccaccgtctctggcgcgtagatgctgatggggaggccgttcatcaccatgccgttgccgtggctgttgtccgacgacacggcctgtgcgccgcacgtctccgacccggacagcgggatacggtagtcaaacaagatgctgttggcctccttggcgagcttcagcatgccgacgttgtcctcggtgatgaagtagctgttgtcgacgacctctagaccctggtcgcgcgcgaactgctcggcgccgtcgaaggcgaggtaggagtggggggacttgtccatgacgaggcgggcgagggagacggggttcttgacggtggagacgccggagacggcgccggagcggccggcggcggccgtccatgatgctggcctccatctcgacggcggcgaggcgggtgagcgcggagcccctcaccggagttgaagaaggggtcgctctccagctcccgcaccacggcctccacgacgtccagcgccgccgcgccggagcgcagcgcgtccacgcccacctgcaggcaccgcgccagcacgcgcttcgcctcctcctgcctgtgctccggcaggttcgggtccaccccggcgccgccgtggatcgcaatggcccacctcgccatcgacgtagtatttcctaggcgttctactgtgcttctgcttgtgttgctgtgaatcctcgtgccg

SEQ ID NO: 3320 - DNA, 1461 bp, Oryza sativa
  Clone ID: PAT_MRT4530_10307C.1
tgaaccctgggcttcgctcgctccttactgagggggtcgctcgccgccgacgcgggtggcttccgtcgagaagcttctggaagcttcggggaccgggggcgccgtcccccgcctcggcgttcgtgcgtgcggcggcgaggcggcccgtggctcggcgatcgatccgttgcttgcttgcttgctgcgggaggaaagggctcaagatggtcgtctcaatcattaccagagctttaatacttattcttggatatgcatacccagcctatgattgctacaagacagtggagctgaacagacctgaggttgagcagttgcggttctggtgtcagtactggattttactagcagttctaactgtttttgagagagttggggataattttgtatcatggttaccaatgtatagtgaagcaaagctggcatttatcgtgtatctatggtatcccaagacacagtcagggcacttcctatgtgtatgagtcattcttcaagccgtacattggcaaacatgaagctgaaattgatcgcaatctacttgagttgaggactagagctggtgatatggcagttcattacttccagaagatcgcagactacagtcacacaaggttctatgaaatcttgcaatatattgcttcgcagtcagaggctcaaagatctcgtcctcaggcacagcaacaccagcagcgtccaccacctccacggactcggcaggtgaaccctgcaccgccgcctgttccttcaccgtcagcgcctccgctgccgccacagcctccgccgccaaggaaccaagctcaagctgacaaggccccaattccggtcgcccctccaggcgccgccgtgcctcctgcacagccacagccacagccacctcaagcaggcgctgaagccgtcacaacggagagcaccgaggcgacgcaggcggccaatccaccggcgacgacggcgagcaacccgcatcaagcgccggtaatacccgacgaggagacgctcatccaggaggcgatccggatgacacggagccggctcaggaggcgcatgggtggagcttgaactggaccgccgccgatgtacgtaaagctcccacgccacgggatcatttctcgtcatacgtttcgctctcgacgcagggtgcacactgcactgcatgcacatcctgaaatctgaatcctgtgtaaaaaaaaaaaaacaatctgaagcctgttggtttcgtttcgcggtttcgcaattgtgtatagatcccaccaggtcaccaggaagtagaacagtagattgatggacattgtgatggcacgagaagatcagtaaccgagtacattggtaaagaaagaaagatacttggttggtagatgatatgtgaatgtgagcaacttaggacaattgtccctcatctccgtgccctgtgacaattgtcctttcctccttgccgacgataagatacaagctgattcttttcttttc

SEQ ID NO: 3321 - DNA, 1502 bp, Oryza sativa
  Clone ID: PAT_MRT4530_10308C.1
ttagccaggggcggtcgcggaggcggcgtcgggggccgggtgacgggatcctgcttggcgggtgatggcagtggagcaggggaggcgcggttgcgtggcgaatgcgtcgacgtggtggaggggacgagagccgagcacggtcagcgcgagacgcgccgcggagtcgaggcgtgcggttcgcagcgtcacggtggcgacagtcgcgcgcccgatggccggagcgacggcagaggaagcagcggactggatctctacactgggctgcacggtggccgcgggagaggcaaatgaaacatttcccactgatctgcgcccaaaagtcgcggtgggagaggcagcctcgcctagtccggacgacgtcgtttcgccttgaaggtggccggtgcgccttgcttgaatgctctccgcttgaatgctctgcacgtctccaccaatgccaactccaggtttgtcagtgacgatccataaatccgtcaccgagaatccatcacggattaacaagtttcttgtagtgcccgcagcagcctccaccggctcgtggtccagcacgacgacgtgctcgccgcggacctccccgctcagtgccgccgacatggacgacgccgcggaggtggccgggagggagaagcggagcacgccgtcgatgcggcggcggagaaggaggagcacgctggccaccgcgccgcggcgggatccggcggggacgagggagacgacgacactgacgagaaggagaggatcccgtcgggagtagcgagcgcggggcacgctgacgccgacgaccaccatgccaaccgctagggggctaccgcctccacaggctccgcctccgccaccgctgcctactggccgccacgcgctcgactgcccgccgccaccgccgcgcatttgctccactccgcttcgctggccgtcgcgcttgcacgccgcctccgcgaccgccgtccttctctcccgcctcgcccgcgcagaccggcatgacgccccgtttgagaggacggcaatcggcacggtggaaaacgaggctgaaatccagacaaacctaagctcccaggagaggacgagcagcaacacggtggagaccatcacgaagaccctcaatggccccagcgccacgccgctcccggacacggcgaacgcgagcgcggcgaccgcgaggagcacgctggggaggcggcgcgcgcgccgcctagcggtggcgacggcccggaccacgacgagcagcgtgacgacctggacgagctgcaggcgcgcctccagggcgcccacgacggcctcctcgagctggtccatcagctcggccgcctcggcgtcgacgcccgccggcgccaggcgcctggctcgcgcgagcaggggcaccagcatggcgaggcgggcggcgttgtcgcgcatcctggcgtgggcgacgtcgagggcgaactgcacggtgtcgacgtcgcggaggagcgggaggaggttgcggagcaccaacgggaccatgggatgcgcgttcgccattgggg

SEQ ID NO: 3322 - DNA, 588 bp, Oryza sativa
  Clone ID: PAT_MRT4530_10309C.1
atggcgattgatagcaacgggatgcccgatattccgttaggccgccaccacgcagggcctaccggcggccggccaccgcccagccctcggtctggtcgtcgtcgtcgtcgtgatcctcgtcgtcggtgcgctgttccccatcctcggcccgaccggctcctccagcttcgccatgccgcggatccggtggagttcaacgaacccatccacgttgcggtggcggctccacctcagccaccgacgcagatgcaagctggcgtcaacatgagcagcaaggaggacagtggcctcccgccgacaacctccgccttcgccctgacggcgcgcttgtcgtgctccacgtcccgccgccgcagagcatcgccgcggggctcaaccctggacccatccccttcggcggcccgagcgaggaaaaaacctccgacaatggagccggagctcaagctcctccccgaccctgagttcccacgtgcgtggctctggcgatgtacacctctttggcgtggtcgacgcattaggacccctctgtcattggctggtgcccccaatgcagtggaaggacttagctcgagcggggcagtcgggtag

SEQ ID NO: 3323 - DNA, 3703 bp, Oryza sativa
  Clone ID: PAT_MRT4530_1030C.1
atgagttccgggtcggcggtgacgggcggcggcggcggcggggcggaggacgcggcggcggtggcgctggggcagaagctgccggtgcacgtggcggagaacggccacaccttcgagttcaagtgcggcggcgagacccccgtggaggcaatccagcgcaccatcgagggcctctgcggcatcccgccggccgaccagctcctcctctgcgggaacacctcgctcgacggcgcccaccatctcgcctactaccagctgccccgcgacgaccgggaggtgttcctgtacaacaaggcccggctccacgacggcgcgccgcgccccgcgccggagtcgatcgaaatcccccagccgtcgatcccgccgccgccccggccacaggattccccgccgctggatgtgtcctccgacccggcgctgaaggccctggtgtcctacgagaccacgttcagataccacttccaggtggggaatgccgtgtatcagtctagcgtggcgaagcacgaggtgtgctgccggctgctgcgggaggggcaggtgcaggagcgggcactcgacaccgcccggagcaacctggagcacacggcccggaagctcacgcagcggtattcggatttcgtcaagtgcttctcgcagcagcatcgtggccatgccgagatgctggcgaatttcgagagggatgtggagaggctgcgcgccgtgaggcttcacccggcgctgcaatgcgaggggaggcgctccttgattgacctcgttaaggagaatgacctgaggaagctggcagatgggtgcttcagctcacataaacagtttgatgttaaggtctcacagcacaaggccaaattcatggaattgaagaagaggcttgaaaatttgtttaatattatgagctcgactgggtgcaaggatcttgaggcgatgataaaggaacacgagaaattcatcggtgaccagaaaatcatcatgcagtctctaagtaaagatgtgactacttcaaaaaagcttgttgatgactgctcaaactgccagctttctgcatctctccgccctcatgatgcggtttctgcagttggccgcatctatgaagtacatgaaaaggacaacttgcccagtgtccataatatcgatcgcttgttcacaaagttgctggagaaatgcaaagccaagaagaatgaaatgaataccttggtacatgttagcatgcaaagggtcaaatctgctcagattgttatcaaggaaatgatgaacgaactccatgcattccaagaggtgatgggtcatcaagataaaattttcgatagcctaaaacttgccagtggcatgggtcatgcgtacagggcttgtcttgctgaggtcgtacgaagaaagtcttcttttaagctttatactggcttggcagggcagcttgctgaaaagctagccactgagcgtgaagctgaggtaagaaggcgagaggccttctttaggacatggagtaagtacattccagaagatatcatgggttccatgggactttttgattccccaagccagtgcgatgtaacagttgctccatttgattgcaatcttctctcaattgatgttgatgatgtggaaaaacttgcaccccaatctttggtcgggtcttttctgaaatctgagagatcacaactgccaaagtcctccttgagcaattctggtaccagtggaaatttgagtaaatccgagcaatatccgccgaatgctgatgataagatggatttccaagactttctggggggttttgacagtgtggatattgctggaactagtaaattggaagttgaaaatgccagattaaaagcagaacttgcttctgcaattgcagttctctgcagttttggcgccgaatatggatatgaatctattgatgaagggcaaattgataatgtactgaaagatgcaagggaaaaaacagctgcagcactttctgcaaaggatgagtatgctaatcacctgcaggcaatgcttacagcaaagcagaatcaaaatttgtcctatgagaagcgcatccaggagcttgaggagcaattagcaaaccagtacatacaagggcacgtgatttctggaagcaaagatgcatctgattccctcctttctgcatttaaagctaatgactgcaacttgcacatatctggagggaggcaaacccaagtacgcgatgaatcaagtgtggccatggatgaggcctcttcaacatctgagcagccatctaaacaaacagaaggtggggatgagaatatgaccgacatttcaggtgcactgaacttgcaattgctcgatccaatagcacgcactaatttggatgctttcatggcagaattgccacctgatagtgaacataaaattgttgattctgataaggaagggcaagtattgacacagtttactacgactgatacttctggggttcgtccggaagatcctcttggcatcttaaactccagaactaacgagcatcatacctcagagctgagaaacaaagagctgcttgtgtcagagttgcaaagtactctggaagacaaatcaaaaaggttagatgaaactgaaagcaagcttaatgccttggtggatgaggtcaactctctgaagaaagaacttgaacacacccagggtctgcttgatgagtctcagatgaactgtgtgcaactggagaactgcttacacgaggcaagagaagaggcccgcacaaacaaatgttcagctgacagaagggctgttgagtatgatgccctgcgttcatctgctctgaggatacatggtctgtttgagagactaaataactgtgtcactgcaccaggcatgtctggttttgcggactcactgcgtgctttagctctctcattagcaagtgcaaagaaggatgaaggtgatacaaccattcagtttcagcaatgcatcaagatcctggcagacaaagttggttttctatcacgacagagtgctgagctgctagaacgctactcaaggattgtaagagtgttggaggagaagaaagagtcgattaaaaatttgtacagtaagcttcaactggaaaaacaggctagtaaggagaagatatcattcggccgtttcgaagttcatgagctcgcggtctttgttcggaaccctgctgggcattacgaagcaatcaaccggaactgctcaaactactacctatcagaggaatcagtggccctattcacggagcagcatccacggcacccagcttacataatcgggcagattgtgcacatcgaacggcgcatagcaaagctgccctcgcacggtgaccagatggaagcttcacgccttgatagcggtggccgccggtcgcccgcttccatgctgaacccgtacaatctgcctgtgggatgtgagtacttcctggtgacggtcgcgatgatacctgacaatattcgttgaaaacgccttcctgatcatgcctatggctgctgaaatgaagggagaaactctcaactgtaaatatactgaaactgaaatttatagacttccttggttgcttgtggcttcttcatcctttgtacataatgatgatgatcaggttcctttgtaaatagactctcagctaccactgatgttatcatcttcgttcaagcagactgaatattctttcaaaaaaaaaaaaaaattttgttaaaaaaaaaaaaaaaaaaaaaaaaaaaaaaaaaaaaaaaaaaaaaaa

SEQ ID NO: 3324 - DNA, 584 bp, Oryza sativa
  Clone ID: PAT_MRT4530_10310C.1
ctgcaggaattcggtacgagggtgaatatgcagaacgatgaagcaacgattccattcgtgtaccaagtgaagaacttcaatgacacggtaagccagatggaggctaacctaggccaccagaagttgagcaagctgttggccaaatctttattcctgataagcattggtaccatggatctgtctgtaaatacatggagagtattaagatattccagaaagccatcaccattcaacattccatatacactttcctcctacaaggccataatcatgcagttgtatggcctgggtgcaaggaagtttgggatcatcaacatccagcccttagggtgtcagccatggatgaggaagaacttggaaaacaatgtcgactgcaatgactccatgaacagtctcgctagggaattcaacgatggcctcaagcccctcttttccaatctcagctctcagctgagtggtctctcctactccatcgccgacttctacgcattctcaaacgccaccttcatgaaccctcgggcttacgggtttgtgaacatcaacagcacatgctgtattaccccctgaacacctgaacatgaacc

SEQ ID NO: 3325 - DNA, 537 bp, Oryza sativa
  Clone ID: PAT_MRT4530_10311C.1
atggcggcattaagccagctggtactggtcgccgtcgtctcattggttgccttgctcccactgggcatggcggcgacgacgtacgagtactgcttcatgcggtactacagcagctacaacttcatcggggatgtggacacgagggaggacgcaagcgtgaccttgaggagatggccggacatggacaacccaaaggcgttccaaaaggtggtggggaaggcgatggtaaaagcaacaacacaggctgtctcggtgggtggcaacggtctgggcagggcgaaggagcagtacacgccgttcgtgagcgtctacgcgctggcccagtgcacacgagaccttgcaccgcctgcgtgtgctcagtgcctatcttcgacagtgtccaagtttgacaaggcttgtggcgctgcgcaggggtgccaaatcgactatagcagctgttgggcacgctacgaaatctaccccttctatttcccactcgaagccaacggccgtgccactattgatatgaacaagtacactaaagttaccatgcactga

SEQ ID NO: 3326 - DNA, 913 bp, Oryza sativa
  Clone ID: PAT_MRT4530_10312C.1
atcgatctctactactccagtagctagcaagaattgaatctaggtgaagtgagagtgtgagagtacataattggcgccatccatggcggcattaagccagctggtactggtcgccgtcgtctcattggttgccttgctcccactgggcatggcggcgacgacgtatgatcccatcggcagcttctgctcggagacgtggatgaactacggcgatctcaacagcagcgaggccgtcaccaggcggcgcgccgtcaacttcgtcgtctccgacctcgtcgccaaggcgcgcaccggcggcggattcgccacctccaaggccggcaggggctccgaggtcttctacggcctcgcgcagtgccgcggcgacgtctccggcggcgactgcgacgcctgcctcgcccaagccgccaagcagatggtctccaactgcaactacacatcagactccagaatttggtacgagtactgcttcatgcggtactacagcagctacaacttcatcggggatgtggacacgagggaggacgcaagcgtgaccttgaggagatggccggacatggacaacccaaaggcgttccagaaggtggtggggaaggcgatggtaaaagcaacaacacaggctgtctcggtgggtggcaacggtctgggcagggcgaaggagcagtacacgccgttcgtgagcgtctacgcgctggcccagtgcacacgagaccttgcaccgcctgcgtgtgctcagtgcctatcttcgacagtgtccaagtttgacaaggcttgtggcgctgcgcaggggtgccaaatcgactatagcagctgttgggcacgctacgaaatctaccccttctatttcccactcgaagccaacggccgtgccactattgatatgaacaagtacactaaagttaccatgcactga

SEQ ID NO: 3327 - DNA, 549 bp, Oryza sativa
  Clone ID: PAT_MRT4530_10313C.1
atggaggatcggcgggcggtgtggtcgtggtcgacggggatcgttggtggagatctttcttcaaaagccaaaatctttggtgcgttatacttaatgcagaactaccacatggttttggaaatacttaatgcagggcgagggcaggcagaaacaggcgggcatcgtcgtcttcggcgggcggtgaatgaggaggtggcggcgggcatcgccttcttcgacgggcagcaggcggcgacaagcgggcgttaccgtcttcggcagcgacctagcgatgcggcgcagggagggatcctagcggcagcgggcggcgacaaacggccaaacgggcgtcgccatcttcggcggcgacctagcgacgcggcggagggagggatcctagcggaagcgagaatggcggggagaatcgcgagaggggaggccaatccaaaagagagcgaggggggtgggaggccgatccaggagttacgggagaaggcgaaagagagcgagggggaggggaggccgatctggagttacgggggagaagggggaggggaggctgatctgtaa

SEQ ID NO: 3328 - DNA, 142 bp, Oryza sativa
  Clone ID: PAT_MRT4530_10314C.1
aaaaccagtcacagaaggccggtttttacgaggtagaacaggttaattgcaaaccactgtttacactgaatttttgacacatagtacaatcatagtgcatttcccatgaaattaaagcaattttcattttgcccttgatccc

SEQ ID NO: 3329 - DNA, 281 bp, Oryza sativa
  unsure (1)..(281): unsure at all n locations
  Clone ID: PAT_MRT4530_10315C.1
gagagagagatcgttcgacgcatatagagagagagagaggcaagatgcagatcttcgtgaagacgctgacggggaagtcgatcacgctggaggtggagagcagcgacaccatcgacaacgtcaaggccaagatccaggacaaggaaggtatccctccggaccagcagcgcctcatcttcgcggggaagcagttggaggattggccgcacccttngccgacttacaacatccagaagnagtcgacgttncacctggtgttccgccttccgcggcggcaagaa

SEQ ID NO: 3330 - DNA, 453 bp, Oryza sativa
  unsure (1)..(453): unsure at all n locations
  Clone ID: PAT_MRT4530_10316C.1
cattaaactagtgctactactcgtctacttgcctacgggaggaagcaataatcaagcagctgatgtttgatagattagacggtgtatagtgctgatcatacaggcaatgcatganatagttggggaggcgtcgccgtcacacgctcgtaatattctcccgtttgtttaatctccccttcgaaacgcagcgtgcgcggccacaacccacgtccgatcgaaccgagctcccgctactacaacgtcacgacgacacatgacacggcctcctcagctccagtttctttatatcccatggcgtttgcctcgtttgtcgtagctggcgctggtgacggcatccatccaagaactgcctccttgatccatcccattcccggcggacagatcaaggcgccggccggntcttgtgtatatatattggacggcgagtggagcaaccggggcggcgggtttcgt

SEQ ID NO: 3331 - DNA, 444 bp, Oryza sativa
  Clone ID: PAT_MRT4530_10317C.1
tccacgcgtccgcaaaacgatatctctgctacacgtgcaagcatgttgtgcaagattgtgttcctcggccttctgtgtgggctcgcttcggctcagtcaaactatgacttgctcaaggatgcttactggagcacagtaaccgagcagtcggactcacactgcagaattgacgttcagttctactaccgcaactacttggctatgaacaccggcattacatgcgccactcctggcctgtttgctggtaccttcgccttgagtgcaactgacatgtacatccagtacgccagcactcccgaaggcgtttctggcctggctttaatgaagttcgcctatgctttcaccaacaatggcaacactctcactctgacagctgcgggcctcgtgcctgtcgttctgcagaagcagcctgctgaccctttccggatggtgtttgggatggca

SEQ ID NO: 3332 - DNA, 849 bp, Oryza sativa
  Clone ID: PAT_MRT4530_10318C.1
atggctagacgcgtcagcaccacccgcctcctcctcctcctcctcctcgtcgccgccgcggcggcggcggcggcggccggagaccaggaggacccgcgtggcggcggcgacaacggcaccgcccgcttggatcgccgcaccaagatgttcctgcacgcggcgcgggcgagcgacggcggcgccacggggatggagaaggccgggctgggtctcttcgacgccttcttcgctagcttgtccatgattctggtcagcgagattggggatgagaccttcatcatcgccgcgctgatggcgatgcgccaccccaaatccaccgtgctctcaggcgctctgtcggcgctggtcgttatgaccatcttgtccaccgggcttggcagaatcgttccaaatttgatatccaggaagcacactaacagcgcagcaactgtcctttatgcgttctttgggctacggctgctgtacattgcttggaggtcagattctaaggcatcacaaaagaaggaaattgaagaagtagaggaaaagctggaagcaggacaagggaaatcaacatttagacgcatcttctcaaggttctgtactcctatttttttggagtcgtttgtgttgaccttcctggcggagtggggcgaccgaagtcagattgccacaattgcgttggccactcacaaaaatgcggtaggggtcgctgtgggagcaaccttggggcacaccatctgcacatcgttcgctgtggtgggtggcagcatgctggcatccaagatatctcagggcacagtggccaccattggaggcctcctcttccttggcttctctctgtcatcatatttctacccaccattgtga

SEQ ID NO: 3333 - DNA, 150 bp, Oryza sativa
  Clone ID: PAT_MRT4530_10319C.1
tgataccttacgtgggaaagaaccacatgactaaggacaagtttatgctactaggagctgataccacgttgacgagaacaacatctgtgagaagtcttagataatgcagaatatcaagggctgattctgcttcataagactcagctcact

SEQ ID NO: 3334 - DNA, 384 bp, Oryza sativa
  Clone ID: PAT_MRT4530_1031C.1
atggattccgatagcttgccgacctttggcaaggcgcggaaaatacttgccgacaagcgcgcctccattggcggcggccgtgctcacgtcggcagcccagaggatgagcagcgcgggggcggcggtggtcggcttggtgtggcgagggcggaggatggatggaggggtgtggagtcgatcacgcacaaggtgttcgaccgacgggcgatggaggagcggatgagctcggacaccgtcatcgccatggatgagctcgatctttggatatggctggggcggcaggggctcggtctgaaggcgtcggacgggcgacggcgcgccaaggcggtcgggcacgcgcgggcggcctcaaagccgacgcgcggcgacacggcgtgcggctaa

SEQ ID NO: 3335 - DNA, 225 bp, Oryza sativa
  Clone ID: PAT_MRT4530_10320C.1
atggcgatgatgagcaggagagaggaggaggtggaggagaggagactgacgcagcgagcgttttataccgagtccgagttggcgaggggctgcgtggcgcgtgcggggccgtccgatctcgatccgacggtccagatcggccgcggcgggtatccttctcaggcgcgcatctttttcaggaacaaccctggggttccggatatttatgtacctatgtgttgttag

SEQ ID NO: 3336 - DNA, 184 bp, Oryza sativa
  Clone ID: PAT_MRT4530_10321C.1
cccactcccaatatgtgttatctaccccttaactacctatagtgcctccccagggaccatcccactttgtgtttctgtctgatgaacaatataatagttcggtatgttaaaataaagtcaacatcatcaggtgactgtgaacttaggttcatataaatctaaataaatcatcttacctaaaaaa

SEQ ID NO: 3337 - DNA, 2860 bp, Oryza sativa
  Clone ID: PAT_MRT4530_10322C.1
ttataggctgcttgagtcccttccatagatgaaccgcctgccccaatcagatactaccagcatcctggtgcgccagctgaattgcttactggcatagacagaataccatagccattgggtgctgtgaccaacatgtatccaatcacccggcaattgagcggctgtttgctctccacccagtggagcaaactggccaaggtgcctgtacctgaaaggtttgaaccgatgacgccctgtgcctctgatcctcaacggaccttcagggttctcttcacagtatttcatcttgttgaagcagtttgccagataggctccctcttgtgaagcaacctgagctgttgctgggagcatcttaacttgcgagtccactcgagcaagggctttcttgaattcctctatgttcagctcttttgactccttaatagcattcccgtctgaatctttgagtaggtcatggaagtccttcatttggttagttttaaggtacaactcaacctgtgggtacctttcatagatgtcgccaagaacatttttaattttcttgacagtcaaagagccagaattgtccttgtctgctacccggaaaattgaagcaatatcttccataacttttctttgagttattgtcgcgcaatcaccgagagcatatacatcatcacatccatgaaccctgagccattcatcagtagctagcactcgtcggtttgcctgaccaacttgcttcatgaaatccattatgaggggacgggttccaataccagtggaccaaacagccatgccataaggcacagcaatctctccagttgcagaattagtcatagtgatagccttatcagacaccttcacaaccttaaaattcgtcttcaaatctatgcctgtcctcttgaatttatcttcagcaaattgggtaattctcttgtcaaacattgtaaggatatgatctccagcttcaattactgaaatattcgcatacttcttcacatcaggatacaactttgccaagtcctcattgacaaagtcatgaagctctgcagcaaattctacacctgttgggccaccaccaataacaacaaaatgaagattcttcttcctctcttcctcagttaggtttggaagggacgctctttcgaaacatttcaggacactcttcctaattttttgagcatcttctacttcctttagaaaatggcagttttcaacaacaccaggggtattgaatgtattaggtctagctccaacactgacgaccaggtaatcataatctacaacaaattcactatttccatctgagtctgatctgcagtggatctttttgttagttggatcaatcttgtagcactctgcttcccaaaatctaaatgcgccgcctctctttctcacaatattacggataggctctacaatactacgtgcttcaactgtgccacatgtcacactaggcaacaaaggtgtgaaggtaaaatagttgcgaggtgatacgacatgaacatcgtacaaggaagtgtcaatatttctcaagaaacttgcgcctgcccaaccagttccaacgataaccaccctcttcttgccagttccatcatttatttgaagtacttgattatcctggcaagcataagtcaaagaaccaacaccggcggtgaggacgaggagcctcttctgccaccgcggcgtgcggcgcgcggcctcgacggcgcggcgcaccaagctcaatccccccgacgccgacattgaacaccacccaccagatggaagagacaaggatcatacgagagccaacacatggatgattggattggatggatgacctctcttgcactagttgacgcgcctgcagttggctcggacctcgccggcgacgttgttgagggagctcatccgtagcatggagtcgacgaagtcacggaagaaggcgggctgcgacgcggcgtagagcgtgacctgggcgcgcgtcttggggtgggtgagcagcgcctcgtcggaggagagaaggccacggccggagagcagcatccgatagtagaagttgtcgaaggcggaggaggtggggtcgagggaggagccggcagacctggcggtgttgttgggtgggcaggagcggcggagggtggcggcgaaggaggggtgaagcgcggggtcgacgccctgcggctggatgcggttctggaaggaggagcagtgtgcgaagccccggcgaggtaggccagcacggcggacgcggtccttggtcgacatcccgcgcccgtggaacgcctgcttcagctggtcgaagctcgccgtcggccccggtagcgccgtcgtcgtctcgctcgccagcgacacgcgcccgtcacgacgacccaccggcacttgccaagaaggaccaccggacatggcgactgcgtccctggcggccagcgcgaggatgtcagcgcaggagacgacgccggggcagagggcttcgacggcggccttggcgttgtcgatgacgtagaaggcgtgcagcgacgcgttgggtgggccgtccttctccgccgacatgttccccgacgagtcccaaaagcacggaaccgtccgcacccccctgacgaagcagtcgtggaaatgcaggcggagcaggccggccggcaccgtgcggtctttggccatggcctgcttcaccgccgcccgccaccgccgcctccgccttggggcagctcttggcgtagtagtccaggctcagcgcctcgccgccacccaccagcatcgtcatagtcatcaccacaacgattagcagctgtaccagatccagatgggactgggacgacgccattgccgatgccattgcctggttgggggggctcctgctctgcatcgattggaggcagcgcggaggaaggcgggc

SEQ ID NO: 3338 - DNA, 381 bp, Oryza sativa
  Clone ID: PAT_MRT4530_10323C.1
agtatgtgttatatggaggacaacatgatttctgataaaggggtctactcaaatgatctccttatgctaagatggaagattcctttgttgagatctattgcatccatctttagtacccggccatctagtaaagagccgactactgttgaagagctttggaacgagaatgcctgtgttgaagaatgctcttctatcatgtatcacctcttgatgttatgccaggttctgccagttggacgggatatgtttgcatgttctttggcattcaaggaggttgcttcttcctattcctgtagaggcgcagtaacttcaatattttcacaaattcaaacttctaacaaagatgagtcccaaaaagtgagagtgagacctgtcatgaca

SEQ ID NO: 3339 - DNA, 311 bp, Oryza sativa
  Clone ID: PAT_MRT4530_10324C.1
acgcgttcgtttatatggacaaattcaaacaagcaatgtgtaccttaagctttgtacatgagtgaacattatagagagaggactgccttataagacacgtggtggacataatgctaggtgaaacagtgacgcagttgctattttaaattcttcttaaaaaatggatatgatcaagcaaatactatgaatgacaagatctgtctaccgaagatactacatgaagtactgaactaagtgaaaacgaactagtgggagacagaagaagtatcatatggggttatattaagaacatctgagctgaagctgctatc

SEQ ID NO: 3340 - DNA, 197 bp, Oryza sativa
  Clone ID: PAT_MRT4530_10325C.1
gacaggcaacggcagttttacttagctgagcatttatttatacatgcatgcactcttgtctttggaccttgacaagctagcacataactgaactgagcaaagcaacgcagcaagtccatgaggaggcttggcggtggcttgcggggcggcgttgctcactcatcgtaattggcatcttcttccctgattaacatatg

SEQ ID NO: 3341 - DNA, 298 bp, Oryza sativa
  unsure (1)..(298): unsure at all n locations
  Clone ID: PAT_MRT4530_10326C.1
gcgtccaacccaacccaccaccgactngacgnggtcgccggcgagaggcgccgcgctgcgcgcgtcgagaggatcgcctnctnctnctactcctnctgcggcagacatgtactccatccacttcttcccggacacctaccagttcggcggcccgtcgagccgccccctaaccaaaccctacccaaaaccccccgacgccaccgacgagtaccaccgcggtggagacaacgagccggtgctcttcccgcgcctcttcctaaggaggcgtgcccggcccgccgaggtgccagccgaggcg

SEQ ID NO: 3342 - DNA, 322 bp, Oryza sativa
  unsure (1)..(322): unsure at all n locations
  Clone ID: PAT_MRT4530_10327C.1
gtgctaaggaggggaatcctcgctttgtccagaggatacaccaggaatgtatgggaatgatccctggccctgtctggggaaaatcacaatgatggtggtgaaattaaaatgggatttcgccgncttacgatatcaccgnatataggaggaatggtgaccacaatgtaccacgacggtggataatgatgtgcccccccctcgtgtgttgtgttgtggtgtggtgccctggtgacccaaagggagtgtggtgaatgcacccntgtttgcgaaaggagacgggttaactgagtctttacggggtgaaaaaaaaaaaaaaaaaaaa

SEQ ID NO: 3343 - DNA, 2031 bp, Oryza sativa
  Clone ID: PAT_MRT4530_10328C.1
tagacacactagctagctagagtgatccagctagcatggaggcctcagccatggaggaggccctctcgaagaagacgacgagcaagggaggcctcaggaccataccattcatcatctcgaacgaggtgttcgagaaggtggccacgttcgggctgcacgccaacatgatcctctacctcaccgagaggtaccacatgacggcggccaccggcaccgtcgtgctctacttctggaacgcgctctccaacttcctccccatcttcggcgccgtcctctccgactcctgcctcggccgcttccgcgtcatcgccctcggctccgtcgtcagcctcgccgggatgtgcctgctgtggctgacggcgatactgccggcggacaggaggacgccggagtgcgaggcgaggcgggatgactgtcagctggtgccgtggcagctgccgctgctgttcgcgtcgttcgttctcatgtcggttgggtcgggtggcatccggccgtgcgcgctggcgttcggggcggaccagctggaccggcgcgacaacagcgcccggaacgtgcgtacgctgcagaccttcttcaactggtactacaccgtgctgggcctctccatcgtgctcgcctccaccgtcatcgtgtacatccagcaggccaaggggtgggtcatcggcttcgccgtgcccgtcgtgctcatgctcaccgcgctcacgctgctcctcctcggctcgcccttctacctcaaggcggaggccgacaggagcgtgctcgtcggcctcgtgcaggtgctcgtcgccagctacaggaagaggaggggtcccttgccgccggagacggccgacgcgtcgcgcttccacaaccgggccgggtacaagccgaggactccgtcgaacaggttgaggtggttgaaccgtgcgtgcgcgctgggggacaacccggacaaggaggtgaaccccgacgacggctcggcgcgcgacccgtggacgctgtgcacggtgcagcaggtggaggacgtcaaggccgccgtccgcgtgctgccgatatggtcgacggggttcatgcccggcgtgatcatcggccagcagatgttccccgtgctgcaggcgaagacgatggagcggcgggtgggcgggctggagatccccgcggcgtcgttcggcgtcttcagcatcctcacgctcaccgtctgggtggccgtctacgaccgcgcgctcgtccgcccgctgtcgcggctcaccggccacgcgcgcggcgtcaccctgcggcagcggatgggcatcggcctggcgctcttcgccgtggccatggccgtggccgcgcgcaccgaggccgcccgccgcgccgaggcgctggccgagggtctccgcgactacggcccgcagtcgggccgcgccgtgcgcatgtccgccatgcggctggtgccgcagcactgcatcacgggactcgccgaggcgctgaacctgatcgggcagatcgagttctactactccgagttccccaagaccatgtccagcatcggcgtctcgctgctggcgctcggcatggggttcggcagcgtggccgggagcgccatcgtcggggccatcaacgccggcaccaggagcggcggcggccgcgacagctggctctccagcaacctcaacagggggcactacgactactactacctcgtcctcgccgcgctgtgcgttgccaacctcgcctacttcgtgtggtgcggatgggcgtacggcgaggagggccagaaccgggtgaccgcggaggaggaagcggtggaagacaccaagaccaaggaagaacagcagcagaaactgtaaaacctttttagtgaggcaggctgctgctgtgttctgcttcagctttctacttctctagttctctcttgtgaaaattgtagtaatatttacatgtatatgttggtgcaaaaatggatggttcgacctcgaatcctatcagtcctccggattcaaagatcctacagggcacaggctgctacctgcaacgttaaaatgctagtagtagcagcagtttttttttttt

SEQ ID NO: 3344 - DNA, 1222 bp, Oryza sativa
  Clone ID: PAT_MRT4530_10329C.1
cgcacgagggtttcgccacgtctcacgcagccatggccgcggcggccgcgtccacctcgctccccgtcccgcgcgtctccctcccgccgtccgctcgcccagccgccgctccccggcacggtctcctcatccccggtcgccgtgggtgcttccgtctccgcggctcaccagcggcaccggccgccgccgcctcgggctccccttccgtgccttcctcttccccggaggctgggtcgggcatcggggatgccctcggtggcgtcgccatctactccgcggccaccggcgagcccgtgctgttcagggacctgtgggaccagaacgagggaatggctgttgttgccctgctaaggcattttgggtgcccttgctgttgggagttggcctctgtgttgagggatacaaaagagagatttgattcagctggtgtcaagctaatagccgttggtgttggcactccagataaagcccgtattcttgctgagcgtttaccatttccattggactacctctacgcagatcctgagcgcaaggcctatgatctcttgggtttgtattttggtattggtcgcacattcttcaatccagccagtgcaagtgtgttttcacgatttgactccctcaaggaggcagtgaagaactatacaattgaagccaccccagatgatagggctagtgttctacaacagggtggaatgtttgtgttcagagggaaagaattaatatatgcaaggaaagatgagggcactggtgatcatgcacctctggatgatgtcctcaacatctgttgtaaagcccctgcggcatgatattgtgtaatcaatgtcccatgagaattttcacagcctggttctgatcgtgtcccaaaggtgtatgcagaaaagcatctcttgattttggaaggctggcttctgccaggatagtatctctttgtctgtacgtctgatctaccatgctgttgatatgtaatatatcagttgaaaacttgagggatgtaggcagaccaaaggactttctcatgccataagctcagcagttcttttccttttcctcatagaaatgtactaattatagaagagaatcttacactgtacaataagtttgtgttaaagttggcgaaattttccatacaaacctaagtagtattaaagctggtgaagtacggctccttcacagcaaaaaaaaaaaaaaaaaaaactcgagactagttctctctctctcc

SEQ ID NO: 3345 - DNA, 129 bp, Oryza sativa
  Clone ID: PAT_MRT4530_1032C.1
tttatacgaagcaagcaggcagcgcctgctagaggggcggaatatttaaaaaagggagcgctgtaactacccagggaccgactgccagaagaagtgccaggccaactgcggcgacgcctcccagagatg

SEQ ID NO: 3346 - DNA, 2052 bp, Oryza sativa
  Clone ID: PAT_MRT4530_10330C.1
atgaccggaacaaagtacgtgtcgtggtgcctcgctctcctcctccgccttgcggccgtcgccggactcgccgacgacggccagttcctgtacaacggcttcgccggcgtcaacctgaccctctacggcgcggccaggatcacgccgaacggcctcctcaagctcaccaacggcacggtccagcagacgggccacgcgttctacccgccgccggtgaggctccgccgcacgccgtcgacaaagacgaacggcaccgggaacgagaaggcggtccggtccttctcgtcctctttcgtgttcggcatcgtcaccgccgacacccaggacctcggcggccacggcgtcgtcctcgtcgtggcgcccagggcgaacctcaccaccggcctcgccaacaactacatgggcctcttcaacggcaccggcagcgtcggcagcgccagcaaccacctgttcgccgtcgagctcgacaccatccagaaccccgacttccgcgacatcaacaacaaccacgtcgggatcaacatcaacgacctcgcgtcgcgcgacaacgacaaggcaggctactacgacgacgacgacggccggttccacgacatgaccctcatcagcggcgacgcaatgcaggtgtgggtggactacgacggcgacaccacgcgggtcaacgtgacgctggctccgctcggggtgcggaagccggcgaggccgctgctgtcggcgatgcacgacctctcgacggtgatcgtgggtgagtcgtacatcggcttctcgtcggcgacgggcacgctgagcacgcagcactacgtgctcggctggagcttcggcgtcgacatgccagctccggcgatcgacgcggccaagctgcccaagatgcccaaaaggaggacacggtctgatcagtccaagacaatggtgatagctctacccatactctctgtggttctcctgctgtttatggtttcctgtgttatacttgtgcggaaacggtacaaccacggtgaattgcgtgaggattgggaggttgagtttgggccgcatcggatcccctacaaggatttgcgtcgagccacggaaaggttcaagaacaagaacttgctcggtgttggagggtttgggagggtgtacaagggagtattaccaaaatctcgtttggaggtcgcggtgaagagggtgtcacatgaatcgagacagggaatgaaagagttcgttgccgaggttgtcagtattggtcgcctccggcaccggaatattgtgcagttgcttggctactgccgacttaaaaatgaattacttttggtttacgactacatgccaaatgggagtctcgacaaatatttatatggtcacaacaacatgcccgtcctcagttgggctcagaggtttctaattatcaagggcattgcgtctggtttatactatcttcatgaggaatgggagcaagttgtagtccatagagacatcaaagcaagcaatgtgctacttgatagcgagatgaatgctaggttaggtgactttggtctcgctaagctgtataaccatggcagcgatatgcaaacaacaattattgcgggtaccttaggttatctagctcctgagataactcgaaccggaaaggcatcccctctaaccgacgtgttcgcgtttggtgtattccttcttgaagttaccactggacggaaacctgtggagcgagacactgaaggaggcatacacatgttggttgatctcatatctgcgcatttggacagggagacactacccatggatatggtagatccaagacttgaaggtgagtataacactgatgaggcgagtttagtgttgaagctagggcttttgtgctcgcatccattgcccgatttaaggccgagcatgcgacaagtcatgcagtacctcgatggtcagttaccattccctgagctcgtcccgtctcacacgagcttcagcatgttatccatggcgcaaagccgaggtcttgattcatatgccatctctaagtcgttatcgtccatggcgagcataagccaactaagtagcttctcaagtgggagatga

SEQ ID NO: 3347 - DNA, 3135 bp, Oryza sativa
  Clone ID: PAT_MRT4530_10331C.1
atggccatcgtcctggatgccttcgcgtcctacgtcggcgacctgctcaagcaggtggcccaggacgagctcaccctcctgctcggcgtctccagcgagatcgccagcctccacgaaaggctcaacagcctcaaggactacctcgccgacgccgagcgccgccgcatcaccgaccagagcgtccagggctgggtcaggaagctcaaggacgtcatgtacgacgtcaccgacatcctcgacctttgccacctcaaggccatgcagcgtggcggcgtcggctcatccgcacctcccgtcaacatcagctgcctggactcgctgctcttctgtctccgcaatccgctcttcgcccacgacattggtagccgcatcaaggcgctcaacgccaggctcgacgccatctgcaagagcgccgccgccttcagcttcctcaagctggaggcctacgaggacatggcggcgcctcgccgacctagtgccgccgaccgcaagacggacccggtgctggagcggtcggctgtggtcggagagaagatcgaggaggataccaggacactggtgaagatgctcaccaacggcaagaacaagaagcagaatgcagtggtggtggtcgccgtggtgggcaccggcgggatcggcaagacgacgctggcgaaaaaggtgttcaatgacgaggccatcaaggaagcgttcgacaaaaagatatggttgagcgtgacacaagacgtgaacgaggtggagctccttaggatggccattaggtccgtctctgtcggcggtgccagcgatggtcgagagagcaacaagtcactgctggtgcccacactcgtggacgccatcagggacaagaggttcttcctggtgctcgacgacgtgtggagcgacagagcatggagcggcctgctcaaggtgcccttcagccatggcgccgccggcagtcgtgtcctcgtcaccacccgccatgacgccgtcgcccggggtatgcaagccatgcaccccttccaccacgtcgacaaactgtgccctccagatgcatggtcactgctcaagaaacaggtagtttcaagtgagatggaggacgttgagattgatgagacgctcaaggacatcggaatggagataatagacaaatgtggtggattgcctcttgctgtcaaagtaatggggggactcttgtgccaaaaggagagacggcgagcagattgggagaaaattttgcatgattctatatggtcagtacctcaaatgcctgatgagctaaactatactatatacttgagctatcaagatttgcacccttgtctgaagcagtgctttctgcactactccctcctccccaaaaatgtggatttcttcattgacacagttactagcatgtggataagtgaaggatttcttcatggggaaactgatgatttagaacaattaggagaagagtgctataaagagttaatttacagaaacttaatagagccaaatgcggagtacgctggagaatgggttagcaccatgcatgatgttgttcgctcatttgctcaacatctggctagagatgaagcacttgtaatttcatctagagatgaaataggcaggggtgcacttaaatcacataaatttctcaggttgtctatagaaacagatgatttgcaaccgaatgatgaatttgggtggaaaattatacaagggcaaaaatcacttagaacactaatactagttggtgagcttaagattaacccaggggattcattgattactctttcaagcctaaggactctacacatagaaaatgccaactgtacttccacattggttgaatcattgcatcaactcaaacacttgaggtacatctccctaaaatgtggtgacataactagattgccagaaaacattggcaagatgagattcttgcagtaccttggccttgtatgtgagaatttggacaggcttcctaatagcattgtaaagctaggacaattgagcttgcaagagctggggcctcttgctcagctctgggttcttggactaagtaacctagagaatgtacctgctatctcgttcgctgcaaaggctaggcttggtgagaaggcccaccttagctacttgatgttagaatgtagtagtagacttggtgaagatggttttgtacaagacgagaatggtgtccccacggaagagcagcggcaaatcgaggaggtgttcaatgcgcttaccccgccactgtgcatagagagcattgagattagtggccattttggagagcagctaccaaggtggatgatgtcaagagtagcaggtgcatatgagaggttgtcgatggtgatcatggatgacctcgcttgctgcaaccaactcccagatggcctctgccgacttccgtctctgtattactttcagctcacccatgcccctgcaaccaagcgtgttggccctgaattcctaactatactaccatcatcgagccaactccgccaagctcatgccttcccgaggctgaagaggatgaatctgataggcatggtggagtgggaggagtgggagtgggatcaacaactaaatagtgtgcatgcaatgcctgcattggaggagcttgtgatcgaaaactgcaagctgagacgccttcctcctggcctttcctcacaagcaacggccttgacaagcttgtacctacgtaacatccaacaactcaattctgtggagagctttgcttctcttgtcaagcttgaggtgtatgataaccccaacctggagagtatcacttccctcaacaagttacagaagctcgtcattgacggctgcctgaagatgaggatattggagggggttcctgagctgctgaggctagagctcaaggacttagatatggaagagcttccaggatacctgctgcagagtgtgagtcctaggcatctggtgctagactgcagcttggagatgctcacagccatatcaacaggagaatccggtcctgagtggagcaagttgagccgtgtccagcatgtgaaggcctatgctgaccaaggagacaatgaacggaggtggcatgtgttgtacacgagagatccctatagattcgagacaaatattgggatcagctcttcttctagttctggagaatcaggggatgatgaggaatag

SEQ ID NO: 3348 - DNA, 493 bp, Oryza sativa
  Clone ID: PAT_MRT4530_10332C.1
cgggctgcaggccccccccccttttttttttttttttttttttttttttttttgattttaacagtaatatttaatccgagtttcagtatatacacagcaatagaaccggacaaaaagtcagaaacactgtagtacacggatgcacatgcaatagcttttctagagtttcctatagccaaaactttgtgctgatctgatcggacacatgtgcaatagtaatatgacaccaattaacatatgacaacaatagcaataaggcagtagattccaaaataaaaagaccctacacacaatccgactctgacaattttcaccgattcctaagctaattttgattgactccaataaatatcaagcaccagaagggagccaccaaccagatcaacaagagaagagatcaatagcaatcaacgcaaccagacgggagccaccaaccactatcggcaagcacagctgcaaaatataagtccaagacgccattgtcgccggatca

SEQ ID NO: 3349 - DNA, 522 bp, Oryza sativa
  Clone ID: PAT_MRT4530_10333C.1
atggacgcctgcttcagccagtacccttccgccactgcaaaacacacaaggaaccaaacgatcagtccgattacggagacggcacaactggagcctgcgaggaggatgttggggggagagggaggggcgagaggcgaggtggagatccccaccgaagagcacgaggacgagcctgaacccgacggccgccgcggccatcggccagtagtgtcggatggccatcgtggccgccgccgccgttgccgcaactccgatctgaggctctggatacagctgccggcgagtgcggaggccgagaaggggatggcgaaggtgctcaccggcggcggctgccttgaagcggcggcgaaggcggagcggttagggccgagcgcggcggcggagtcgggggcggctcgcggcgggccggtggcgatggtgagccgagatgggccggcagggagcaggccgagatgggccggttgggaggaggctggggtgcagctgagcagaggcggctcgggcttgggctccttgggctga

SEQ ID NO: 3350 - DNA, 693 bp, Oryza sativa
  Clone ID: PAT_MRT4530_10334C.1
gccctccacccgccgccgacgaagtcatccgtcctcccccgctctctgctgcccgtcctcgtgtctccaccgctccacctccataccccacgccgttggaaagggggagagtgtaggggcaaggacggcggcgcaaagatctgcccccctgtcctcgggagcgacggtggctcgcggatccatcggcctctgtcctttggagctgctaggctcaagtgggaaggacggcggcatgcggatccatcgccccccgtcctcgggagccttagcggcacatggatccagcggcctccgtcctcaggaatggcatggcgggagcgggagggccggcagcatgctgatcttcctgcctccgtcatcgcgagcggcggcggcgggcttagacgagcgagagcgagggcggctggcttaggcgagcgggagcgagtggcagctgcaacaacaacaacagtgatggtggctgcgacgacgatgatgatgctgacggcggctgcgacgaaaacgacgatggcctcctccaaccccggcaccgggccggccgtcggcgacgacttcacctgccccgcccccgccgcggccgcccgctccccccgctcctccgtgatgacgaggggcttgctcagcatcgagcccttgacgagttggagtgcgcagtgcatcagattcagaccaccttcgccgcctcgagcttga

SEQ ID NO: 3351 - DNA, 178 bp, Oryza sativa
  Clone ID: PAT_MRT4530_10335C.1
gtgttacccgtgccttgcaaccctggctgagagatcctacttgctggaatgcgcccagtttgttaaaactgtgctatagttgggttggtcataatagtgtgagcccttggtgagtccaactgttcccagcgtcgaacttgcccgtggtagcgtgccaaagattagctggtgatgtaag

SEQ ID NO: 3352 - DNA, 315 bp, Oryza sativa
  Clone ID: PAT_MRT4530_10336C.1
atggcggccggctcggatggcaagctcgccggagattggatgatcggctgcgaatttggaggacaagtacacgtagaggacgacgagacgaacccaacgagctccggtgaccggcgacgaaaaaggaagggtggccgagctttctctcaccacggcgcacccaatggcggcggcggcaagcggcggcgacggcgcaaacggcgcggcggcgcggctggacttcgaccggcggcggggcggcttgacacgcgcggcggcggcgctacggagcacgggagaggatgggagagagggcaaacgaaagaggaggactag

SEQ ID NO: 3353 - DNA, 1085 bp, Oryza sativa
  unsure (1)..(1085): unsure at all n locations
  Clone ID: PAT_MRT4530_10337C.1
attcggctcgagtatcatccgcagctgcttttattcgcaccgcctacagtgttctcatggccgncggaaagaacaagcgcatctgcaaggggaagaagggtggcaagaagaaggcagctgatccctttgccaagaaggattggtatgacattaaggctccttctgtttttcaagtgaaaaatgttggcaaaaccctcgtctctcgtactcagggtaccaagattgcttctgaaggactcaagcatagagtgttggaggtctccttggctgatcttcaaggggatgaggatcatgcattcaagaagattaggttgagagctgaagatgtgcaagggaagaatgttctgacaaatttctggggaatggatttcacaacagacaagctgaggtcattggtacgaaaatggcaaactcttattgaagcccatgtggatgtgaagacaactgataattacacattgaggatgttttgcattggatttaccaagagaagagctaaccaggtgaagagaacctgttatgcacaatcaagccagattagacagattcgtaggaagatgagggagatcatgaccaaccaggcaacagcatgtgatttgaaggagttggtccggaagtttattcctgagattattggaaaagagatcgagaaggcaacatctagtatttaccctctgcagaatgtgtttgttcgtaaagtcaagatcctgaaagctcctaagtttgatcttgggaaactgatggaggttcatggagattactccgaggatgttggtgcaaaggtagacagacctgctgatgaaatagtggcagaggaacccactgaaattgttggagcttgatttagtgataatgcatattcaaattgttctaggttttctgtttcttatgttatcattgaaaatttaagttacaaacttactgttctgtcaaatgtttctgtgtaagctgagtgacagttttgtttagacaacgagaagacatttttggtgcgtaatatatatctgggttttgtttagaacccaaaatcagatttgcttgcttaaaaaaaaaaaaaaaaggaaagaccgccaaatagtgagctc

SEQ ID NO: 3354 - DNA, 270 bp, Oryza sativa
  Clone ID: PAT_MRT4530_10338C.1
ttcctgattcaaaaacttgggcagagcctgagggactgggttctgtataccgtcatttggttgctcatgcaaacaggcagagccaagctcgttgagccaactgacggacactaccggacgaaccttgccccctagtacaatgaccagtatctgcaccccacggagaatttgcccaagggaacaggccagtcggacctgattggggctcttacacaaggtgagccaattgatgactctagacctgcaggtgctgatatcctaggtggacaa

SEQ ID NO: 3355 - DNA, 282 bp, Oryza sativa
  Clone ID: PAT_MRT4530_10339C.1
atggggagctggactggtggagtcctccgtccacaggtgccggtatatacggccgtctcactgccctgcggggtccaccacgtgtgggtcccacctgccagcgacagcgttttgaatttctcggtggcgctggcttttttctgggcggagggggctgtgctacgcgccgcgctggcactgggagattcgatccaggaggattcgctgctgctacagtcacccgtcccgttcggcgtacgcaaggatctcagggcgctgccagcctggggccatcaattttag

SEQ ID NO: 3356 - DNA, 780 bp, Oryza sativa
  Clone ID: PAT_MRT4530_1033C.1
atgtctaacgacgcgctctggtgcatctcttcccacaacgacgggtggctgatgcacatggacgtgttcaagccttgcatcatggcatgcgataatcgtcacttcctcaagaactccttctccaacgcgaccatcgacatcccctgccgctttgatcggcccatcaacgccttcgtcgttgacaaccgttacagcacgtggcccgagaggttcaccttgcacaagatcatcgtgtgctcgccggacctcatcgtcgccgcctcccgccttatcgataacaacatcgtctctttcaggccgggcattgacacatcatggtcagttcttccatatgatgatgatgatggtgatcacaagagaatgtacgaggacatcgccttgtaccgcggcaagctctacgcccttactagcaacggggatcttcttgtccatgagatcagagataacaacacattgtctcgtgctgagcttgtgattaggggcgccgcagcagagcctccattgtcgcatcttcaatggcaatatagcatcgatgacatagtacaccagtaccgtgttatttcatgcaagtaccttgttatttcatgcagtggcactctgttgatgttcaggtgtactatttctcccatgttgggcacttcagcaaatgtggacgattatgaaatcaagttcaaggtgtttgaggcggatttggagggtggccagtggttagaggtgaaaagcttggatggtcaggtcgtcttcctcagaagcttgctccaaggcgatcctctcttttga

SEQ ID NO: 3357 - DNA, 741 bp, Oryza sativa
  Clone ID: PAT_MRT4530_10340C.1
atggcgatggtcctgcggcgcctcgcgggcgcgtccgccggtggcgccccgtcgccggcggcggcagcggccgcggccgcgctgctgctccgcccggcgctggctcgcccgatctccaccggcttccgcgaggagcgcgacaccttcggccccatccgagtccccaacgacaagctgtggggcgcgcagacgcagaggtcgctgcagaacttcgacatcggcggcgagcgcgagcggatgccggtgcccatcatccgcgcctttggggtgctcaaaaagtgcgccgctaaggtgaatatggagtatggccttgatccaacaatcgggaaggcaataatgcaggctgctcaggaggttgctgaaggacagttagatgaccactttccacttgttatctggcaaactgggagtggcacacaaagcaacatgaacgccaatgaggttattgcaaatagggccgctgagattcttggacataagcgtggcgagaagtttgtacaccctaatgatcatgtgaacagatcacagtcctcaaatgatacatttcccactgtcatgcacatagcagcagccacagagatcaattcaaggtttgtcccaagcttgcaacagttgcataagtcacttgattcaaaggtgaaatatggaattgatagaattgtttgtaccttaccacggatgtatcagcttgctcaaggtggaactgcagttggaacgggcttgaacactaagaaagggtaa

SEQ ID NO: 3358 - DNA, 2019 bp, Oryza sativa
  Clone ID: PAT_MRT4530_10341C.1
tttctttttttttttaatctattttcttattaaataaacataatccaaatatatttcattcatttgttctcaagtcaaatgtgataatatttccacgggcatggttgctacattaacttattacatgcagattcgccattgggaaaaggatggcatgccctagaaataaaaagcatctacttcaatgaatcaaaatatactgtttactatttcagtaacaggaatggaatcttgttttctccggcaccatttgcagtgcaaaaacaaactcttcaatacgataaggaactgaagatgtaaatgtctggcttgctttatttacgggtgagctagagctaggaaatccacaggacaggaatacattagtcgctatcaatcagaaggaccaatcattttctctggaacaacaagctcatggaattctgattctgtcaatactccgaggtctagagcagcttccttcaatgtgcttccttctttgtgtgctttcttagcaacagctgcagcattgtcatagccaattttagggttcaaagatgtcaccaacatcaaagactcgtggctgcaatatgtgtgaatcttaaggttgctgaatcccctgcacagttttctcaagacacagaggcaccccagcaatctcagtatctaagaatcagctgcaatcatggcttaaagcattcaacgcttaacgtctcctcgcaccaccctccgccccgcctccttgattacccataacctgagcacaaaccatggtcaaggcctcacactgggtagggttatcttttccaggcataatgctgctcccaggctcattttcaggtaggataagttcaccaagtccacatcgggggccgcttcctaacaagcgtatgtcatttgctatcttcataagagatgcagaaattgtgtttacagcaccactgctctcaacaaaagcatcatgcgctgccaaagcttcgaacttgttctcagctgtcacgaaaggtagttccatttcctcagctactgcagcagcaattttgacatcaaatcctttcttagtgttcaagcccgttccaactgcagttccaccttgagcaagctgatacatccgtggtaaggtacaaacaattctatcaattccatatttcacttgtgtggcgtaaccgctgaactcttggccaagggtcaatggggtggcatcttgggtatgtgtacgcccaattttaattatgtcttgaaattcaacagactttgaatcaagtgacttatgcaactgttgcaagcttgggacaaaccttgaattgatctctgtggctgctgctatgtgcatgacagtgggaaatgtatcatttgaggactgtgatctgttcacatgatcattagggtgtacaaacttctcgccacgcttatgtccaagaatctcagcggccctatttgcaataacctcattggcgttcatgttgctttgtgtgccactcccagtttgccagataacaagtggaaagtggtcatctaactgtccttcagcaacctcctgagcagcctgcattattgccttcccgattgttggatcaaggccatactccatattcaccttagcggcgcactttttgagcaccccaaaggcgcggatgatgggcaccggcatccgctcgcgctcgccgccgatgtcgaagttctgcagcgacctctgcgtctgcgcgccccacagcttgtcgttggggactcggatggggccgaaggtgtcgcgctcctcgcggaagccggtggagatcgggcgagccagcgccgggcggagcagcagcgcggccgcggccgctgccgccgccggcgacggggcgccaccggcggacgcgcccgcgaggcgccgcaggaccatcgccatctcgtgcgccgcctctctctctctctccctcactactaggaggtgtcgtacggcggcgagggaagcggcggctggcgaatgtggggcctcgtgccggagagcgaaaggcaggcaggttggtcctcgtgccgattcctcagcccggggatcca

SEQ ID NO: 3359 - DNA, 381 bp, Oryza sativa
  Clone ID: PAT_MRT4530_10342C.1
tcgttgcatcttcacgccgagcaccgacatctccatcgcctgaaaggaggatccgcgagcctgcagtctgaccggcctggcacatctacctaccggcctgcctaggactctacccatatgacgcaccgacgaccgctctgaacttatcctactgcggacgcatactgtcacctacgactccgccatgggctgctaccacatctgtgatgcgcacaccgctgaggcattctccctcagtgactgcaaaccaatgcaccccatgaccttcaacgatgccgccaacgacatactcatcatcaaggacgactgctgcatggtcggtgagctccagcctgcatgcaaggacacaagcaccagatggtgacactctgctcagctaca

SEQ ID NO: 3360 - DNA, 507 bp, Oryza sativa
  Clone ID: PAT_MRT4530_10343C.1
atgaggccggcggctggcgacgcggtggcggcggcgggatcgctggccggggggagcgaggacgatggggacgcgctggtggagtcggcgaccgcgcacggcgagcacctgcttgtttgctccgtcgatggcgacatcgaggccatactccggcatgctgcgacggtggcgcgcgaggtcaccgaggcgctgcctcgccgagcggggaccggcaacagagcgagcggcaacgatggtcacatcgagtgcggacctaggggcggtgcaagcagatccaacggcggcggcgaggtctcggagacggtggttcggaagtggctcgacgtggcgcaagaaaatccagcagtggtggcgagcttgtcgtgccgactagactactctggtgagggtagggacattttctcctcatcccaactccgtgctgctccgggctacggccggtggcgccggagcaagcaggtgctccaacgagcaggcaagaacgtgaagcgatggttggaagagtga

SEQ ID NO: 3361 - DNA, 541 bp, Oryza sativa
  Clone ID: PAT_MRT4530_10344C.1
gggtgcaggtccgcagcaaactgaacgagtcgctcaatcagcaaatcgtccgacacaacgcacagactgacgcgatcgtgcgcctgagatcgaaccgccgcttcaaatgcatcgtctgtatcgtattcgctgtggtcgtcgcgcacactcaacacaccggatttgggcggctcccgctctgttggcaaagactccgcatcctccgcacccgacatcagcgacaggatcagcgccagttttgtctttttgaaagcggttggtggcacgatatgtgaagcgaaagactcgacaatgagtgtagtgattgcccagtcgctgacccaacagccacgataatagttggacgcgtcgatgtccgccgctcgtgccgcactgagaccggcagctccgagccaattgtgatgcgccggtagacttgtcgatcccgtctcattgacgatacgccccgccatctcaatgatgcccctttcgcgctgttgcacaccgatttggtagtagtagcgctctggcgacgttttccaacaattggtcacgtggtaaa

SEQ ID NO: 3362 - DNA, 801 bp, Oryza sativa
  Clone ID: PAT_MRT4530_10345C.1
atgactgcttcctacaaagctaggtccctgtgccgcgcatggcctctattgctgacggatggtggggatgaggccggcggctggcgacgcggtggcggcggcgggatcgctggccggggggagcgaggacgatggggacgcgctggtggagtcggcggtgacctcggcgtcgagaccctcctctccatccccgatggcgacgagatcgatgacctcgccctcctccgccgcgccgttctcctctcttcaatcccggactcctctgccgccgccgccgcgcgccgcccccctcctcgcctggccgccgcgcgctccgactgctcgccgtgctcgctcccggcctcttgccgcggccgtgcgccggccgtgagcgcctccgcgcagaccgcgcacggcgagcacctgcttgtttgctccgtcgatggcgacatcgaggccatactccggcatgctgcgacggtggcgcgcgaggtcaccgaggcgctgcctcgccgagcggggaccggcaacagagcgagcggcaacgatggtcacatcgagtgcggacctaggggcggtgcaagcagatccaacggcggcggcgaggtctcggagacggtggttcggaagtggctcgacgtggcgcaagaaaatccagcagtggtggcgagcttgtcgtgccgactagactactctggtgagggtagggacattttctcctcatcccaactccgtgctgctccgggctacggccggtggcgccggagcaagcaggtgctccaacgagcaggcaagaacgtgaagcgatggttggaagagtga

SEQ ID NO: 3363 - DNA, 216 bp, Oryza sativa
  Clone ID: PAT_MRT4530_10346C.1
atgtcggaggtggatcgtcctcttagagaggaggcaggtcctgacagcgtcgggggtgttgaggcggtccaggatgttgagcaagacatcatcaggaagcttggtgaacctatccaccactggcatacaaatgcaaagaaacaacaacaacaacaacaacaacaacaacaacaacaacaacaacaacaacaacaacaacaacaacaacaacaataa

SEQ ID NO: 3364 - DNA, 198 bp, Oryza sativa
  Clone ID: PAT_MRT4530_10347C.1
atgaaggcagtcaagactggcgctgcactgtctcaggctcccggccacccggcgccctctggtagcgtccagggccccatgccccccggccaccagccggcgacagccggaggtgcccagtcgctggccttcatcgaatcatcgtgcacctcggtcggagtcgatttctgtggtctctgggcggtgatgcccagatga

SEQ ID NO: 3365 - DNA, 249 bp, Oryza sativa
  Clone ID: PAT_MRT4530_10348C.1
atggccaacgacgaggctgtgtgcctgtgtgcacacgtgcagtcctcactgctgtctgtcgtatgctgtgagctgaaggcagtagtatccatggtgacagggctggagcccagggagcagaggcccctgttcaggggcaaggagagggaggacagtgaccacctcaaggacatggtgctgctccttgaggaccctgccctcaaggacatgaagcttcgggccaccctcgtggcccgggctaccatctag

SEQ ID NO: 3366 - DNA, 612 bp, Oryza sativa
  Clone ID: PAT_MRT4530_10349C.1
tgagggaataccttgaagggactgagtcagctggtttcatgtaccctaggtgcaatgatttttaactacaacatgcttcaccaaagtgaagtgcctcatgcaatttcagagtataatttaatggttgattgtttgcagacagaccagtgcggtagatcattttaaaaagcaatttgcatatcttgaagaacattatgctaagggatcaacagcagctccacctgagaggcaacataactctttaccaagaccttctgtgttatattcggatgaccgtccacaaaacacagccaacatcgccgaggatctttcaaaatgtgtacttggagataatacacaaaaaatgcatcaaggttctgcttctgtttgtgcaaatagagttcctcaaggtggtgctgcaaggcctggtaaagcccttggttctgcgcttcgatatggtaactgctcaacatctactgctgagcgatatgagcatcgacgaaccgatagaaacccagcattggctactaacactgtttctccccgaggctctttcccctgaagaaatccatcctgcaacgactgaaacaggtgattctgaaaggggtaagagcctcggggagaaacagtgtt

SEQ ID NO: 3367 - DNA, 147 bp, Oryza sativa
  unsure (1)..(147): unsure at all n locations
  Clone ID: PAT_MRT4530_1034C.1
gaaatataagataacaatggtgaagaagtaaggtaatcaggaaaagctgttcantcctgttttccaaatgccccaaagagtatccctaacgccgcaaggcattcctatctatttcccaccgaccacccatgtcggcggacgcgtggg

SEQ ID NO: 3368 - DNA, 204 bp, Oryza sativa
  Clone ID: PAT_MRT4530_10350C.1
tgcgtgcgtgcgtgcgcatgtctggttgaataattgtttgaagaggctacagtattgctccgtggttctgttctcatgttcagtttcatgtctgttagtcgtgataactcgtgaccactgacaagtgacagctccttgcttttgcccaccgactttaatccaaatggaatgaacgaatgtcggatatggatttaaaaaaaaaaa

SEQ ID NO: 3369 - DNA, 221 bp, Oryza sativa
  unsure (1)..(221): unsure at all n locations
  Clone ID: PAT_MRT4530_10351C.1
ncagccagggacttcggtcatcttcactaaccttcgcagccggaattgaccaacgtcacaatgggccgtcttcaggaatacgaggtcatcgggcgccacttgcccaccgaggctgaccctacacccgccctctaccgcatgaccatcttcgcccctaacgagacggtcgctaagtcccgatactggtacttcttgcgcggtctcaagaaggacaagaaggt

SEQ ID NO: 3370 - DNA, 3361 bp, Oryza sativa
  Clone ID: PAT_MRT4530_10352C.1
ccacgcgtccggacgaagcgccagcggagaggggcctctcgtcggcgacgcacgccggccggaggaggacgccggcgacgtcgacggaagttcatcccagaccgtctttccagaaaatttcatagtgccccagccagcagattcccgcgaattatttcgtccacgggttgattctcctgccttgtgttatgacatgaacctcattcatgagtgcctcacgcagccacggtcactaactttcttttgccgagcagcatcctccttgaaacgatatggcactgccgggatggccagggcaaagcacgcgaatttattcgtttagttcctgaaggtgcgaaagacggtcatgggagaactggagatgggagagaatttgacgtctttctcttgatggaaggaaggcacaaccgcacatgtctagggcaatgtactaccgtcggtgccatgtgcttgtgaccctctcttgtttgggcacaacacaacaaatcagaagcagaaagcgcaggtgcactcatatgtgccagaaatatattttccattcgcagagtatactgttatgttgtataggattacagtgaattgccaccctggtcttaatgttgtatgaaagatttttcacgtttttgtgatgatatgtttttttcgatgaaaaaaaacaaacaaaaaaatctacaagggaaggtggaaattgaatcgtaagcatggacttggatgccagacgtaccctaatggagacatgtttgacggttcttggattcagggagaaatagaaggccatggcaagtatacgtgggcaaatggaaacacttacgttggcaatatgaagaatggcaagatgtctgggaagggaactcttacttggaaaaatggggattcatatgaaggaaactggttagatggcatgatgcacgggtatggaatctatacatggaatgagtgtgggtattatgttggtacttggaccaagggactgaaggatgggaaaggcacattctatccaaaaggttgcagagttcctgttaatgatgagctctacatcaataatctaagaaaccgaggtgtgctgcctgacattagaaggcagaatcacggctcacgcatccttcactcttcttcggttgacatggggaacatgaaggttggcttaactcgggaatcttcaggtccttcatctagaaggaactcaagtgagcaacctcattcgaaaaatgtatccttggaaagacggtggagccttgaggtggccattgaaaaattcattggccatgacgcaactggaagctctggcctagaaagatctgaaagcattaatgattctgatctgcctatgctggaacgggaatatatgcaaggtgttctaatcagcgaggtagtacttgacaggagtttttcggattcgtccaagaaggcaaaacggcgccagaagaaaattgttagggagacaaaaaagccgggagagacaataattaagggtcacagaagctatgatcttatgctcagtctacagcttggaatcaggtacacggtaggaaagattacgcccattcagaaacgtgaagtccgtgcttcagattttggtccacgagcaagtttctggatgaccttccccaaagaaggatcacgacttactccttcacatcctgcagaagacttcaaatggaaggactattgtcccatggttttcagaaatttgagggagatgttcaagattgatgctgcagattatatgatctctatatgtggaaattctgcacttagggagttatcttctccaggaaagagtggaagtgtctttttcctatcacaagatgatcgattcatgatcaagactcttcggaaatctgaagtccaggttcttttacgaatgcttccaaaatattaccatcatgtccgtacttatgagaacaccctcataactaagttttttggcctccacagggtgaagccttctagtggtcaaaagtttcgctttgttgtaatgggtaacatgttttgcacggaattgaggattcatcggagatttgatttgaaaggttcatccttaggccgttctactgacaaaatcgaaattgatgagaacacaactctgaaggatttggatcttaactattcattttatcttgaaccttcctggcgtgaggctttacttaagcagattgaaactgacagtgaatttctaaggacccaacggataatggattacagcttattgcttggtgtgcactatagagctccccagcaccttcggacgcgtgcatcttatcatcgaagcatggcagcagatagattaactgttctttcagaagaagacgctcaggaggacgatgctttcaactacccggaaggtctagtgttggttcaaagaggtggtgatgaaaacagtgtggttgttggccctcacataagaggtagccgtttacgatcaacagccgctggatttgcggaagtagatctactacttcctggtacagccaggctgcagatccagctaggggttaacatgcctgcaagggcagagcagaaccctaaagaagaggaaagcaaatcgtttcgggaggtgtacgacgtggtcctttacctgggtatcatagacatattgcaggagtacaacatgtcaaagaagatagagcatgccgtcaagtccatgcagtacgactccatctccatctccgccgtggacccccagttctactcggagcgtttcctcaagttcatccagaccgtctttccagaaaattcatagtgccccagccagcagccattgcgattatttcgtccgcggattgattctcctgccttgtgttatgacatgaacttcattcatagtgcctcagcagcaggtactaattttttgccgagcagcatcctccttgaaacgatatggcactgcgggatggcagggaaagcacgcgaatttattctttagttctgaaggtgctgaaactgaaatgtgcgaaaggcggtcatggagaactggagatgggagagaatttgacgtctttctcttgatggaaggaaggcacaaccgcacatgtctagggcaatgtactaccgtcggtgccatgtgcttgtgagcctctcttgtttgggcacaacacaacaaatcagaagcaaaagcgcagtgcactcatatgtgccagaaatatattttccattccagagtatactgttagttgtataggattacagtgaattgccaccttggtcttatgttgtatgaaagatttttcacgtttttgtgataatatttttttttcgatgaagataaacgaacattggcacgtaatatagccaatgtgtacatcatgctatgcgtttcttacatatatgtacgtcatgcagtgcgtctgttcccatatgc

SEQ ID NO: 3371 - DNA, 204 bp, Oryza sativa
  Clone ID: PAT_MRT4530_10353C.1
atggagaccgcggtggcgcagtctcacgctctcataaaaatgtatctatttcatgatttgaaactagtgcttcattttgcatctgatgacttggagggcgtccccttctccatggaaaactttctggccgacgtcaccctcaggatgatcatcctgttctcggatctcaaggatatgctgccgccatcatggaggtcaccctga

SEQ ID NO: 3372 - DNA, 136 bp, Oryza sativa
  unsure (1)..(136): unsure at all n locations
  Clone ID: PAT_MRT4530_10354C.1
aattaatgggaaatcctttattaatccagataagggagagaacaataccagcntacatttaacccaaaacagtttgatgcagggcccccaccaacatggcttttcttaattaaacccataaaacaatgcaatccta

SEQ ID NO: 3373 - DNA, 687 bp, Oryza sativa
  Clone ID: PAT_MRT4530_10355C.1
atggcttcagctccactcccacaggcagctcaactggggtataagctaaacgtcttctccttctggatcctttatcttcaactgaggatcaaatcaactggcacgctcacgaacctaaaagcaagattttggacctgcactgaagttaagcagatcttccaggcctgtgtgtatttttcgcatcaacacgcttttggcacacccagtgggactgagttgcgacaactttttctcatggcagagaaacaatcaccggcatcgacaggcaagcctccaaatcctccgggggccaaatctcaaaaccctccggggaccaagcatccaaaacctccgggaaccaatcaattatcatctgaagtcgatactgaaaacattgtcccagttactatagaaaaaatatcaccagaacagaagaaggagtttgaactaatgataaagagtgctcaggagcagttcatgaactcaattggagaaacccgccagggaaaagttattcaaaaatacaaggtgaaggtggttgctgccgatgaacctggaatgagctcatcccaaggtggtaaagctaaaggtgttgcagatggttcgggtgataaaggtcaggggcttcaagatggtgtggtcgaggatgttgatgaagatgatactgaggagcaagaatctccaggatgcaacaatttccaagactag

SEQ ID NO: 3374 - DNA, 258 bp, Oryza sativa
  Clone ID: PAT_MRT4530_10356C.1
atgttgagtggtcggtcagaccgcccatatctcggtctgaccgaatacggctccggcagctctgtatcgggcatcccagaacgcaccatcccggccaccagggggccggtcagacagcacaagtgccgccggtcagaccgacattcatgccggtcagaccaccacaagctggccggtcagaccggcttagcgcacgcggttagaccggccctggtcattacccctcttaatagtacggcgaagctaaaaataaactag

SEQ ID NO: 3375 - DNA, 1226 bp, Oryza sativa
  Clone ID: PAT_MRT4530_10357C.1
gaacatgaacatgataattaactcatttggactttccacgtacctgatcaacttgatagttataattagtaaaacagagtatatttaagctgggttgtgaacagtacaaataccatatattcaaacaagcatggtgttattgaattctcatacctagagagaatttgacttagcgaagcaagctgccaaaccgtaaaccaacataaatatttataaaatttttgtatactccgttacagatagcgttttaggaattcattaatgcgggtgtactgaacctctgggtagagcagagttgcttcggctccattgtcaccaatgtcgaagtttgttaagcaaccttcgtagaaaatgtggtagaaatgtgttactcccacttgatgagcaaaatgcgtatctttcattgaagccaaaaattcatcaccatgtatatggaatttggtaagactttttccagagagtttttcccacatcgcgatcaactcgttctgagtgaggcaattatcttgtggtcttatgtatattgtcttgttcaaggtgcgaggatcatcgattgatttgattgtatatgttcccacatcatcttcatccacaaaaaacactttgacgttgccatccccatacacaccaactctctctttgggagggaggagagttttcatctgacagaggttaggacagaagtaagctgcaaagcaattggcagaaacatatgtgtgggggatgtttgcatcctcaattgctctccttatcaccatcttctcatcaaatgaaaccctcccaggttctagagcgtcccccatccttgatggatccatgccgaattcagatggcaggaatcgcttgacatttccagcttctttgatggcctcgacgagcttgagctggagcatgaggttgtggctgcggaagtggacgccggacatggcggagacgacgacgtccacctgccggacggcggcgacgaggccatcgtggtcgtcgagcgacgcctcgaggagccgcgcgccctgcgccttgaaggccagcagcatctggagcttgtcgatgtcgaggccgatctccggccggagcaggacgtaggtggggtggcccgccgccaagctcgccgccacgatccgccggccgatgtagccggtgccgccgacgatgaggacccggctcttctccatggccatggctccctctgctcgctcagatgagcgacgcaaaaacccacgcgtccg

SEQ ID NO: 3376 - DNA, 565 bp, Oryza sativa
  Clone ID: PAT_MRT4530_10358C.1
ccgggctgcaggaattcggcacgaggcgcccacaagtacaccactccagttttggtatcttcttaacaaactccatccatttacaattatatgaaaatgctttatagttgccaggatgcaagctaaattactttgtggaatataacaattcatcatttcttagatcttcaagattactagaggcgctaaggtgacaaatatatttgctgcttccataataactagccaagaagtctaaacataatgttagaatataatttcatgatccacccattgtattatatttcccatcttgaaattgatatgtcctaaaagtatgtttaaaacattattatatgcttttcaagggaagaataaccagtggtatgaagaagaaaaggacgcaatataaaattgatcagtgggcaactaaatgccaaacacataaaagttccttgtatgcaatgtttttccagtactgagaaaatatacaatgatatgtatggaagtagacaaaaagtccaatatgatagtagcttgcaatgttgttgatataatgcatcatcatttcttagacactgtcaat

SEQ ID NO: 3377 - DNA, 369 bp, Oryza sativa
  Clone ID: PAT_MRT4530_10359C.1
atgtgggctcaagtatatcactatgaaaccgccaacttccagggggccagtctgactggcattgtctcattggtcagaccggccgatacccgccggttagaccggcatatcagcctcggtcagaccggccctgggtacagtaaccaatcaaacagaagattcagaggcggacgacgacgacgagcttcggaggcaaacgatgacgacgacgacgaggaggtggccgggagcggaggcggacagcggcagcgcggccccacgctcccccgtgcgccggcgcctctctcccacgtggatatggctgcggcgacgacgacaacaacgagcttcggcggcggtgacagcaacgatgacgacgagctgcggtga

SEQ ID NO: 3378 - DNA, 1383 bp, Oryza sativa
  unsure (1)..(1383): unsure at all n locations
  Clone ID: PAT_MRT4530_1035C.1
atggcgatacacctgaccaaccctcctccggggctstacgccaccaagacaccctcgcagcagcagcagcagcacaggcccgcgggtagccatgccgctgcggcggcggcggcgacggtggcgatgccgcagacggcgtccgcggcgtcgtcgagcgtggcggtgaagaagaacatgaggcaggctgcsccggtggtggtggcgaggaggaggacgacagcggtggagagtggcggagtggcgttggcgagcgtgtggagggaggtgcagggggagagggattgggagggcatggtggagggcacggccgaggaggagctgcacccgctcctccgcggcgagatcgtccggtacggcgagctggtggcggcgacgtacaaggcgttcgacctcgacgccgcgtcaaagcgctacctcaactgcaagtacggcaaggcccggatgctcgacgaggtcggcatggccggcgcagggtacgaggtcacgaggtacatktacgccgcgcccgacctcgccgccggcccgccgtgcccgagccggtggatcgggtacgtcgccgtggccacggacgaggcggtgcgccgcctcggccgccgcgacatcgtcgtgtcgttccgcggcacggtcaccgggtccgagtgggtggccaacatgatgagctcgctggcgccggcgaggttcgacccggccgacccgcgccccgacgtgaaggtcgagtcgggcttcctctccgtctacacctccgacgacgccacctgccgcttcacctgcggcagctgccggaaccagctcctctccgaggtgacccgcctcatcgccaagcacaagcacgaggacgtcagcgtcaccctcgccggccacagcatgggcagctcgctggcgctgctactaggctatgacctcgccgagcttggcrtcaaccsggacgcccgcggccgcgccgtgccgatcaccgtcttctcnttcgccggccctcgtmtcgggaacacggcgttcaaggacaggtgcgacgagctcggcgtcaaggtgctcagggtggtaaatgtgaacgaccccatcaccaagctccccggcatcttcctgaacgagaattctagggttttgggaggcaagctggagctgccatggagtagctcatgctacacacatgtgggagtggagcttgccctagacttcttcaaggcgagagacccagcttgtgtgcatgacttggaagcatacttagggttgctcaagtgccctaaggtgacaaaagtgatgaaagaaggggaggatctctttagcaaggccaagaaaattgttcttgagcaaagttttgacacttggaggtggcaaatggctgcaattcaagttggtggcttggtacaagccctaggaatgtag

SEQ ID NO: 3379 - DNA, 417 bp, Oryza sativa
  Clone ID: PAT_MRT4530_10360C.1
atgaggaagagcggcgtcaatgccaaggccgtcgcggccggggccaccaccgtcgacgccctctccttgctctcccccgcctcgccaccgaaccaccttgccctcctccccgccctgcgcgacctagctcccggcctcgtgctccagcgccaccgccgcggcgcccccacccctgcctccgccgtcgcccccgccttcaccgctgccatcgccacggtgcccccaccgccgcgtccagctcctcccccgccggctgccggccgcgaccatctccgccctcgccggccgtgccccatgcttcccccgccggtcaccgaggcggcgcgcacggagtgggcttcggcggtggcggtgggaactgtggtggtggcacgcggcggggctgcaacggcgggcggcggcggcggcgggtcgtga

SEQ ID NO: 3380 - DNA, 396 bp, Oryza sativa
  Clone ID: PAT_MRT4530_10361C.1
atggcagcaccgccacctcggttagactacccacgtagtcgccgccttaggccaactgtccgcctcgcccagttgcctcatgttgtcatcgaatctccctgcaacaatgccatgggccacagaccaatagcctacaaaactgccatcccagctggcgtcaccccgtcgttgttgcgctgggcttcggcctcctatcggcctccacctaccgccaccgtggacggcttactcctatgtcgcgtcgggtttatgctgtcgccggcctcggcctcccatcaatctcctactattgtcgtccacatcacgccaaccagggggcgcaccacctcgcctccatggccacactacattgcctcacctcgccttcatgccgcaccccgctccttctggttctag

SEQ ID NO: 3381 - DNA, 298 bp, Oryza sativa
  Clone ID: PAT_MRT4530_10362C.1
atacggtggttacttttttgcaataccgttgtcttgatggtggatactacggacgacgaacaatgacattgaaaggagtgaacagggccagagaacagcgagctcaagaactcgcattgccagaatcttgtctcagaggaaggttactacttgaaagcaacatggctaaacttccggaaatgactccagaggacatgatcatcactaccaggaaggatctttgggatcaggagtacgaagttcaggcatgggaaaagacattgaaggagtgcgaatcatactggggaaatactcggct

SEQ ID NO: 3382 - DNA, 166 bp, Oryza sativa
  Clone ID: PAT_MRT4530_10363C.1
ctgatgatccaagtccttacctgttggccatatggacaccaggcaagtgcatttttctttaaatttataactgtccgtgtgtgtgtgctggttttcgtcgagtcatgtggctactatgcagatgaactaaaggacacaagggaggcaccaaaccgtgctgcaatct

SEQ ID NO: 3383 - DNA, 1788 bp, Oryza sativa
  Clone ID: PAT_MRT4530_10364C.1
aagtagctccgttggcattcttccgtacaaaactgcgaaggcaccaaagatttcaaatgggaataatgttgtggtcaagactgaaatgatgcagaagtcaagaaatggaagccatcctgctggaggaaggaatgtccagccaaagaatgttgtaagctgcaatgagcaaaagagaaagactccaccggaggcgaagggcgccaccaccgccgcgacggccatggacgacgacgccgcctcggagatcagcgactgggaggtgctctccgccgcctccgcccacggcggcggcggcgaagacgacggggaggacttcgtggtgctcgtgcccggcgagggcggcggaggcggggacgtcctgcacgaccacttcgccctcgtcgccccctccgacgtcgacgggttccccggcgaggagggctcgtggtcggggctcctctccgaccccggcgacaaagggaagggggaagggtttgattcggttccggaagggagattggatcctcttgttgaggaggattggagcgaggagcggttgcgattcggtggcggggttgaggaggcgagcggagaaccctcggttcttgccgctgcctcgccatgcggagaggtgaggcgagaggaggcggctcagcgggagattgagcaggggaaggaagcggatgggacgggagaggatttggatcctgacgtaattgtggttgcagaattatcccgactcgaatcaccggagaattccgatgtgcaactggaagtggaagatggaggaagctcacttcctgaagcttctgaaataggtgatgcattggggtttgtccaagaggcgctggtgcaatggaagagtggtgatgtcacatccggctgcggtgaaccggaaggcgaagcgaaggatggttctttgcctctggcacaatccccggttgctggagaaatctcactcgctgaagctgctgcggtaggcgatgcgatgggggctgtcgacagcggtaatgccgcttccggttgcggtgaacaggatggtgaggcaaaggatggctcttccttgcctctggcgcgagccccggttgccgatggaggagagaagcaggtggttgtgtggtggaggctgccgttcaggctgctgcaatgctgtgcttggaaggtgaagccgatttggtccttctccattgccgccgcattgctggggctattcgtgctggggaggaggatgtacaggatgaggcgcaaggcccggggacttccccatattaagattgcatttgatgataagagagcctctcagtttgcagaccgtacagctcgtctcaacgaagccttctttgtggcaagacatatacctatgctgaggacttcttctggtgctgtgttcccgtggtcaatggttcaataaaagatgaaccagcctacacaaaccttcataaaaggaagataatgtgttacgtagttagcagcagatctgcatgaggaacactagtaagagcaagagcatctgagttggtatttgccccgatatttttctcgtcggggcaccaatgtatgtcgatgcctgagatagtagatgttccttttgatttctaagctgccataccacatcttgtttattttgtcccccccccccccctttctttttttttttacccatttgccttgttattaggtcaagttctgaagtgtcagtgtagtcctggacttttgtcagttgctctgtatgtgtttattatagtgttacagttctcccaccatcaatccagtgaaagctaaattcttcaaaaaaaaaaaaaaaaaaaa

SEQ ID NO: 3384 - DNA, 513 bp, Oryza sativa
  Clone ID: PAT_MRT4530_10365C.1
atggtcacgagtgttgatcttgactcaagcattaaccccaagtttgatggcgcaaggcaaaggaggtctcgtcttagcgatccagagccgccagagccgcagtcggtcaaaccgagcccctggcggtctgaccgagctgtggacggtctgaccggcctctacactgcggtcaaaccggccagtgaggtgttggagagtgagttaagccaatccaagtgcattgcttcattgttagagctagtgtggcacttgatcatcctcggcaagcatcctaggcttattactcttggaggttgccgcctcctagacggcttgtggaggtgttgcccggtgacctctccgaggagattgtggaggaggcccggcgccggttgtgagtggtttggagttcaccaccttcggagtgaaggaagaactacccttgtgatcgaggcttgggtagtcctctccatgggccggctcccaccttacccaccccttgatgaagggggcgtgcggtggcttcgtggttga

SEQ ID NO: 3385 - DNA, 513 bp, Oryza sativa
  Clone ID: PAT_MRT4530_10366C.1
atgaagtacagcacaccggagcgagcaagccaagggcatggtccttcccaagctagagaatcagaaaatgccgctccttgtcctgattttcttccttgtcctcggtgtactttaccccgcggcagcggccaaagagtagttcatcttcaacgagttcaccagcacaaatctcatcttcgatggcatggtgatggtgactctgaatgggctgctcatgttgaccaacaacacaaacaagcaaaggccatgccttgtactagtgcctgccacttcagttccacaagatgcccaatagcacggggaatgcagtccttctccaaggccttcgtcatcatgttcgaggaaatgagcaaccacggcatggcgttcatcatcggcgctcggctccaatgccgcgcggctgctgctcgtggtggagtccgcaaccgctgctcccctccagctcccctgacgacggcatcttggtgcagctcgtcggagttcatcggcgggaagataagagagggggaatga

SEQ ID NO: 3386 - DNA, 282 bp, Oryza sativa
  Clone ID: PAT_MRT4530_10367C.1
atggggaagaagaccgaaagtatccgagcggctgaagaactctacccgcagcgacagacaacgcgagacacgtcgatacagaatcagaaccaaactagcccacgaatctttacgagaagaacatcacggggtcgatcgagcagagcaccacatccccacccaaccaagaaaaacaaatcaagcactcaccagatcgagcaggatgaggaggaggaggacgacgaatcggcgataggagctgagcactcacacacccgcccgggccaaagccgaaggaattga

SEQ ID NO: 3387 - DNA, 666 bp, Oryza sativa
  Clone ID: PAT_MRT4530_10368C.1
atgccgagacatgcgtatatttcacccgcaaaaacggaagaagcggtcaactggaaaaactatctgaagcaagcttttgtcagcctaactagaatagaaacacttgttataaaaagatgcaccattggcttgcctcaggagtttgaagatagagatatatataagctgatctcctcgtgcccctggctgaatatgttgcgtctgaaatatttgaggtatctatcagaagggtgcttgttggcagaactcccaggcgtgtttgatcgtctaaggaagatttgtattgagaagtgctcttgggtctggacagaggtcttgggtgcttgttcaatatttcggaatgcctctaagttcagagaacttgagatacggagcttctacagcgatgaagaattttggtatcagccaatatgggataacgatcaggcggagattgaagagcctaccttgcatcacctcgtgacggtgaccattaacgatttcgtggggctggaacacgaaatcgctcttgttggactgctcctgagatggtcacccaccttagaggaactgaagatagtcagggaggacgcggatgtcccgaatgatgattgcatgttcagggttcttaccaagttactggctctcccgagggcgtctagcaaagccaagatcattgtcatctga

SEQ ID NO: 3388 - DNA, 562 bp, Oryza sativa
  unsure (1)..(562): unsure at all n locations
  Clone ID: PAT_MRT4530_10369C.1
tttccttcgatgctgtcgtggtcaacccggttgaacatcgcggttggcgccgccagggcctcgtcttccttcacgacgccgagaagcccgtcatctaccgcgacttcaagacctccaacatcctactcgacccggagtacaaggcgaagctgtcggactttgggctggccaaagatgggccggagggcgacgacacccacgtctccacacgcgtcatgggcacccacggctacgccgcaccggagtacatcctcaccggtcaccttacagcaaagagcgacgtatacagctttggtgtcgttctgctaaagatcttatccgggcgacgggccgtggacaagacacgacctagcagggagcagcatctagtcgaacacatgcgctcctggctcaaggatccacaaaagttaagccgagtcatggacccggccctggagggccagtactccgctaccgcggctcataaggcggccctggtggcgtatcggtgcctgagcggtaaccccnaaaatagaccggacatgtgtcaagtcgtgaaagacctagagcccctcctcaatgt

SEQ ID NO: 3389 - DNA, 201 bp, Oryza sativa
  Clone ID: PAT_MRT4530_1036C.1
atattatatatattatatgggtgttattttaaagtgttttacatcctacattatactaaaaaaactcctctccaccaaactcctaaaaacttaaatccaactctccatattaaaaaaaaccacccccattttcaaaccattatctcgcaaaaattccaaatccctatcgaacaattcttaaaaactctaaacccaaactct

SEQ ID NO: 3390 - DNA, 1004 bp, Oryza sativa
  unsure (1)..(1004): unsure at all n locations
  Clone ID: PAT_MRT4530_10370C.1
aaaccctggagccanagtctcgaataatagaatcacatcatcacttcaaacctcttctattnccatgcctntctctntntagtataaatatacgaactaaccatgatcgatgcatttgtgctatccatcgagtttgataattacttcttattgtttcattagcaattaagctatactagcttcagtgcagtttaatcgatcatggcggctaattcctccaacgacaccgtcaacgtggcctccgaggtgagcagcatcctctccaagctcaacgatcacctcgccggcgccgacgaggccaaggagccggcggggacaagcatcatcacgctggccggggagaacaacggcgccaccatggaggtggccggcgacgtggaggacctcgtcgtggtggaggccggcggcgacgaggacgacgacgaggaggaggagagcgtggtgagtgcctacaccaacagcaactaccaggctctgaacaactcggtgctcgtcgccggcagctgcgccgtcaaggaccccggcgtccacgtcgtcatcgtcgagcacgtcgacgagatccgcgactacgacgacgacgtccgggacgaataagcctgcaactcatctatcatctcatccatctgcaggtcatcaacaccatctatacatatgtatatctatcgatatatggattaaagtgatgatcaggtgatcgatcatgatcacctgcatcatcaatctacatcagaaattaatcgatatatacatcccatcgcatgatcaacagctcgatatatatgtatgttgtgcacgtggcttcggcttcctttgttaagtttcttaattaatttacaagatttggtagtcatatgtatttgttctggttgttgtagttgtgatctatatttatacatgttgcttctatatatgtaagttggtttgtatgtgttttcttccaataaaatcttgtttactccaatgtaaaaatgttaattaactataatgtttgttgatttgtctca

SEQ ID NO: 3391 - DNA, 431 bp, Oryza sativa
  Clone ID: PAT_MRT4530_10371C.1
attgacaagattatcaatctgttgattattcactggatagctatcgactagagcgagggatacacggaccatggcttccacaggagactgtcctgcgatcggtactgtagcatactgctacctactcatgatgaaagcggaggaaggatatctgctgcaaggatttccttcattttaagcggactatcccttggaatgtcactgcctgaactgacgcatttcacagaagcatcggttgctgccacaagaaccatgtctccatgaacccgtgtgccagagataaatgctgatgacccctcatgactcagtgtgtatctagtccggggagagctatagactgagacttgccgctttgtatacccatagaggcctcacatgacggtgctcagagacttcaacctccatagtcctgctgggcaaactgctgcctt

SEQ ID NO: 3392 - DNA, 198 bp, Oryza sativa
  Clone ID: PAT_MRT4530_10372C.1
atggcgcagatcatagcccggcttgttcttccgttgtcgttctttgcaatcctagtgttcctcctgcctgcccaagggtctcaatatatacctgaaggggaaagaaatgatattcatttgcttgagttccacgctttgatcgagacgatggtcatcgatgatacgatgaagagcttttgccatctatttgatgagtag

SEQ ID NO: 3393 - DNA, 334 bp, Oryza sativa
  Clone ID: PAT_MRT4530_10373C.1
gagctctggcgcccccgatgtcgggcaccccccatgtccgaggtgtttccccggctgcccgagaggggacttggaggcgcgccggcggcgaggcctcccggcgttttgcacacgtggacactcccccaccgcgccggaggtggtgttttgctatctggctggcgagatttggctactagctaggctactgtagctagctgtgcacagtatgtggtgtggttactaaaataaattagtgttttccctttgtttggaagcataagtgtggggaaaaaatgatgaactccgcatgttcctctctataaattcttgatgattccttaaaaaaaaaaaa

SEQ ID NO: 3394 - DNA, 297 bp, Oryza sativa
  Clone ID: PAT_MRT4530_10374C.1
caggtacaggaagccatatggtagagctagtagcaccgatattgtaatgtgaatatccacaaacaggattagtgttttcgtcagctcgatcgggttcagggacttcagattcgtcagtttgttcatattctgttcagaagacgtggtactataaggcccgtaaggacgtggattcgcaagtactacttcaaaagtgcaggtgtgaaatccccagaaagaaatgtggctgacgactgtcattttgttggtgtcatgaggctttttattaatggtatatagaggctctttgataaaaaa

SEQ ID NO: 3395 - DNA, 151 bp, Oryza sativa
  Clone ID: PAT_MRT4530_10375C.1
atatgttaattacacttttaggttacagacacattttaataaccacatggatagaacatagggtaaggtccaaccggagaaacccttattttccattgtctttttcagatggtacaaacagtgatagtggactataagctatagtttcaca

SEQ ID NO: 3396 - DNA, 504 bp, Oryza sativa
  unsure (1)..(504): unsure at all n locations
  Clone ID: PAT_MRT4530_10376C.1
ttatttttcctcctcccttcccttcccttcctctcgccgaaccaacgcggaagaaggagctcgccgccggctagggtttgccgcacacccgccgccgagcagctagcaccggagtgttgggaggggaggctcgcccgccgccgccgccatgccgcagtcggtgctcgtcgaccgcgcgacgagcgagtcgctcatcgggcccgactggtccctcaacctcgagatctgcgacatcctcaaccacgacccctcccaagccaaagatgtagtgaagtctatcaagaaacgcattgggcacaagaactcaaagatccagcttctcgcactaacattgctggagacactgattaaaaattgtggagactttgttcatatgcacgttgctgagagggatatactccatgaaatggtgaagatagctaagaaaaagcctgattatcatgtaaaagagaagatactaattctgatagacacttggcaagaagctnttggtggttcccgtgc

SEQ ID NO: 3397 - DNA, 521 bp, Oryza sativa
  Clone ID: PAT_MRT4530_10377C.1
atggctctgccaccaccgacgagcttagagccctctccagtgacggtgcttcctctccacccccgcgcggtgcctccttgcggcgccgcaaccgctaccagcgagcttaaggccctctccggtgccgcagccacctttgctcaggacctcagtggagacaaggccttccactcccctatatgcctcctcgccaacgagttgagctcccgcgagaaggagacgagtgagaggaagaagaaatggggaggaaggcgtacaatggataagatccgcttggatggtcgatacaaagcattttcgcgaaaacacagtgacgtggaaatattcatgcatttcacccggaagtattccaaggggttaagtaattcaaagaggggctcggagttcgggaaaagagtcgagggggtggggttgggccgggaacgcatggagcgtgaacagcaaccgactggtgtggagctgttgggcggcaagactattgtgcgagtggtgttatttgtggaccgccggggggccagcgg

SEQ ID NO: 3398 - DNA, 2643 bp, Oryza sativa
  Clone ID: PAT_MRT4530_10378C.1
gaattttcctcctcccttcccttcccttcctctcgccgaaccaacgcggaagaaggagctcgcccgccggctagggtttgccgcacacccgccgccgagcagctagcaccggagtgttgggaggggaggctcgcccgacgccgccgccatgccgcagtcggtgctcgtcgaccgcgcgacgagcgagtcgctcatcgggcccgactggtccctcaacctcgagatctgcgacatcctcaaccacgacccctcattgcttcctgataacattcttcaattatatcgtatggtgttgtcacttctagtatatttactcatacttcaatattcacgtagccaagccaaagatgtagtgaagtctatcaagaaacgcattgggcacaagaactcaaagatccagcttctcgcactaacattgctggagacactgattaaaaattgtggagactttgttcatatgcacgttgctgagagggatatactccatgaaatggtgaagatagctaagaaaaagcctgattatcatgtaaaagagaagatactaattctgatagacacttggcaagaagcttttggtggttcccgtgcaagatatccgcaatattatgtagcatatcaagagctcctgcgcgctggagctgtatttcctcaaagaccagacagctctgtgccaatctatactcctccacagactcaacctctacggaatcttcctccagctctgcgtaatactgagcgtcaacaagaagcacctgaatcttcttcaacaccagaagtacctacactgagtttgacagaaatccagaatgcacgtggtgtcatggatgttctttcagagatgttgaatgctattgatcctggcaacagagagggtctaagacaggaggttattgtggaccttgtggatcaatgtcgttcttacaagcagagggtggtacagcttgtcaactcaaccacggacgaggagctgctaagccagggtctttcattgaatgatgatttacagcgtgttcttgcaaaacacgatgcaattgctgcaggcatagcagttcgtgtagaaaaaccaaaatcagtccaggcccgaggggacaagtctccatcaatcaaaccagaaggggcaaaacagccagatcagaggtcttctgaagctgccagtaccgtgactccatttgagcaattagcgcttccagcacctgcatcatccagcagttccaaacctcctgtagaaccagctgttggccctagtattgacctacttagtggtgatgactacttcaagccagaacctgttaattcccaggcccttgtttctgtaggcaatccacctgctgcttcagccaacaataccttggacctggtagacatgtttgcacaaagcaatgttggcaacaacccgaaccctgctgtcacctcttctatgttgaattcaaatcctagtctctctgagccacagctgtatccctcacagcagactgtgccaccacaacagccttctccatactctaatgggttaacttcaaatacaatggcaccgtatgatcaaccctctgacataaacgccacaggttcatggaatagtcaatttgctcatggaatgcttcctccacagcttcctccacaacttcctccacagcaaccaccaaattacggtcaaggtcaagatcagagtggtgatctcccaccaccaccctgggaaactcaacctgcagaaagtgatcaattccagcctgggcaacctcgtgggctagcaatgccatcagggcaaattggaggcattcaatcccaacctgttcaagttcagcccgggcaagttgcaccattacaaccaatgctgaccgggcaacccacaggaatgcagtttcagcaagggtttggggatcagcttggggctcaacaaacacaacccttgcacacacaatatggtggaatgtatcctacaatgcaaggtaaccaatcagctggcatgtatccccagcagatggctggagatttctaccagcaacagatgtatggtggtcagatggctggttatggatacggtcagcagtctggaggatactatgctccaaacgctgcgtatgggtatggcggtgcaaacgagctttctcagggaatgaatggccttgcagtgcaagataacagtttgtatggaacttctgcatcctcttccttccagcagccaatgaggccatccagacccgaggattccctctttggtgatcttgttagcattgctaaaacaaagcctagcaaaactgcagctaataaggctggtggcttgtaaagatgagtggatgcttattaacacttgtggccgcggagatagcttttcctcatagtacataagttctttgaattatttttctctattggaaagtagtaggtgagcgttatagattctgaaattcatagcgagtgcggttcagtaaatttttctctgtcaacttgcaagcaattatagtgtgtttgcttcttgcaagctcttaatttcctgcgccatcaggagttttctgtagtctgtaaaccttggtaagaaaaaaccattgaacattctttaatgtttcctgtaaagaattgatatcgtcaagaattaaaaaaaaaaaaaaaaaaaaaaaaaaaaaaaaaaaaaaaaaaaaaaaaaaa

SEQ ID NO: 3399 - DNA, 407 bp, Oryza sativa
  Clone ID: PAT_MRT4530_10379C.1
gggggaaagtttattaataaaactcaataaaccattatgacagaaaattggcacacttgatgtgccaatttggtggaactcttatgaaatactactgtaagaacccttgtgttaaaaaccgatttttaagcccccatcagcctacaaaaacaatgggatggtttaataagccataacacaccagatcccgccacaagggcaggggatcaaagtacgtgacatttcaagaaagttgattcaaaaggtcggctcagctactaaaagttgaaataataatccgaactcaagaaacccatgtatcataacgggtaatcaagcctgggaaccccggggaaccatctttggccacttggagggttgatttgagtaaaaatcacctcccaagtttcccctataaaactaaagct

SEQ ID NO: 3400 - DNA, 525 bp, Oryza sativa
  Clone ID: PAT_MRT4530_1037C.1
atgggcaggttgggggcggcggcgacctgcgcggcggtgctgctgctgccgccgaagtgggggaggcggcttggcactttactggagtactggctatggaggaagcggtctgagtatgtggagagtggctgcagcgtgcaggagggagcccctaagccggtggatatcgagcactcgctggggaacaaggagatcgtacgtctcctcaactccactgttgtcaaggatactggatacatgtggttgtcgtgccacacctgccgtcacgacctcgccaacactactcgtggcggcattgccgctgccgctgatacagtcataaccattgaggagaaacggggagaggagtggtgtaggaagaagttaggccatcacgcggccagcccaaaagggccatgctggcgatgccacatgacctgcctcattgtgacgttcattgccactgctggcaccggtgaccggggcatgatcgccatagtcgaggagaagagaaagatggtagagagagggtggtccaaagtgtaa

SEQ ID NO: 3401 - DNA, 480 bp, Oryza sativa
  unsure (1)..(480): unsure at all n locations
  Clone ID: PAT_MRT4530_10380C.1
ccggaattcccggcccgacccacgcgtccgcggtgattcgtgaaccccactcctttgggtggggctcagaatatctcactctggctggggcaagaggggaggcgccctgagtaccgggctcgggcgcccgctgctggcgcccctgtgcctctagcacctcggctaggggcttggccgcgggaggtcctgtttcgcctccctgcgccccctcgtggcgagcgcggcggaggctcgcctctctttcttcggcgcgcggctgctgtccgccgnggcggacggggcgggcgctctgccgcaggtgctgatgatgttccacctcgcgcgtcttcccggcgtggtgccgctcaacggcgccttcgacgcctagcggtgcggccacgctcgtgtggctgctctgcgccggcggcgtgctcttcgtccggctcgtggtcttgggccgcttctccgagcgcgccgccgcctcggtccttcggtccgtcc

SEQ ID NO: 3402 - DNA, 1507 bp, Oryza sativa
  Clone ID: PAT_MRT4530_10381C.1
cccacgcgtccgcccacgcgtccgcccacgcgtccgacgcatcccgcgcccatggccagcgccgccgccgccgcctccacgccgccgtgctgagcccacccccgagagacctagctcacgccgaggacgctaccactccggcgcgggcggcggcctcgggatcggggcggatcagatgctctccctcggcgccatccgcaagctctgcgccgcgttcgacgccatcgcgctcaccgtcatcgcggcggggctctcccggacctcgcaccacccgttctccgcgcacgcgcactactcccagccggacttccccaccatcgcctcctgccgcgccgccgtcgccagctccaagtggcggcgccgccacccctccaccaccaaggagtccgccggcgtcgagcctgccgagccccccgttctggtcaggatcaagaacgagagggacccggtgcggctgtacgagctgttcagggccaacgcgcacaaccgcctcttgattgagaaccggttcgcgttcgaggacgcggtggcgcgcctggcaggtgctcgacggaatgacctagtggaggagatactcgagcagcacaaggcgttgcctcaggggaggcgggaagggttcgtggtcaggatcataggtctgtacggcaaggcaaggatgccggaccacgcgctgagcacttttcgcgagatgggattgtatggatgcccgcgcacggccaagtcactcaatgccacgatgaaggtgctactgcgagcgcggctgtttgatgaggtccttcagttgttcgagagttcagagacatatggggttgagttggatgacatttcgtacaatacagtggtgaaaatgatgtgtgacttgggggaacttcgagcggcatttcgggttatgcaggaaatggagaaggcgggggtgagaccggatgtcatcacatacacaacactcatggatgcattctataagtgtggccagcgtgaggtcggggatggtctgtggaatctcatgaggttgagaggttgcatgccaacacttgccagttacaatgtgagaatccagttcttggttaacaggagaaggggctggcaagcgaatgatttggtgaggaaaatgtatgcatcaggcttaaggccagatgagatcacgtataatctagttattaagggtttcttcatgatgggcgagcatgagatggctaagacagtatttggtgcgatgcatgggaggggatgcaagccaaatgctaaggtttaccagacaatggtgcattacctctgtgagagaagggagtttgatttggcattcaggctgtgcaaagacagcatggagaaaaactggtttccaagtgttgatactattaaccaactgctaaaaggcctcatatcaatttcaaaggacaggaatgcaagagagataatgaaattggtaataggaagaaaaccttcctattcaaatgatgaagtgaaaaccttccaggacatattgtctcttgggaacaccagaagataa

SEQ ID NO: 3403 - DNA, 199 bp, Oryza sativa
  Clone ID: PAT_MRT4530_10382C.1
ggccaaacacaacttcagccagatctattcttggcatggcttcataacacaagagcctcctgatgccttaatttaaaactcaaatctaacaaccaagttttcttggacacagatgccaagaaacgcagtatatcgttaacgcgtgataggtagtacaagagggggcgccttgaagcggcgcttggttaagaaccacctt

SEQ ID NO: 3404 - DNA, 604 bp, Oryza sativa
  Clone ID: PAT_MRT4530_10383C.1
cttttatcgatctggaaactggaatatattatatatatagagagagagagagaggggcaaacaagaagaaaagaagaagaagatggtggtgatggtgaggcagcggcagcaaaggcagccggtgatggtggtggtgatggtgtgctgggcgctgctggcgacggcggcgcgcggaaactgccgcgacgagtgcctcgccgggtgccaaggttgggccatcatctgccacctctcctgcaacagcgcctgcctcggcgaagtcggcatctccgccatgagcaccgccacaccacagtccatcacggatcaggatcagcagcatccatcacagcagcagcaacaagcacaacaatcggtctccgtgctcaagggtctcgaccctgacaaaatctgaaacgaattgttttcttgctaccattcattttcaaatcccatatacatacactgcactacacacacacacacatggaataattcatgttttctcttcaaattccattgctctttctattaattattaatttacacagcacgttccacatagattagtattgtcaacatttttgccccaaccatgtacacctccccccaaaaaaaaaaaaca

SEQ ID NO: 3405 - DNA, 338 bp, Oryza sativa
  Clone ID: PAT_MRT4530_10384C.1
gcagcggaagaagacactgagaagtcgaaggaactctcacgaagtagcgcacgttgatgtagaggaagtagtaaatcgcactggctcgaccttctcctcctcgtgcgttctcctcgccgtactcccacgccgatcagcacctcaaaccagcggcgcctctaccggtatccacacgccatcaccaacatgtgtccgcattattaatttggtatctttcgaaaaccttgtcaaacgtagactcttttttatccattgagtcatatacgttgacggtgcaggcctctaggtcgaagagtaaaagcacccagtggaatctgcaatgtgcgtgggatgcatta

SEQ ID NO: 3406 - DNA, 425 bp, Oryza sativa
  unsure (1)..(425): unsure at all n locations
  Clone ID: PAT_MRT4530_10385C.1
ctcctataggggatgggaccctcaggcggcggatccccagcgcagggaagaaaaagaggaagaagatggcgcggagtgacgggncgcagtgcgggcgtacgacgggaggaccatcaagcgtctacgctccgtccgcgaaggttacgacgtcacctccggcgcggtttacgngccccggcgcgcctacccggtcttcgccggncgcgaggcagccgcgcgttcggcaagaggtccaggacggacgccgnacgtctccggcgacctctccggcctctccgacagggagctcggcgtcctcgccgactgggagacnncagtccaggccagttaccccgntcgtcgccccgctcaccgaatgaaaaaaaaaatcccccaaatcaaccttagattattggatcctcttgtgctctacagcttaattccat

SEQ ID NO: 3407 - DNA, 414 bp, Oryza sativa
  Clone ID: PAT_MRT4530_10386C.1
atggcgaagccaacagcagagggagctcagcagccatgcgagagctgggcttccactggtggtgcgctgctcgctggagtcctcaacagcggctggaacgacgaaagagcgaactcatcgaagaaatcgatggcagacacaacatcttgtctcgcttcaccaacacggcacgtagcagcggagcgggcaatccctgcatcgatgtggcccacggaggttgagcgagtactcaagcaacatcgacaaccacagtctcaggagacgtcgacgacaactgttcttcgttggcatcatgggcgacgacagctcaagttgcaggttgatgaccaggttaatattttcacgcaggagtcaggtcaattgaaacagccatccactatttgccactctcttagttcctatttggatggttag

SEQ ID NO: 3408 - DNA, 159 bp, Oryza sativa
  Clone ID: PAT_MRT4530_10387C.1
atgaagtcaggacaacagagacatcgtagtcttccatgttccgacgagatcaaggtggaggcatctccaccaagaatcgacgggcttctcgggaacaccccttgcaactgcgacgatcacttccaactttgccaccaacacagagaagagctagggtga

SEQ ID NO: 3409 - DNA, 1030 bp, Oryza sativa
  Clone ID: PAT_MRT4530_10388C.1
attcccggtcgacccccgatcgcttcttcttcttcttcttcgttgcattcatcttgctagctagcttagcaatggcggatcgcgaccgcgccgggcagtactaccagcagcagagagggcaggtgggggagacggtgaaggggatcctgccggagaaggcgccgtcggcgtcgcaggcgctgacggtggcgacgctgttcccgctgggtgggctgctgctcgtgctgtccgggctggcgctggcggcgtccgtggtggggctcgccgtcgccacgccggtgttcctgatcttcagcccggtgctcgtcccggccgcgctgctcatcgggctcgccgtcgccggcttcctcacctccggcgcgctgggcctcggcgggctgtcgtcgctcaccttcctcgccaacacggcgcgccaggcgttccagcgcacgcccgactacgtcgagcaggcgcggcgcaggatggccgaggccgccgcgcacgccggccacaagacggcgcaggccggccacgccatccagggcagggccgaccaggccggcaccggcgccggcgccggcggtggcgccggcaccaagacatcctcgtaagcacgcgccgcgcgcgcgagtggctcgcgtcgcgtacgggctgggtttagcctgctgggtttcgcttcgcttcgtagtagtctcgcccccgaccgaccgagtcaagagtgtgtcccgaacgtgaccgtgcctacgtgtcgtgtgatcctaaagtctaatgttgtaccagctgctgcgtactactgctactaggtaagatcgatgtagttttcgatttagagttgtgaatgataataagcgaggtcggggggagcaagcgatctggggagtttgtgcttgatttgagttgatgatgaacatatgtatgcattccgtgttcctctgtaagaaaagaattggtgaatgaacccatgtctctttgctcaaaaaaaaaaaaaaaaaaaaaaaacaaaaaagaaaaaggtaaaaaaaacgcaaaagggtgagtcgtattacagagg

SEQ ID NO: 3410 - DNA, 583 bp, Oryza sativa
  Clone ID: PAT_MRT4530_10389C.1
atccccgggctgcaggaattcggcacgaggattatgctctgcttattgcaccttgtgtaggtggcctggtgggtatggtgaccaagctgagtggatcctagagttgtcacggtgcagtatcctgataagagaagaaaaaaaatataaagatctccatttccagattcaggacaaaccacagaggttctttttatttcaagcagtgtccaagtctcactcagactcagggtcaacagggcttcagttcctaccggtgaagatcagacgacgctgagttggccagtttcgggcgtgattggaacggacaagatggactgctggagccttgcgattgaatattcatgtcaagatcagcactcgccgtcgaattgtatgtccagcaaagtttggctgattggctggtcccatgcaccaagaattcatcaaattaggtgcaactgataagatggctatttttaagtttctttcatatttttatggtgcctattaagtattaactgatactctgatttgttcattgtcaaatccatgttgaaattgtatcggcctatcgatgttcttgattattttatcagtactaatc

SEQ ID NO: 3411 - DNA, 195 bp, Oryza sativa
  Clone ID: PAT_MRT4530_1038C.1
atggtggagtgccaccaccagtacaccaacagcatgaaggagaagaggccgccaccgaggagaggtcagctcaagcggcagatcgcgaggaccttgagcaacctcatggtgccgggcggcggcaagcagatcgcagcaggttcagaggagggccaggctgcagcaaaagctcatggatgcttcaggcttagatga

SEQ ID NO: 3412 - DNA, 278 bp, Oryza sativa
  Clone ID: PAT_MRT4530_10390C.1
ctagccgcctcccgtctttttgtgcacaacggcgccgtcgtcctcgacctctgcactgccgctgcgcaacaagggcatgatgccgctgcgcgctgccgagcacggacgccaccggcgtgcgcctctaagcacggaatcgccaccgctgtcaagcgccgccgagaagggaatcgcgccgccgccgtcaagcgcagttgagaagggaatcgctgccgctgccaagcgcattcctgtggttgctgggcacagcaccatcgctgcacgggttggtgctgtag

SEQ ID NO: 3413 - DNA, 384 bp, Oryza sativa
  Clone ID: PAT_MRT4530_10391C.1
atgccgccggatccgaagccccccaacatcgccgccaccgccgccaccgctgctgcctcccctcccgccggatctggcggaggggagggcgccaccgctgccaccgtcgccccaaggatccgccgccaccgggccaccaccaggccaccaccgcctctcctcccaccgtcaggcctccagagttggcagagggagggcgctcccaccgtctgccaccgcctcctaccctcccgccatctgccgctgttgcacctccatgccatccgccgccaccacgcctcccctcccgcccctgccggatttggcggaggggagggcgccgccatacctcccgcctctgccgggccggtaccgccgtcgtcgccgggctgcggctccacatag

SEQ ID NO: 3414 - DNA, 903 bp, Oryza sativa
  Clone ID: PAT_MRT4530_10392C.1
cgaacagctggttcacagagtcaaaaacggttttgtttttttcttgtttgtttctgaggcaacatatttattcggcgccccgagtctttcggactgaaacgacgatacatggacatgggtaacaactaccaacacaattagtgggtaccaattataccaactatatagaaggtatagatacaagagctacagtacgcattgttctgttccactttgtttgcgtggggcgactggctgaacaattcagcatttcagccttatacacgaataattacagacaggtgcgaagaaacagagaacactgaaagcctgaagcctaagccgcttcatgatgccatatcaaggaatagacaccaggacctttgtactaagagtcggctttggcggggcactcgaggctggcgttgaagtggcgggcggggaacttggcggagacggagccgacctcgaagacgagctcgtcgccgtcggcgcggatcccggtgatggaccaccaccggaagaaggccctgacgcggatgccgctgaggccggagatgcggcggtcgtcgagccggcccgtgaggcggtcgctgaaggaggcgaggtagctccccgcggggagcacgatccggcagctggaggcgaggtccacggcgaagtcccccgacccggagtccagcgtgtacccgcgcacgttcgccggcagcaagcccagcgggaacccgcggtgccggagctcgtcgtacgcggtgacgtcgccgtcgccgccggcgtcggagcggacgaccgggagggccgccgacgcgaggaggaagagcgcggcggcggcggcgaggagcgccgcggtttgggcagtgggtgtcgccatcgctggctcgccgctgcttggttggggagttgggccgcgcccgcgcctcgtgc

SEQ ID NO: 3415 - DNA, 1907 bp, Oryza sativa
  Clone ID: PAT_MRT4530_10393C.1
gcacgaggcggtcccccggcctccaggccctccccaaaatcccaaaaaaaaaaaaacacgaggcgcaggcgaagcccacgtggacgaacaccctcctccccccgacgaccgccggccgccgccgttatcatgccccccggcggcgggggcgccgtcttcctcggagtcgacgtcggcaccggcagcgctcgcgcaggtctctttgatgagaagggtaagctgctggggtcggcgagcagtcctatacagatatggaaggagaaggactgcatcgagcaatcatcaacagacatatggcatgccgtgtgtgctgcggtaaaacacgcgtgctctctggcaaatgttgcgcctgagaatgttgtcggacttggcttcgccgctacttgctctcttgttgctgttgatgctgatggttcccctgtttctgtttcttggactggtgatgcgaggaggaacatcatcgtgtggatggaccatagggctgtagaccaagctgagcgaatcaatgctcgcaattcgccggtattgcaatactgtggtgggggtgtttccccagaaatgcaagccccaaagctcttatgggtaaaggaaaatctgcaagagtcgtggtcaatggtatgtaggtggatggacctcagtgattggttagcatatagagcgactggcgatgacacacgcagcttatgcacaactgtttgcaaatggacatatcttgggcatgcacacatggaacaatggaaggaatcagattcacgtgatatggaagcatgtggatgggatgaagtcttttgggaagaaataggcttgggagaccttgttgaaggaaatcatgcaaaaataggacgcagtgttgcatttgtgagttaggtttgcgtcctgggattcctgttggaacttcactaattgatgctcatgctggtggtgttggagtcatggaaagtgtgccagatgcagaatctaaagctgacacgtctgatgaatctgatgaacaagctatatgccaccgcatggtcttggtttgtgggacatctacatgccatatggctgtctcaaagaacaaactgtttatccctggtgtctgggggccattttggtctgcaatggttcctgagttttggctcacggaaggtggccaaagtgcaactggtgctctacttgattacattgttgaaaaccatgttgctgctcctcttcttgctaatcatgctgcttctcaaagaatatccatatatgagctactgaacaagatactattttctatggcacatgagcaaaatatttcttttatttcttccctgactcaagacatccatgtcctcccagattttcatggaaataggtctcctttggctgatccaaaatccaaaggaatcatatgtggcttcacacttgatacaagtgagaagcacttggcgcttctttatctagcaacaattcaaggcattgcttatggtactcgtcatattgtggagcattgcaatgctcatgggcacaagaagtttccaggtgttcgcgacgcaatgaaggcactgaatgcggccgggaaggttgtatatccatcttcagatcctagggtaaagaaataccatgatgcaaaatatcagatattcagatccctgtatgagcaacaactctcccatcgctcagctatggcacaggcattgcagtaggggcttatgaccagttgaccacttccagtgaccactgagctgcccattcatttatcttgtgaaaacaccgtattatgttgccatgttctcttgggtcattgacatctcatatgccgaattccatgttacgtgatcaaactgatgatacaatgtataaacagtagaaggcaataagatccttcagaaatgtgatgtggttagaaaagcccaataatgaaaattataagttcagggggg

SEQ ID NO: 3416 - DNA, 1482 bp, Oryza sativa
  Clone ID: PAT_MRT4530_10394C.1
atgaagctagtcatgggtggaaagattctgtggaaggacagggataataagcatattgatttgaacctgcgggagtggcatatcctgagagagataagttgtgttgggaaggctcatcagctagtgtcgttgaccagagacatctggcgtcttatacattccttgatgccaatgcgagatgctgcccgagctgcctgtgtgtctcgttcctttctaagtttgtggagatgccaccccaacctcaatttcagtagtgaagcatttgggttgaacaaaaatgcatgtggaaaggaagaattggctggacttttctacagcaaagtcgaccacattctcaaaaggcactcaggcatcggcgtgaaaaaacttaagattcagatatattcagattatagtgggaaaggctcttcatatctcaacaattggcttcagatttctgttaaaccagggattgaagaactcataatttcactgacccagttccaggcaaagtacaatttcccatgctctcttctgtcgaatgggagtggagactcaatccaatatcttcacctttctaactgttccttccacccaacagtcacacttagtggcttaagaagtctgatgagactgtatctttgttgtgtgcgtattacggagaacgagttaggctgccttctttcccattctcttgcattggagcagttggaaatcaggtactgcgataggatagtttgcctgaaggtaccttgcctactgcagcggctcatctccctgaaggtgtttgggtgtgacaagctgaaactgatagaaaatgaagctcctaatgtctccatttttgcatttcaaggggacaaaacggaactgaaacttggagaaactttgcaaataaagagcctatgcatggtccgctctggttatgtttatcatgctcgtgctgaacttccatccatcatgccaaatcttgaatctcttgccataaagtcatgcaaagagacggcctttgcaccgaagctgtgtagcaaattcctctgcctcaggcacttgagcattggccttattggatttttcccagcctatgactatttatccctggcttcttatatttatgctgcaccttctctggagacttttgacttgaatgtaatgcagcggaacgtgcagagtgtttcaatttttgcacatcctgcagatctgagatcaatacgagaagagaagcatcacaaccttaagagtgtgacggttacatcattcatctctgtaaagagcttggttgagctgacatgccatatccttgagagtacagcttcactcgagtgcttgacattggatgcttctcagactggttttaggtgtgatactccaggcagcaaaatcagcaaatgccccccactagatagggacattatcatggaaggtcacagaggggtcttggctatcagaagatacatccagcctaggattcttagatgggtcatggtttctaaagtttgctcttaa

SEQ ID NO: 3417 - DNA, 997 bp, Oryza sativa
  unsure (1)..(997): unsure at all n locations
  Clone ID: PAT_MRT4530_10395C.1
ctaaaattataactctgatatctatatctatcttgcctacaaattataactctcgttccccaattttgtgtgtgacgttgagaagtgccgaccggcgacgacgaaaggccggcggagagagatcccctcaccaccatggggatgctggatctgatgcgcctcatgtccatccagcgccagcgggaccaggagcgccgccgccgccaagcccaagctcccccccgtgatggattgattgctttacgggctaaaagaaagggctcaccctgccaacaagacggcgattctcagggtgctgctgacatagagataccaagccttccagaggacatctggcgtcttatacattccttgatgccaatgcgagatgctgcccgagctgcctgtgtgtctcgttcctttctaagtttgtggagatgccaccccaacctcaatttcagtagtgaagcatttgggttgaacaaaaatgcatgtggaaaggaagaattggctggacttttctacagcaaagtcgaccacattctcaaaaggcactcaggcatcggcgtgaaaaaacttaagattcagatatattcagattatagtgggaaaggctcttcatatctcaacaattggcttcagatttctgttaaaccagggattgaagaactcataatttcactgacccagttccaggcaaagtacaatttcccatgctctcttctgtcgaatgggagtggagactcaatccaatatcttcacctttctaactgttccttccacccaacagtcacacttagtggcttaagaagtctgatgagactgtatctttgttgtgtgcgtattacggagaacgagttaggctgccttctttcccattctcttgcattggagcagttggaaatcaggtactgcgataggatagtttgcctgaaggtaccttgcctactgcagcggctcatctccctgaaggtgntttnggtgtgacaagctgaaactgatagaaaatgaagctcct

SEQ ID NO: 3418 - DNA, 297 bp, Oryza sativa
  Clone ID: PAT_MRT4530_10396C.1
ggaaaaaggccctggaacgtgtcaaaattaaaatcctacttgctgacataatttcgatttacagttgcatggttcaggtgaacactacaaaactaaactgatgactgaacaaggggggtcacacggccagacaacatggtaaagaggggggatgtaggcacgatcgatcatgcgacgcagccgtagagggtgcggccttggcgctcgagcgcgtccacgacgtccatggtggaggctgtattgcggcggtcgatctcggtgtggtaactgatcactgatgacttcttcaaaagatct

SEQ ID NO: 3419 - DNA, 550 bp, Oryza sativa
  unsure (1)..(550): unsure at all n locations
  Clone ID: PAT_MRT4530_10397C.1
cggntagggccctataccaacccctctccccgcgcttgccgaattcataatcagagcttcaattcgcgctttttcaatatttattgaacatttatcagggttattgtctcatgaccggatacatatttgaaatggtatttagaaaaataanacaatagggggttcccgccccacaattttcccccgaaaaatgcccaccctgacgttctaagaaaaccatattatcagacattaccctataaataaggcgntatttacgaggcctttcacgccatttagattaagccccgggacggaataaccaatttcaccaccaggaaaccaagctatggaccattggccctatttaagtgaacacctatagaaccaagtttggtacaaaaaaccagctgggacccgtccgaattcccggaatattcgtcgacccaccgcggtcccgattctgccttagtgatcctgnaaacttttaggacccccataatggaattgtaaccnatattccacaataaagccattcctgcttcttggctcgcngaaaaaaaaaaaaaaa

SEQ ID NO: 3420 - DNA, 730 bp, Oryza sativa
  Clone ID: PAT_MRT4530_10398C.1
ctcctggttggtaatccctatagtcccggttttgtgcagccacgccgccctccaccgcctatcgccgcaccgccctccgcgccggccgccgccgcccggctgcctcccctcccggatccgccgtgcgaggccgcctgtgccgccgcctctcccattccttctcttcctcctgcagcctctccacctcctgtcctcctccagcctctcctcctccttctcctccacctcctcctcctcctccttcggtgtccgcggcgcccgggagggcccccgtgtatccgcgcccgggaaggcgcacgcgcgcgggcgcggccgtggcggatccggccaccgcagagccgcgggcggcggatccggccgccggagggccgcggggagcggatcggggcgcgggcggcggcgcgcggctgatccgggcaagggcggccgctctcggacgccggcggcagtgcgcggcggatccaggcgcgggcggcggctctcaggcgctggcagggaggctagatccgccgccgctagatcggtggcgcctggccggtggtcaccggggagctgcatgctagctgcagagaggaggcacgaccgcacgagaggatcctctcttcagttcatgcgtttggttctgatctgtttgcacgtgaaaccatttctgcagcggggctctgtgcagcggcggaggccggcggggctcggcagcggcctcgtcgaggcggaggcagtggaggcttga

SEQ ID NO: 3421 - DNA, 2012 bp, Oryza sativa
  Clone ID: PAT_MRT4530_10399C.1
atgaagctagtcatgggtggaaagattctgtggaaggacagggataataagcatattgatttgaacctgcgggagtggcatatcctgagagagataagttgtgttgggaaggctcatcagctagtgtcgttgaccagagttttgatagcgcgtttcagcctttcaggcgagggagactcaaaggtggacatagaagccgaatggctcagttctcttgcgtcgtgttgcgctgagagtggagatggaacgataggaggtaggatgttctgggaaaagggctcaccctgccaacaagacggcgattctcagggtgctgctgacatagagataccaagccttccagaggacatctggcgtcttatacattccttgatgccaatgcgggatgctgcccgagctgcctgtgtgtctcattcctttctaagttcctggagatgccaccccaacctcaatttcagtagtgaagcattggggttgagcaaaaatggcatatggaaacgaagaattggctgggacttttctacagcaaagtcaaccacattctcaaaaggcactcaggcatcggcgtgaaaaaactgacgattaaggtatattcagattatagtgggaagggctcttcatatctcaacaattggcttcagattgctgttaaaccagggattgaagaactcataattgcactgacccagttccaggcaaagtacaattttcccatgctctcttctgtcgaatgggagtggagactcaatccaatatcttcacctttctaactgttccttccacccaacagtcacacttagtggcttaagaagtctgacgagattgtatctttgtcgtgtgcgtattaccgagaacgagttaggctgccttctttcccattctcttgcattggagcagttggaaatcaggtactgcaataggatagtttgcctgaaggtaccttgcctactgcaacggctcatctccctgaaggtgtttgggtgtgacaagttgaaactgatagaaaatgaagctcctaatgtctccatgtttgcatttcaaggggacaaaacggaactgaaacttggagaaactttgcaaataaagagcctatgcatggtccgctctggttatgtttatcatgctcgtgctgaacttccatccatcatgccaaatcttgaatctcttgccctaaagtcatgcaaagagacggcctttgcaccgaagctgtgtagcaaattcctctgcctcaggcacttgagcattggccttattggatttttcccagcctatgactatttatccctggcttcttatatttatgctgcaccttctctggagacttttgacttgaatgtaatgcagcggaacgtgcagagtgtttcaatttttgcacatcctgcagatctgagatcaatacgagaagagaagcatcacaaccttaagagtgtgacggttacatcattcatctctgtaaagagcttggttgagctgacatgccatatccttgagagtacagcttcactcgagtgcttgacattggatgcttctcagactggttttaggtgtgatactccaggcagcaaaatcagcaaatgccccccactagatagggacattatcatggaaggtcacagaggggtcttggctatcagaagatacatccagcctagggtaccttccacagtgaagctgactgttttggagccctgcagctgccattccactgaactttagatgtcatgtttatcttagttattcgatgtttaatcgtgctgctgctgatgatgattctgtagattcttagatgggtcatggtttctaaagtttgctcttaatgattactactagttgatatcataaccaatgcacatgatatccactagtaactctagtttccacctagcagcagtgttgtatgcacattaaaaagttcttactagcagaagttctcgaacgtttgatttacctacttgtggccttgtgggttataaaaagctaaacattagagtttgtaacaaattttagtgtgt

SEQ ID NO: 3422 - DNA, 1097 bp, Oryza sativa
  Clone ID: PAT_MRT4530_1039C.1
ggccgcaaatttttttttttttttttggaaatctggcttctacattcacttggatgtatacacccaacagggattcaactgctggaacaagtatagagagcaaaggctaaagttgaggggtcaagctgtgattacaaaggtcaagtaattaaacttcggtatagttatacaaccacgactataccattaccaccagcatgtttttaacatgcttggttttatttatacccaccataagaaatttcaccaacacaaaccatggcatgcataaccagagcccccagacacgacgatacaccagtggcacaagcaaatttagaatcaccacaacaaactaaggtgattactacatacgagttgcacggtgaccaaatcacacgagaaacgagaagaaacacggtcagcttcattgcacgagtcaccaacgtgcaacggccgatcgacaagaacctgcatggcttccacgcactgtctctaccctggctcgcatgcaccgcggccatcagaacagcgcgagcttgatcagggcccccgctgccgcggcggcgacagcgctcgccgccgccggcgaagaggcggcagagtacgacgggtcaccgttgacgttcacggcgagcttcatgccgctgctgcagtggccggggatggtgcagatgaagtagtgcatgcccgggtaggagagcctgatggtggtcgatcccccgttgtcgttgctcagcgggctgttgccgttgcagctgtcgaagttggtctggctcacctccgtcaccgtgtgcgccctcgcctggtagttgaacacgagttcgtctccttgtctgaaaaacttgccgttggcccagttgttgtagttgacgccggtcgtccagccctcgccgtcgccgacggtgtacctcgtggctgcggccaccgcggcgcaactcacgacgagtagcccaacgagaacggctgaagagacggccatttgtccaatgatcagaaaaaggctcgggaagagttgggttaggcacttggagggagagggagataaggatgtcagatgaccaatctcagctatactgttgcggacgcgtgggcggacgcgtgggcggacgcgtggg

SEQ ID NO: 3423 - DNA, 983 bp, Oryza sativa
  Clone ID: PAT_MRT4530_103C.1
ggccgcttttttttttttttttttaggctaagacgatcgatttcatatactatgccagtaaacagaagtacgtaatgctgagataataatcattgtcattactcattagcattaccattacggccaagctactctaatgctaagaagctccaggtcgacagagtctgcaccgatcgacgccgacgaggcttgcttccggtgaagaacctgacgccgccgccgtcctcttctttttattcgttaattcatgctgccatgatctagcggccggtgtcatcgtcgtccatcccggggtacctcagccgcgggttgctggcaaagctgctcggagggaagtgatcgaacggcccggacgtcgggattgtcccacagagatcgttgttggatacatttaggatcatgaggtttgacagcccagccagctcgtttgggattggcccagttaaaaggttgtgatcaattctcatgaattttaaggacttgagtttcccaagcgacggaggtatcggcccagaaatggtgttgttgcacaagtctaggctaatcaaattctccagattaccaaactctggcggaattggtccttcaatattgttcgaagcgatttccataaattgtagctggtccagtcgcgcaagatcggccgacagatggccggacaggttcatctcctcaagatctaggcggatgacgcggttgtcggcgttgcaggtgacgcggaaccaggtgcaggggttcaccaggtcggggtcccagctcgccagcgcgccgtcggggtcgctcatccccttcctgaactccgtcagcgcgtcgccgtcctggctcgccgccgccgccgccaggaccaccgccaccaccacgacgaggatggcggtggcgggggctaggtttccggccgacgtgggcgccatggtttgcggcggcaactgcttcgctgcggtggtggtggagacgtggagtggagtgcgtgctctcccggccgg

SEQ ID NO: 3424 - DNA, 874 bp, Oryza sativa
  unsure (1)..(874): unsure at all n locations
  Clone ID: PAT_MRT4530_10400C.1
atgacgtccttggactggcagtcgctcctgcagacgtgcctgcaggtaccgcctccggtgctggagcagcagcaaccggcggcggcggcgcaggcggatcagtacagcggggagaacgatcacggcgatctgcaggcggccgagagcagcggggcaggtaacaaggagaagcaggtgatggcgaagggcggggcggggaggccgtcggggacgaagaagaaggcgagccggccgcggttcgcgttccagacgaggagcgacaacgacatcctggacgacggctaccgatggaggaagtacgggcagaaggccgtcaagaacagcaagcaccccaggagctactaccggtgcacgcaccacacgtgcaacgtgaagaagcaagtgcagcggctcgccaaggacacgagcatcgtggtgactacgtacgagggcgtgcacaaccacccctgcgagaagctcatggaggccctcacccccatcctcaagcagctccagttcctctcccagttctaattaacgacccatatcgatcggtctcggtcggtctcaaactctgaaatgatcgatctttcaagttactacacaaacacaataacacacattcacgtgtacatatatacctgcaacaaattaaactctctgtttagcttggggggaagaaaaggagaacaatgtggcctacctcccccgtctcccgtcaatacagtacaatatactgctagttgatcatgtatgtcgtcatactgtatatacgtactccctgtacgtgtatccttgtatattttncatatgtacgctaagcttacgcatatattgtatatgtgacacaaataatgcccccggaaagttaaaatatgtcgctgttatttatttc

SEQ ID NO: 3425 - DNA, 1518 bp, Oryza sativa
  Clone ID: PAT_MRT4530_10401C.1
atgtacacctctcccacactccttgctctctcgtttgctcttctactgctcatcctcctcttctactactcgtcctctttgctctattcacagctagcaacaagaaggaggcttacacatgcatgtgcacggtctctgccggacgcatatgaatcaggcatgaatagggggcacatcagcagctcggagctcatcgacgccaagctcgaggaacgccggatctccacggccaagcactgccccagctgcggcaacaagctcgactgcaaaccggattgggtggggctaccggcaggagtcaagttcgatccgacggaccaggagttgatcgagcacctcgaggccaaagtgagggaagaaggctcaagatctcatcctctcatcgatgagttcatacccacgatagaaggggaggacggcatatgctacacccaccctgagaaacttccaggtgtgacaagggacggcctgagcaagcacttcttccaccggccgtcgaaggcgtacacgacggggacgaggaagcggcggaagatccagacggagtgcgacgtgcagaagggggagacgaggtggcacaagaccggcaagacccggccggtgatggtgagcggccggcagaaggggtgcaagaagatactggtcctctacaccaacttcggcaagcaccgcaagccggagaagaccaactgggtgatgcaccagtaccacctcggcgacctcgaggaggagaaggaaggggagctcgtcgtctgcaagatcttctaccagacgcagcctcggcagtgcagctggtcctccgaccgcggcggcggcgccgccgccaccgcatccgccgtgacgacggcggcggtgcagcaggatcagcagcgcaggagggacagcggcagcggcagctgctcgtcgacgagggaccacgaggtgtcggcgacgtcctactcgacggccgggtacgccgtcgccgccgccgtcgagatgcagcatttgaagcatgccgccgaccatttcagcttcgcgcctttcaggaagagtttcgaggaggttggtataagtggtgatcaggtacactccaatcagcttgggaggtcggagcagcagcatgctggccaggaacaacagccgcaccggccgttgcttgcaaccacgacggcggtgcctgccacggccttcctgatcagccggccgacgaaccctgtatcaaatatagtgccaccagcaatgcagcatgcatctgtcgttcttgatcatgatcagttccacgtgccagcaatccttctccaccacgacaaatttcagcagcagcagcaacaaaagcttgacaggaggtctgccggcttggaggaactgataatgggctgcacgtcttcgagcacaaaaggagtagtatatacatgcacgttcaggaagcttcaattcctcactcccaagagacagaatggccttaccagccatactggactcctgacaaccaggatcatcatggatagtagcaacaaggctgcttttgatatgcattag

SEQ ID NO: 3426 - DNA, 220 bp, Oryza sativa
  unsure (1)..(220): unsure at all n locations
  Clone ID: PAT_MRT4530_10402C.1
gggaggaaaaggatccnggncctgtgttttcccaatttgatttcactatatcttcatggatacatattatagtttaccaaagtctcaggccggggaaacacacattatatactatgtaacatgtgccaaaagctctaaatacacatgcgcatatatatctatacgatgtgagacacacagatgcacaacaatttaacatgctcccagcagagcgctataa

SEQ ID NO: 3427 - DNA, 307 bp, Oryza sativa
  Clone ID: PAT_MRT4530_10403C.1
tactgttttgctatacttttttgtgctgttcagctgccgatgtaatagtcaggctaaaaaccctaccccttagctctagtttcagcactactaggaaaagcattatcgcaagcggccgaaaagggtcttcgcaggcggggcgatcgtccgcctgtaagccaacgactgtgaagatctccgatcttcgcaggcggggcggccgtccgcttgcgaagataattttcgcaggcggacgttggctagtccggtccgcctgcgaaaataggaatcgtccgcttgcaaaaaaaaaaacttccgcctgcgaaga

SEQ ID NO: 3428 - DNA, 1604 bp, Oryza sativa
  Clone ID: PAT_MRT4530_10404C.1
gatcgagctcacaaacaataaagatgataaaaatggccggaatagtggatacagcagcattctgcaccttgctgtgcctactcctcaccctcgtcgtcttcaagctcaagacggcgacctcttcccggcacaacgccggcgtgaacctccctccggggccatgggcgctgccggtcatcgggagtatccactgcctgctcggctccctgccgcaccacgccatgcgggagctctcccggcggtacggccccgtcatgctcctccgcctcggccatgtccggacgctggtgctgtcctccccggaggcggcgagggaggtgatgaagacccacgacgccgcgttcgccacccgggcggtcaccccgacggcgagcatcctcacctacggcgcccgcgacatcgtcttcgcgccgttcagcaagcacctccgggagctccgcaagctgtgcacgctggagctgctcagccccaggcgcgtccgctccttccgccatgtccgggacgaagaggcggcgaggctcgctcggtcggtggcagcggcggcgccggccgtcgtcaacgtcagcgagctggttaagatcatggcgaacaacatcatcatgacggcaatcatcggcgacacgtgcccgcagcgggatgagtatctcgaggctctagacaagaccatggatctcatgaatggattcaacctgatcgatctgttccccggatcgcggctggcgagggtgctcggtgcccgatccctgcgtgcaacgaagcgggtgcatcagaagctccatcaaatcacggatacgataatccaaggacatgaaatcatcaaggacggcagcgttggtgatgacaccatacaagaaacagtaggaacacacaatatgcatgggcatggccataagtgtgaggacatccttgacgtcctgctgcgatttcatagggacggtgggcttgggatcaccctcactaaagaaattgtcagcgccgtgttgtttgatcttccagctgcccgctcagagactacatctacaacaataatttgggccatgtccgaactcgtaaggactccccatgtgatggagcgagcacaatctgagattcgtcaagtccttcaaggtaaaaccgtggttagtgaagccgacatcgaaggccgactccattatctacaactggttataagagagactcttaggttgcatcctccggtaccatttctcataccgaggttatgctctgaagcaaatagtaagatcatgagatataatatacctcagggtgctatggtgttagtgaacatatcagcgattggcagagatgagaagatttggaaaaacgcaaatgagtttaggcccgaaagatttaaagatgatatggttgattttagtggtaccgactttagatttattcctggcggtgctggacgaagaatgtgcccaggtttaacgtttggactatccaatattgagatagctctcgcgagccttctttaccactttgattggaaattgcccaatgacgcaagctcatgtaagctagatatgagagaaacgcatggagtcacagcacgtcgtcgaactgagcttttactcaaagctactcctttgtacacataa

SEQ ID NO: 3429 - DNA, 815 bp, Oryza sativa
  Clone ID: PAT_MRT4530_10405C.1
gcaccatggttcacaacatagtagtggttcatatgcaccatggttcacaaaagacctcacataacagtgcctcacatgcaccaacaacaaaggtggttcacatacaccaacatggttcacatgcaccatggttcacaaaatacctcctataattgtgcctcacatgcacagcacacaatattagttgtgatacaggaggagctattcaagtaggcttcattttcttgggtgtgagcttctttgtacatgtcctctttgatggagccggctgtggagcttgattcagcaatattcaacctccttttacatgtcacttgtgaagcaagtgccggttgtgagcttgtccctccttgttccattaacattgcaagccggctcccaacaatctgtagccaggtggagtcatccatggagtcaaaccctaaccacacgttgagggagtggagggcgggaagagctgaccgaggggcagcggctgatgggggtggcggcggtggcggcggatgggggtggcggtggcggcggaggcggatgggggcgggggaggcggataggggcggcggcgctgactgggggaggacgaggtgagggagtggcaggggcgggggccggcgccggcgccggagatgaagccgatgcggaggcacgctgctgtcgcctctgccgatgccgctcccagcttctccatcagtcaacaccggtgctggacggctggagagatcgattcgaacgctcatctggtcctccccgacgcccgcaagccgattctcccgatctcctccccttgaggcacctcctctgcatccgtcctccat

SEQ ID NO: 3430 - DNA, 529 bp, Oryza sativa
  Clone ID: PAT_MRT4530_10406C.1
gtggatgcggtggtggcggcccccggtgtagacgcctccgcctccgccgccgtggtgccccgtgtgcgtgcaccgctgccggggggttcaccggctcgtgggtcgttaagctcctcctctcccgtggctacgccgggcacgcctccctccgggacccagattatcccaggaacgcgtttcgtgacgcacctggagagacgctgcgggacaacctgcacctgtttaatgcctggcgcgctcgactgcggctctgtgacagcggccttcgccggttgccagggggtcttccatccggccactgctgttccggaacacaatacggacgatccggagaaggacaggctggctcctgctgtgaaaggcaccataaatgtgcttgaggcttgctctgctgcgagcgtccagaaacttggcgtggcctgctccgtctgggctgatggctataacccgaacttgcctcgtgacacgctcataaatgagacttgctgctcagacaagcagtcatgcttgaatgatgagaactgggact

SEQ ID NO: 3431 - DNA, 576 bp, Oryza sativa
  Clone ID: PAT_MRT4530_10407C.1
tgcgatgcgatcgaggcttgacgacgagacttgggtagatgtagccgatggatggatggatggatgtatcatgtacaccgatcgaccggcgcgcaatcggcttaccagatgagcttctatggccagtactcctttacttatgctgatcttctctggcacgctaagggtcctgctaaatgcaagttcttcctctagtttgtttttcagcgacgccgctggacggcagatctcctccagaagcgtggcattgatagtcactcggtcggccccttatgcactcaagagcttgagacggcgaaccacatcctcctcgattgcgtgttcgctcggcatgtctggctccgtgtgttgtcgtctgctggttgggctgccctctctccctcccgtggtagctatctccaggtttggtggccttcgtccagggcatgcttacctgagcatcttcgtcacggcttcgattctctgatcctcttggtctcctggcaattgtggaaggaacggaactccagggtttttgactctgcgttatcgccgatctcggaggtccttcagtccatccgctcagagggccatctt

SEQ ID NO: 3432 - DNA, 1017 bp, Oryza sativa
  Clone ID: PAT_MRT4530_10408C.1
ggaaaactcaattcattccttaaggggatatccacttatttttgcatgtcacttaaaaagtcacaaaaaaatttagtaagatagatcaatatgtgaaagcagttaattggtagtcaactcgatggctatggtttgaatggaaagaagactcaaaaccttggattaacatgcaaacgccgtgtgatgaaactgatacaacgctctttagagcaggcacttctatttcaattggaaatggcaagaagatcaagttttggatggataactggctggaaggaagatcgcctaaggagtgctctattttttgactggcaaagggaaagtcaaattgcctaattaaagatggacttggagaataaccattggttaagtttgctgaatcaaattacttcgctggaagagattgaggaattgattcagttaggctctcgactacaagaggtagcacttgtaatctcgactacaagagatatcttgtggaaatgaacggaaaatggccaatattcagcaaagagtgcatacttagcgcaatttcagggttctatcacccatgcttctttcgatccaatatggacaatacaagctaaaccgaagcagagattttttggatggattttacttcatcaaaaggctctaactgcagagaatcttcttaaaagacgatggccttgtgattggatatgttgcctttattgcacaagcacttttgaagataattgccgtttagctaaggaatgccccttctcaatagcagtgtggggcaaaatctaccaatggcagggacatagtaacattccacaacaatagacaacgaattcccatgcggagtggtggaatatgttatgccaaatctcaccatcatctagaagaaagaagattcttggagacttgattattatatggtggaatatatggattgagcgtaatcgaaggatttttcaacagatttagaagactgaaaatcaggtggcttctttgactcaggaaaatataaaccaaataagcctctcgagaaga

SEQ ID NO: 3433 - DNA, 207 bp, Oryza sativa
  Clone ID: PAT_MRT4530_10409C.1
atggaagctgtggtgcgagagattgctacgtactggttcgggaaccagcgagcgagtagaattatctctcgaacaccaatggaagctgtggtgcgagagattgctacgtactggttcaagaaccagcgagcgagcagaattatctctcgaacaccaatggaggttgcggtgcgagagatttctacgcactggttcgaggaccagtga

SEQ ID NO: 3434 - DNA, 740 bp, Oryza sativa
  Clone ID: PAT_MRT4530_1040C.1
atggccatggccgcggccgcctccctcctgccggcgagcgccgccccaaccctccccggacgcgccttccgcccgccccgcaactccaccccgacggcctccctctcctgcgatggcggctcccgctgccgcggcgtcggcctcggcgtcatcctcggtgggtgtcgcgcgcaaggcgttcgacggaatgccgcagccgagacctacgtcccaggctccggcaagtacatcgccccggactacctcgtgaagaaggtgacggccaaggaactggaggagctggtgaggggggagaggaaggtgcccctcatcgtggatttctacgcgacgtggtgcggaccctgcgtcctcatggcccaggacatcgagatgcttgcagttgaatatgaaaacaatgccctgtttgtgaaggtggatactgatgatgaatatgaacttgcaagagatatgcaggtaagaggacttccaacactgtatttcttcagtccagatcaaagcaaagacgccctaaggactgagggactgattcctattgatatgatcagaaatatcattgataatgaattgtgatcgctaggatatagggacatagctgagattttgatgtttgaagtattttagccactagtagatgtgatagatttgagctttgtgatctttagtgggaaggttctgaatcttctagtacgcagagtctgcgtgtggaatgtagtatgctacatgtggggttcgtacctcag

SEQ ID NO: 3435 - DNA, 356 bp, Oryza sativa
  unsure (1)..(356): unsure at all n locations
  Clone ID: PAT_MRT4530_10410C.1
ttggattgggtgggggaacccgcggcacctcgcgttgtgggaccccgcctcggcggcggcggcggaccactgcagatgggaaggcgtgacctgctctaatgccaccaccggcggcggcggcggtgccggcgtggtgacggagctgtccctgcacgacatgaacctcaccgggacggtgcccacggcggtgtgcgacctcgcgagcctgacgcggctcgacctctccaacaaccagctcaccgacgcgttccccgccgcggcgctgtcccggtgcgcccgcacttcgtttcttgacctcgccaacaacgccctcgacggcgctctgcccaacacgtcgnagggttgtccccggcgat

SEQ ID NO: 3436 - DNA, 303 bp, Oryza sativa
  Clone ID: PAT_MRT4530_10411C.1
atggagagggaagggccgagtgggcgtccttatccactccactcacctcccagccacgagggcgctgcagtcggcatcgatctgctcggaggcggtgcgagccaccaaggccatggcgtgcaagcggcgtcggcggctttccgcggtggatccggcagtggcggaggcgttagcagctttccgttgcggatcctcgggtgtcagcgacttcccatggcagtggcgatgacggcggtggtggagaaggaggctggcccctcctcctatccattcagtgacggtggtggtagtggatgttcttga

SEQ ID NO: 3437 - DNA, 1395 bp, Oryza sativa
  Clone ID: PAT_MRT4530_10412C.1
atggagggcaacggcacattccccttcttctctcagttttcgtcggatccgggctcctccgctgccggcttcaacctctcctccgctgccgggttctatggatgctcttcatgtagtatgctagcaatgcttttcattcaggaaaacagcagagcaggctgcgcgggaacgatggagggagaggcagacattgatgagtgtgagcttcgagatgaacaacctgcgctacgagatcagtaccggtgctatgggatttgcaagaatacgatagggggatatgactgtcaatgcaaatttggaacgaaaggtgatgccaaaactggaacatgcacacagctgtttcccctccctgcaatggtggctacacttggcataatcggtctcacatccatagtggttgttgtagtattgtttaagcttttgtttgacgagaggagaaaaacaaaagagtttttcataaagaatggtggcccggtactagaaaaggtagacaacattaagattttcaaaaaagaagaacttaagccaataatacaatcatgtaatgttattgggaaaggtggatttggggaggtttacaaaggactcattgacgataaactcgttgcaattaagaaatccattaatgtagacaagttacaagagaagcaattcacaaatgaaattattatccagtcaaaagtcatccataagaacatcataaagctcataggttgctgtctagaggttgacgttccaatgctggtctatgagtttgttccacggggaagcctccacgacatactacatggcaataggaaagagtccctccccttacagaaacgtttgaatattgcagcaggagcagcagaaggattagcttatatgcattcaaaaacctctacaactattttgcatggtgatatcaaacctggcaatatacttttggacgaaaactttgatcccaaaatatctgactttggaatatcaagattgattgctatagataaaacccatactaaatgtgtgattggagatatgtgttatatggatccaatatatcttcaatcgggcttgttgacgaagcagagcgatgtatacagttttggagtggtgctcttagaacttcttacgagacaaaaggcaagttctggtgaagatactagactggttacgacgtttctagatgcatatacagaagatcataagggcgctatcgatctttttgacagagaaattttattggagggcgacacagaagtattcaacaatcttgccatcctagtagtggattgtctgaagttcgaagtggaaagaaggccagaaatgacagatgtagaagaacgacttcaaaccatgaagagatcttatgtgccaaaaagcatatctgatgctagtagcagtatagatacataa

SEQ ID NO: 3438 - DNA, 798 bp, Oryza sativa
  Clone ID: PAT_MRT4530_10413C.1
gtgaaaacctagctaagttacctgatggcatgacaaggatcaccaatctgaaacatttaagaaatgaccaatgtcgatctttaaaacaactacctaatggatttgggcgatggactaaacttgaaacattgtccttactcatgataggtgacaagcatagcagtatcacggagctgaaagatctaaacaatctaactggtgagctcaggattgaatgttggtcacacaagatggatctgacaactgctgccaaaagagcaaactggagaaataagaaaaaactaagcaagttgaccttgttgtgggaccattccttgttctgcggatgattttgaaaatgttgaaacatttcttgaagttcttgtgccacccgaaaatcttgaggtccttgaaatagatggttacatgggcactagatttcccagttggatgatgaagagcatggaatcatggctcccaaatcttgtctcattagatttaagcaacattcctaactgtagctgcctaccacccctcagacacatcccttatctccaatcgcttcatctccgatacatggccggtgtccatagcatgagctctgaaattcttgtgaaaagacagaaatgtgtgctgtaccagtcactgaaggaactccattttgaagacatgcctaacctagagacctggccaacttcagcagcgacagatgacagagctactcagccagaaagatccatgtttcctgttcttaaaactgtaaccgcaacaggatgcccaaagctcaggccgaaaccatgccttccagatgctataaca

SEQ ID NO: 3439 - DNA, 398 bp, Oryza sativa
  Clone ID: PAT_MRT4530_10414C.1
cggtcccaataaaagctcgtcaataagaataacatgtgttgtatgctgaaggagtgtgccagttcacctgctggagaaattggaaggcctgatgtttgaagactggggcaatgccaaaggttgaggatgctcggttgtcgttcgacgccgttgccagtgttcttgattgtgcggcatccagcacctgggctgtgccctgcaggcatgctgcatgcgtcgagatgcgtctgtggcggtgcgacgcttcgggagtggagcactggaagatggccattaggcactgcagctgatctgccttgccatggccacccagcagttgaagttgcgaacttgggatgaagaaaagatggtgaaggaggaggtgcaaatcatggctgaagagaagatgccaaacaata

SEQ ID NO: 3440 - DNA, 363 bp, Oryza sativa
  Clone ID: PAT_MRT4530_10415C.1
atggcgagacaccccgggctcctgctcatcctcctcgcagccgttgctgccgttgccaccaccagccgcgcgcagtgggtcggcgggtggaacgtgatcgaggacgttgccggcaacaatcagattcagcgggtcggcgcgtgggcggtggggaagcacaaccagctggggaccaatgacaggctgcagttcgtccgcgtggtcgcagccgaggagcaggtggtgcaggggtccaactatctggttgtcatcgatgctgctagctctcgcaaaaagacgagggagttgtacgtggccgttgtggctgacttggtcggggcgaccacctaccaactcagctccttcaagctggccaccaaatga

SEQ ID NO: 3441 - DNA, 1708 bp, Oryza sativa
  Clone ID: PAT_MRT4530_10416C.1
gttaaatccaccactgcagaccctcctcctgaccttctcaatccgaacgccgccagaggcgtcgcggctcgtcggcctttttcctgcgctatggctgttccacatcggcctccatcctggcaatcggcgacgtgctgaggaaagcgacgaggaatggcgcgacacggcgtcgaacgagaggagagctgccaggacgaggcacggcgcgcgtggccaggcaaagcgaggcagcaatattgtatcggagggattcgtgaagagtatggagcaggatttgaaaaggctggtggttgagaaatatggcgggcccaatcagccggagcagcggctgccaaccatctacagagtccctggtgagatgaaaaggagggacgaggagggtaacagctatagctacctcccagttgccgtccagatcggcttgctaagctatccaaggcagcagagccgcgaggaggactacagggtcctcgaactgtacaaatggcgctgcgtcggtagcctcatcgggaggcaccaccttctccaagagccaacccggacaccggagcttctgcgccggtgcctgagcgccatcaacggcttcctgccacgtatcctggcgtcctacaattttgacgcggaggcgctcgacgtcggccagagacatgtagtcctgggcatcatgctgctggacgggtgcttcatcctccgccgcctgctcaagttcgcgcgcattgccagtgaagaacaatcaggagctaaagcttcctcctctagttctcgttccggcaccggcgggcaagatgacgacgaggaccgggccgtgctgtttgggaggtgctgggtgtggtcgttcgtcacgtgcgacctgctgcttctggagaaccagatcccgttctgtgtcgtccagaagctgttccatcagctccggacggacgccgacgacaccagcgacgtcctcgtcgctggtgccctgcggctattcggctccctccgaccacgcaagctctactcctcgcccatctcctgccgcgatgtgcatgtgcaccacctcctgcacctcttctacctctccgtcggcttcccaccaccaccggacgccgccgcggcgccggacgacgaccctagcgagcacttggtgccgccgtctgagctcccgcagtggataccatgcgccagggagctggaggaggccggcgtcacgttccggcccaggaaggatgcgacgagcttcctcgacgtcaggttcgccggccacggcggcgtcctggagatcccggagctgcagctgtacgactacagcgagccgctcttccgcaacctcatcgccttcgagcagacctacccctacacgcgcggccacgtcaccgcctacgccgtcttcatggactgcctcgtcacctcgccggaggacatgaggctgctgcacctcagcggcgtgctggtgaaccacatgaaccgcgaccgggaccccacggggttcttcagccggctctgcagcgaggcccacctggctgccgaccgtaactacctcgccggcgtgatcggtgaggtgaatcggtaccggcggtccaggtggccgcggtggcgcgccgccctggtgcgcaactacttcagcaacccatgggtggccacgtcccttgccgcagcagtgatcctgctcgcactcaccatgatgcagagcttctttgcggcttatgcatacttcaagccacctaagcagtaa

SEQ ID NO: 3442 - DNA, 519 bp, Oryza sativa
  Clone ID: PAT_MRT4530_10417C.1
gttcgcagcacgcgggcagcgctcatactgccactgctcggagcggtcgccgcctgctcaaccggcacctgggccgaactgacccgcgtaaccgcacgcttcaacgatgaatgggtgtgggcaggcttgctggtcgtgctgaacctgctggtgctggcccatgctgcgctgaccctgagtgcgcgggaaggttggcgcgaacgggcattcaactggctggagcaacgcgcaggctggctggtggcaatcgccggcttcgccggcgcggtgatgatgctcgcactggtgtttgacccgcgctatcgcagcttcccgagtgcggcactggtgttgccggccctggtgtatctggttcgcccggccaccgggccacgccgggagatcgcgctgctggccttcattatcggtgccggcattgcgccgcagctttatcgcgagggctgctgaaccagcaggcgtggggttgggcgggggcagcgtgatgatggctggagcgttgggcgttgcctgccggtgcgt

SEQ ID NO: 3443 - DNA, 571 bp, Oryza sativa
  unsure (1)..(571): unsure at all n locations
  Clone ID: PAT_MRT4530_10418C.1
ctctcctgccctggccggtggcccagccgctgctccgccgcctcgcgctgcgcggcgccgccgacctcctcccgtccttcgtcggcgtcgcgcgggagccaggtgatggcggcgcccgcgccgccgagtggaagggcgcctgcttctacgataaccgggcgtggatggagttccacaacgggactgatgggggccttggaggtggtacgctccatctcgagacaaacaaagctcatagctggacttgcatagacctttatgtgtttgcaacaccatatcgtgttacatgggattactactttgtaggtcgtgagcatacccttgatttcaaagaatgggaaagcgaggctgaatatgaatatgtaaaacgcaaaggagtatccatattcctgatgccatctggaacaattggaacacttagagcactttgggatgttttccccctgtttacaaatactcaatggggtgagaattcaaatcttgcatttctaaagaagcatatgggtgcaaccttcgaggacgtccgaaaccctgggtgcagacntaatgttgacgattccactctgagaat

SEQ ID NO: 3444 - DNA, 692 bp, Oryza sativa
  unsure (1)..(692): unsure at all n locations
  Clone ID: PAT_MRT4530_10419C.1
gccgcttcgcatggggggcaagtgtcaaatcgcggcctgcgcgcgaacgtgacagccgataactactcgtcgtctccactcgccatctcccctctttgtgtaaagccaagaaaccctcctgtacagtcgctttgcacgccatgcatgcctcctctgtcaccggtcaccaccaccccccctcacttgctgccggtagcaagcacgttggcttatttacccccctctccctctgcaagttgctttgcttattctttctcgtcttcgacctgcagataaaacctcaaccgatgtatatatccgcaggtcacatctgcaaaaaccagagacgtctgactttgcatcgagcacaccggagaagagaagagaacatgcatgcatgattacaatagtacattattcagtgctactagtagtagcagcaggcagcagtaacagtaacggnggtggtagtagtactagtggcatacaataatcagcccacaatatacggctcaagcaaacagctccacatggnaagtcggcaggcagcacgctcgctagctccatggccaacaccacaccgagctcactccgctttactactctcaatcccaaaatatagcaacctaaaaacggattatacattttctcatagtactcgaaggaggttctatccacctgtccagattcatagtactagaaaatatcacatc

SEQ ID NO: 3445 - DNA, 217 bp, Oryza sativa
  Clone ID: PAT_MRT4530_1041C.1
cccacgcgtccgcccacgcgtccgcctatgcttacgcgttgatgaaagaggacccgaagcctgatctatagatgaagatgcctactgcatactgttacctcaggttgtagcaagtgttctcagacaatagaacaggttggtgattaatggactgcacaatagaacacatacagtgtacataaccctgtatgagtctgcccactgtatagtgattgaa

SEQ ID NO: 3446 - DNA, 660 bp, Oryza sativa
  Clone ID: PAT_MRT4530_10420C.1
atggggttgctccgctgccgaaagagctgctgcctccactggatgaactacctcagccccgacctcaagtgcagcaacttcaccgacgacgacgacgagctcaccatcaacctccacgcccttctcggcaacaagtggaacacgcacatcaagcgcaagctcatgagccagggcatcgatccgcagacgcatcagccggtaacaaacacctttggcaatgtggtgttcgcaggattggcctatctcacttcctatctcaaagcgaagaagcacaattcctgcatattctctaaaaacatcctgttagaagctcttcttgctagtttattctgcttgactgcttcaaaaatgccaaaaggggtaggagctctaactattgcattgaaggagggagctgtttttgctgcttgtgcaggacaaattctccaggctttccctttttggtggaaatggaattcaatgtgtcacaggaaggctgaaattgtaaggtcaatacttgctatcattgttgttatttatcagcctatccagtcaagcaaccgtgcacttgctgacctcccgagccttcttcagaaatctccttcaccatctgtagcgtttgttaattttttcctggctaaaaaggttgtgaagcacacctcccaacatgacatcaactag

SEQ ID NO: 3447 - DNA, 502 bp, Oryza sativa
  Clone ID: PAT_MRT4530_10421C.1
agatcggcacgaggccgactaactgtcccggtggtcgccggtggacgcgtccgatctccgatggcctccgccgccgccgcggggatcccccggcgacgcgcggccccggtgcactgcactccaaaacctacctcttactctgctagtcagtgacctcgctctcctccactgcgttcccctcctcccccctccgccgctgcgttctcccctcacgaggccacctgacggccggagacgggcgcggtggtgtcccccctccctgcgccggagtcgacgacgacgccgcctctgcggctgcctttgccacctggaaaatgtttccaagatagaatgtgcatgcatcttcagattcatcacgatggataagaatgtttggtgaggtgcacaagtcagattattggttgtctagtaaagccctataggaaacaagttcgtctggcaacctgcaagaatcccaattcaaaacaaactcccattaatcaatcaacatcgctccatcaat

SEQ ID NO: 3448 - DNA, 1414 bp, Oryza sativa
  Clone ID: PAT_MRT4530_10422C.1
ccgcatcgcttcctccgccgccaccaccgtgaccaccaccaccacctcctcctcctcctccaattcccaaaaccctaaccccttcaacctcccgccatggctccgcagcctccgctgccccttcaccttcctctgcccgcccccaccgcccccgccgccccctcctcctccgccgccgccgccgcctcccccgctggaggtggtgtcgccgtccccgcggtggaggcggccggggctgagggtgaccacggagtacgacagcgaggaggccatgttcgcgcacaaggtgtcgtgcaaggtcgcgggcgggctcgccaagctgcggctgtcgttccagagcgacccgtcggggcaggggttgggggaggagggcgacccgcggcggcagctattcgtcgcgcccgtggtcgggctcatcgccgagaatttctccgtgctgtacgacgtcgaggcccgcaacgcgctgctcagcgggcagggctccctccccggcggcgccatccagctccgcggctcacacgatgtcaaggagcgacaaggagaagtctcagtgatcactaggctgggtgatccgtcttataaacttgagctatcatccttggtgccttacaatggtctgccgagagcaaccctccactttcctattggtcaagtgtcagttgaagagaggagaaacgaagcggatgagaaaatgttatccctttatggaattgcaaaatctaatttcttggatggcattcttactgcccagtacagtgaaaacgatattaatctgagatattgttataaggacaatgaactaactttaattcccagcgtgtccctgccttccaatgctgtatccttaggcttcaaaaggcggtttggtccttctgataagttgagctatcgttatgactttaccactgatgactggaatgctgtttataagcgcacagttggtaaagatttcaaagtgaaagctggttatgattctgaggtgcgagttggatgggcttcagtttgggtgggtcaagaagacggcaaggcaaagaccgcaccaatgaagacgaaacttcagctcatgcttcaagttcctcaggacaatttccgcaatcccaccttcctgttccgtgtgaagaaaagatgggatctgtagcatatgctacattatatactccatttgtatggggataccagtattgggtactcgggatttggccaacattttgttgtaagctgcgtaggatggcttgaaaaaaaaaatccatgaagcctttccaattctcatcatgtaattctgcctgctgtacataacggccatcgttcgttccgcacataagcaatttgatttccatgtaagattgttcacccctttactcgaagttctgggctaacttttccggagtgctatcggatcttcactccgattccg

SEQ ID NO: 3449 - DNA, 662 bp, Oryza sativa
  Clone ID: PAT_MRT4530_10423C.1
tttttttttttttttttttttttaccaacatatgcctttgcattgcccaaatgacctggtatattacagcatttatgttccagcattgttcaattcttttgccttgtgcgcgatgcaatatcaacctataacctttacacataccagaggatttacttccatgaagctggaatctaaagactgtaaacataactcgaatggatcataactatcctgcagctgtaccttgtagcatgaagtagagatttagcttagaacacagggcaaacgcttgttggacccaagtcaaccccttttgcagtgggacatgtggccagtgggcagtgttctcctgccgtgccccaccagtcgatgctccggttctccagggatagtgagaagtacagcagcaccgccatgaaagccacgccagcgtcgagtgcggcagagagaatgtagttgtacctctcccaccacttcttccggtaccggaacacgaagaaattgaagatggtaccaaagagcagccaagagttgtaattcacagccgtcgccggtgggcattgaaggctgtcgcgccgatgagcactggtaagttagtcagtggttattccatttcttgtttgggaacatcttgtgggtagatgtacacggtcacagggcctgctgcgccctcgtgccgt

SEQ ID NO: 3450 - DNA, 458 bp, Oryza sativa
  Clone ID: PAT_MRT4530_10424C.1
aagctttggtcagtgacatttggggataaaatcggacagtgataggtgataagaggaatgcatttctagtttggttctagcttcccaatgttgagggatagcattggcacctaatttcaattcaagggagagagaatgctttttaactgttcagtagatattgcttgtttcatcgtgttgatgagaacaatcatattaaattagggcagactgtacaatgcattgtaagtaagatgcaatataattctgcactgtcttctcttctctgctttaatgcttgataagaacatattataattcaggagatgataggtttgcatagtattttgattacatactgaagacaaatgttatagttggatgtaaaccattggtggttattatattaataccgcttggaatatggataaaaaaaccaaagcataaaggggaaattggaaaataaaaaaaaaaagctt

SEQ ID NO: 3451 - DNA, 267 bp, Oryza sativa
  Clone ID: PAT_MRT4530_10425C.1
atggcaaatctacaagttggagtcaccagaaaaatcagtgatccaaacaccaaagctgttgccactgaccggacaatccgcaacctggtatgtcatgaggaccttcgactaacctgccgaaaccacctaagccatcaaaaatatcggtcaagtcttttgggcgaaacccccgggcgaagccgtagggcgaagaccaaggggttcgtcactaagaatcgggcaaagcctggcgatgaagatcaatgggttcgccaccaagcttggtga

SEQ ID NO: 3452 - DNA, 189 bp, Oryza sativa
  Clone ID: PAT_MRT4530_10426C.1
atggctcatcttcatcgcctccaccacggctcatctccgtctctaccacgagcgccaggaaaatgccgttgggaggagaaaagatgccccgccgccaccgtcattgtgaccacacggaaactagcagtctacttaggcagggggcaggacttgggcaaagcaaggcgcgaagcgttagcggccgcctga

SEQ ID NO: 3453 - DNA, 175 bp, Oryza sativa
  Clone ID: PAT_MRT4530_10427C.1
gtgttttttgttggttgtttaagacgtgaaaattcaagaactttaactatgagcaagacggcaatgattagggcacacaaagggcgaggctgctgagaaaatcaagcacaaaagctgaactgaccggcccacctgtaagcccatgactggccgaggccggggactcctgggaaaa

SEQ ID NO: 3454 - DNA, 407 bp, Oryza sativa
  Clone ID: PAT_MRT4530_10428C.1
cgtcccgcgttgatggtagtggtggacctcgacggcggaggaccgtcaccgacgctggacgtgagagccgcagccgccgccgtcgtcgtcgtcgtcatacctgcgtctagcccgacgtccgacggagatgtaggagctgaggcctgcgtttttctgttggttggcagcacgccgatgtgcacaggattctgatttctaagctacctctgcctagcctcttgtagtaaagctaaagagaagtgttggtattcaactccaattgctaggagttaacaggaagaagcagagtttgatctgattcgggattgactgcttcggcccggttcctcgacggtaagtagtagtcagaaacccgatgtacgtcgtcccatgctactgctccgggctccagcatccacaccgatgta

SEQ ID NO: 3455 - DNA, 396 bp, Oryza sativa
  Clone ID: PAT_MRT4530_10429C.1
atgggccggccggccaggccacgctcgcctcctccgccgcaccctaccgccgctcgtctcctccgccgcaccccgccgccgctgtcgccgctcgcctccaccgccgccgccgctccctatcgcccgcctgcctccgtgcgctgccggatcgagcggcgatggtggcggatcgaggaggaggcggttgatcgagcggcggcagtggcggatcgagcggtagcggtgacggatcgaggcggcggccgggatcgaagcagcggccatggatcgacgcggcgacggctgggaccgatgcactatatcctgtcattctccgatgcgccgatcttcttctccccaccgactggcctcgagctcgtcggatctgcacggcggcgacgatctcaacctcgactg

SEQ ID NO: 3456 - DNA, 147 bp, Oryza sativa
  Clone ID: PAT_MRT4530_1042C.1
atggagagcttgacggcgattgacaaccagaccatccctttgctgttcgatcccaacgtcggggaggctaaaattgtcatgagcaaaggattcatgagaagaaaacaggagcagacctttactttgcttgacaacaacagcacctag

SEQ ID NO: 3457 - DNA, 1320 bp, Oryza sativa
  Clone ID: PAT_MRT4530_10430C.1
atgggacccacttgggccggggtcccaagccagggatgggaagaaaatggcattatgttcaggatgatgcgatgctctgaccattttacactgttcttctcagagtacgagatgtgcggcagggctcgctgcacccttagcccgtcccaggccgctagggctttcggcttcccgaccacgacctctgtcgcgggcggtgggactgggggcggctgcggaggaggtgacgcacccgctgtgccgttgctccggatggaccggtatcggccatcatacaatgtgtcgccagggacatacctgccggtgggcaccgttcgggcgcggccggcggggtatgatggtggaggggacatggacggggaggtgtcggtaatccagtgcatgaagtgggggcttgtgcccagcttcaccggcaagaacgagaagcccgatcatttcaggatgttcaatgcacggtcagagtctataaaggaaaaggcttcctttcggcgacttatcccaaataataggtgtcttgtggcagtagaaggggggaacaccatgctctggcatgatagatggctgccaggaagaacaatagctgaactggcccccaatctttttgaattaatcactcaaaggtcaagttgtttaccccggatggctagtccttcctttttcgtttgtggttatgcatcacctttaagtgatgagtatgtgagtttctacgaatggaaaaaggatgggccaaagaagatgccgtattacattcatttccaagatcagaggcctcttgtctttgctgccctctttgacacttggacaaactcggaagatagaatgccagtaatcttgggtgacaaagactccattagtacttggttgaacggtgcatctgtgaaactcgaagaaattacagtaccctatgaaggagcagatcttccttacaaatcgatcgggtggctatgccgtaagttgatgtatgggtattttgctatacctcatcaaccaaagattgaaataggcgtttcagaccagcactattggaagttctcaaagtcaggggtttacacttccaaatccgcacatgggaccttctttatcccagacggtcaggcagtaaaagggttgcgaatgagcgagaagaaagggcttaactctcttattatcttggtcacgtgggcaatctggaaacacagaaatgcttgtgtttccaatggtgttactcctagcatggcggatgtgattctgtccatcactaatgagggcacactatggtgtatggcgggagcttctaggctccaagagctgttagccaaggcaatagctcttgtgccctag

SEQ ID NO: 3458 - DNA, 635 bp, Oryza sativa
  Clone ID: PAT_MRT4530_10431C.1
agcttcaccggcaagaaggagaagcccgatcatttcaggatgttcaatgcacggtcagagtctataaaggaaaaggcttcctttcggcgacttatcccaaataataggtgtcttgtggcagtagaaggtttctacgaatggaaaaaggatgggccaaagaagatgccgtattacattcatttccaagatcagaggcctcttgtctttgctgccctctttgacacttggacaaactcggaaggagaaaccatccatacttttactattttgaccactcgggcctcgatttctctaaaatggcttcatgatagaatgccagtaatcttgggtgacaaagactccattagtacttggttgaacggtgcatctgtgaaactcgaagaaattacagtaccctatgaaggagcagatcttgtttggtatcccgtcacagctgcaataggcaaaatatcttttgatggtcctgagtgcatcaaacaggtacagatgagacccagtgaaaagccaatctcgacattcttcatgaagaaaccagtgaaatcagagaagaaagatcaggatcacgcagaaacaaaagcctttcgagctgcaaacaaagaatggcatgaatcagcagaaaaccaattggataaaac

SEQ ID NO: 3459 - DNA, 497 bp, Oryza sativa
  Clone ID: PAT_MRT4530_10432C.1
gctcgctattccctccatcctctctcgcactcaccccgacgccgccgcctccctcctctctctctctcactacctgcgcgctcgctccaccccgcgccctaatctccgtcacgcccttcgcaagcaccaccattgccgtcgccgccgccgccgccgcccgtcgtggcctcccctccgtgcgcccggttgctccttcacatcctgatgagagaaaagagggatgggaagaaaatggcattatgttcaggatgatgcgatgctctgaccattttacactgttcttctcaggtttgcccaggagtacgagatgtgcggcagggctcgctgcacccttagcccgtcccaggccgctagggctttcggctttccccggaccacgactctgtcgcgggcggtgggactgggggcggctgcggaggaagtgacgcaaccgctgtgccgttgctccggatggactggtatcggccatcatacaatgtgtcgccagggacatacct

SEQ ID NO: 3460 - DNA, 332 bp, Oryza sativa
  Clone ID: PAT_MRT4530_10433C.1
ctcaagaacagatacagattcagactggtgtttctgctagactgctactgcaagtgttggtagctagatcctctctctgcttgtcgttgttgttgtagaagaagaagctgatgtcgacggtgactcgtgcctacctcgaccagaagctcgccctcgcaaaacgctgctccagagaggcgacgctcgccggagccaaggcggcggcggtggcgacggtggcatccgccgtcccgacgctggcgagcgtgaggatgctgccgtgggcgaaggccaacatcaacccgacgggacaggcgctgatcatctgcacggcggccgggatggaatacttt

SEQ ID NO: 3461 - DNA, 180 bp, Oryza sativa
  Clone ID: PAT_MRT4530_10434C.1
gaggtgaaccgcctcaacttcgtccaaacaccccaaaacgacatgaggacccaccaggcagtgacccatatgaaaggtgctgtcagggggcttagccagggtttggccgaaccaggggtgttagcgccgtcaacgccggagagcttgttcagggacatgcgaggctcgtccgtggcgtag

SEQ ID NO: 3462 - DNA, 818 bp, Oryza sativa
  Clone ID: PAT_MRT4530_10435C.1
atgtcatcatcgtcgccacagatcgcaccttgtttgggcggcagtggcatcctgggtacgcctgccgtgacgggccaatcgccggcattggtgacaggaccacaggatacgggcagcgctaccagcgttcctcgtttctacaaattggagttccccaagtatgatgacaaggacgatccgctcaacaggttcaaccactgtgagcaattcttctgtggccagaagacgcatgacagtgatcgtgttgggttggcaacgtaccaccttggcgacaacgcacaggaatggtactttcactatgaaattcacaaggggcctccgacgtgggatgagttcaaagacctctgccatggccaattcggtccaccgatccactgcaactcgctcggtgaactgaagcggctgatgcagacatccacggtggctgcctaccagaccatgttcttgacgctcgcatgctaaatgtctgaagccctctccgaccagcagtaaatctagctattcacggcgggtttacatgatgaactggcgatcgatgtcgagctcgaccagcctgatgagttatcctcggcgtcgcctccccctcctcccctaccgcgccggtcgtcctcgccaacgtctcctccggtcggccgttcctctccgtcggctcgtcgtcccatggcgccgcctcctcggccctcccttcgtcaagccgtgctcgttcgtcgcccgcgtttcgtcaagagtgcgtcgcagccctgtcgccgtcttcgtccttggctccgcgtcgtcaagcgttgcgccggctgcgtctcgccttcgtccaaggatcgccg

SEQ ID NO: 3463 - DNA, 516 bp, Oryza sativa
  Clone ID: PAT_MRT4530_10436C.1
atggcatatgggtcagtgggtggcaccacagtttcaggctctcaaacccgttggtcccgtaaaagcgtactccagtgctaccatctgaatgagtggagtgtgaagcgggcgcagaagaagaagctgatgtcgacggtgactcgtgcctacctcgaccagaagctcgccctcgcaaaacgctgctccagagtgtatcttggttctcatacattggtggttgaaattgttgcagaggcgacgctcgccggagccaaggcggcggcggtggcgacggtggcatccgccgtcccgacgctggcgagcgtgaggatgctgccgtgggcgaaggccaacatcaacccgacgggacaggcgctgatcatctgcacggcggccgggatggcatacttcgtcgccgccgacaagaagatcctctcgctggcgaggaggcactccttcgagaacgcacctgaacacctcaagaacacctccttccagggcaccggccaccctcaccctgccttcttcaggccatga

SEQ ID NO: 3464 - DNA, 418 bp, Oryza sativa
  unsure (1)..(418): unsure at all n locations
  Clone ID: PAT_MRT4530_10437C.1
ggcacaacaacatctggcaacatcgagagactcctcgtaggaangccacggagtgtgaatatcagttgccatggaagatgctcctctctcgtcgatggggccaaatggactcttcttgttggcctctacaaccagatgcggcatcttcgccgccttacgtnaggctaggacatttnccgaggaggggggatcgacggttgtntacttgagctcgagcttctnttcgccggagctcacgaagaggagcaaggtggcggcggtagaaccagctcacgtctggggtcagattcacgtgatcccttggctaggtggcccctagtcccgcgtgcgaaggagggacatcgtgctgaagacgagggtngagcatatgcatgctgccatcttcancaagccagtatcaccgaatcgtttggtcttt

SEQ ID NO: 3465 - DNA, 499 bp, Oryza sativa
  Clone ID: PAT_MRT4530_10438C.1
aactagtggatccccgggctgcaggatcggcacgaggcttgcatgatctcgttcgttgctgctaagattctgtctggcttgtcttcgtaacgttgtcacgttgctatactgaagaattcggtgatatctttggacgttccatcgtgtagtactaaacagttggcaaattgatcaataggaactgacgagtactagacttgatgcagatagcctgatgccgacccttcctttttgtgatcctgcaattttcttggtttctgctttggcgaggccagtagtaattatgcacagatctatgaattagcagagatttgctaattttggtatggatgagaaaaaggttaatctctgttggatggccaactttgcatgtcatgggcttgggagaagtggacagtactactgggaattagataagcatatctttggttgttaattaaattttgattggaggttacaggcatgtgtactactacacaataaaaaaaatatctgggtt

SEQ ID NO: 3466 - DNA, 423 bp, Oryza sativa
  Clone ID: PAT_MRT4530_10439C.1
atggatggaatgaggtgcaccgcaactggccgaggttctaggactagctccgtggtgatggcggagccgatggagccatcggaaggggaggagggagggatagaagaggggaggagagtgaggggagagaagaggaagaagatgaggtcccttggcggttttgagggcgcgacggagaggcagtggcgcacggcggccggcgggagaggagggagcggcacggcggcggaggcatggctccggcggctccatggcggaggacgccccagcaacgtcgctgccgccgccgccgaggggagccagcacgcgtcggctgtcgcggagggaggctccgccgccgctcccgcggcactagccaccaaggccgcggaggcgctgctcccgtcgctcagcatctggccgctgtcgcagacattgatttga

SEQ ID NO: 3467 - DNA, 228 bp, Oryza sativa
  Clone ID: PAT_MRT4530_1043C.1
ccctgtttgtgagagagagagagagagagagggggctgagccttgctcaggctagaggtgtatacccaaaccccagctagggctcgcgcgcggtcgctgtggtgatgagaaacccagcgaggtagcggttgatgcgggacttcaagcttgaatgtagtatgtacaccccgtggcgaatcagtggctcgcctataactacatcaacatttcgctatggaacgccgttat

SEQ ID NO: 3468 - DNA, 255 bp, Oryza sativa
  Clone ID: PAT_MRT4530_10440C.1
atgggtcatcgtcatcgccatttttctttcgttcccgactcaccgcagcacgccatagcctctgctctgatttcgccccgtttcttgcagccgatccccaggaacaccgacctcgccacgggagctctggagcgtggccacaccgtcgtcaaagcgcagccgtgggatcatgtcgccattccccgaggagggagatcgaccaccgccttctccgactccgacctagcccccccgtcgtcgattcctgttcaagcg

SEQ ID NO: 3469 - DNA, 942 bp, Oryza sativa
  Clone ID: PAT_MRT4530_10441C.1
atggagtccttcttgccgtatgtcactgctatccaactgatcgtcagcacgatgctcatggttgagcatgacaaaggagaagtgaccgtctacttcgccaacagctcctcctgcgcgagtccaccatcaccatcaccatcaccaccaccactaatattcccggtgccggcgtcgaattgcccagacaagtgcggcaacgtatccatcccctacccgttcggcatcggcagaggctgctacctcgacctgccgggctccggcagcttcagcatcacctgcaaccacaagacggaccctccccaaccctacaccgccgatgccctcttggtcctgaacataacgctggagacagcggaaatgttcgtcgtctcggctggcgccctcgccgtggtcaagtacccatcagtaagagcaagaagtgccatcacgagcaaatttatcactactactcaacaagaagaagaacattctatgcaagtaaaagtaactgtaggaatgcctgtcacccaacaagtaaacatgacattcttaccaagcggatacaccttgagcgcaccgtaccggctttccccgacgggcaacatgttcacggccgtggggtgcgtcaccatggcgaagttgtacggcagcgtagagaacagcagcagcagcagcagcacgggggcgacgacgacgacagcagcagcagcaggagggcaaatgataggggagagggcgtatgcgtacgacgcgggctgcatcacctactgcccgagcctgagcgacgccgcggcggatggggcgccgtgcaaggacctcggctgctgcgagtcgcccatcacgccaggcctcacccagttcgccgtaggatgggggcgatggccaggtgcatccgacgacgactacggcgagttggaccccgaacagtactaccagtatgcctttgtggcccaggactggtaa

SEQ ID NO: 3470 - DNA, 495 bp, Oryza sativa
  Clone ID: PAT_MRT4530_10442C.1
atggctcgcttcgccgtcgtcgctgccatcgtcaccctcctcgccgtcacggctgctgtgcaggccccgggagcggccctcatcccggcgctcaagatggccctgctgcctgctcccccaacgaggtccctggccaccgcccccatgccggtcgccacctcacccaccgccacgtcaccttcccccatggtgcctcctccgactccgcccactgacgccccagatgccaatgctccctccaccctcgccccgtccgtggtcacctccaccgcctctgcaccgaccggtgcccccgtgagctcctccgcgttcaccaccaccgacgctcccatcgtggggatggaggaagagatggggaagaaaaaagagggacaatgtaggaagatagaactgacatgtgggtcccacgtccaggaggctgacaaaaaacgtgatggagtggcacggttcgaattttctaaatttccagtggcacgtagccgatatgctaaatag

SEQ ID NO: 3471 - DNA, 528 bp, Oryza sativa
  Clone ID: PAT_MRT4530_10443C.1
ctgcaggccaccattcactttgcccaccttcctccgctactcatccaattacaaccctccaccattcacttctatctactggtcttaataaccgtgtccaactctaaaactctaaaacaatgatggtgcccctatggacttcttttgggtagcacttctattgtactgactggattataacactgcatattacattactttcctttcacaatagaaaatagaaacctctccttcatacaatacttgaattccattttgtgccatcagtgttgtccacatttctcctggattgagcattgtacattctaggtttgaataaagtgtcagatattttgttgtctttgagactcggttgtgtcaaaattaaacatacttttgtgtgcatgaattttagtatgttttgatcattgtgataatgctggcccatgtgattttgatgttcacaatgaggtatatcccacaatttcacatctaattggctatctctggtggcttgagtactgttgtggagtataaaattagtagaaa

SEQ ID NO: 3472 - DNA, 110 bp, Oryza sativa
  Clone ID: PAT_MRT4530_10444C.1
gaatgacacactaattaaacatacaactcctgcattaagaaacaggtggcccctttatactagcatactgagtgagagacagaagcaccgggcgaccctgagagagtgcg

SEQ ID NO: 3473 - DNA, 770 bp, Oryza sativa
  unsure (1)..(770): unsure at all n locations
  Clone ID: PAT_MRT4530_10445C.1
aggaccccanagtggtggccaccgccgacgacggcggcgaaggtcggtgccgccacggcagcgcgtccgctccaccaccaccacctcccccacccgccgcctgcgccggcggcggcgacagcgacaactccgtcgacgccgtggacccatccagcctccgccacgggtcccctcctcctcctcccaccaccaccccgccgccgccacgccctccccccgacgtcgccaccgccgcgctgctcggcaagctgatgtgcagcgacaggtccggtggcgtcgccgccgagctcgcctccatcgaccgatcgatcaaacacctccttctccacctcggcagcagcaacggtgatctcgatcgacacgccggagatggagctcatgcgatggaaggaatcatggtggagaagatgaaggagaaggttcttggagttcttggagaagaagaggaagctttgcttggttgcttgctttggccaagagaaggatgatgtctcctttttgtatctctgtctatatgcgcacactaaggtcacgcccaacgctccaccatggagcgtagtctcatacctcccaaagcgaatattcgcgccacgtcggaaggagccgcgtccttgcaagggtgcgcgaatgctgcaggaggtccacacacccttgtcagaggcactgcacttatgcccgaaggaatcgacgaggatgcgcgttgggtagcggtgtcgccccatgctgttgctccagctcgtcatcaactcgagctcccgcaccattgccat

SEQ ID NO: 3474 - DNA, 231 bp, Oryza sativa
  Clone ID: PAT_MRT4530_10446C.1
atgaggatatttccccccttgatatagaagtcttgaaaacaaggctacacagcagccagaggaatctctgaccactaggttatatcatcttgcatcatgtgagcatcacggataacagattacttagttgaaatgcggggtggagtcatgacacaagattccttggaacatatcggagcaaaggcatataggaacatagagttttggagcatgctggagcaactaaacctg

SEQ ID NO: 3475 - DNA, 834 bp, Oryza sativa
  Clone ID: PAT_MRT4530_10447C.1
atgatgaacaatcttgattgcttgcttcaagagatcgcgacgccatgggaaggggagaaggtccaggaggaggacgcaggccacaaggtctctcctccccccttcttcggcctcccgtctccactgctgccggctaccgtcgccaccaccgccattggctaccgtcacctctcccgcccaatatctctgctgtattggccaacagggagggcctcggtagcggcggcagggtgcggcctactcctcttcgccgctggccgccgtgagctcggggctagatccggccgccgcgacgatgggggaggccggatccgccaccgcgacgacgagggtggctggatccgccactacgataacgggttaggccggatctgtcgctgcaacgacgtgggggaccagatctgccgccgcgatgacgatgcgaccgccacagggtcgcgggaggggcgcaagcgctggatcgggccgcctgagggccgcgatgcggatgtagatgtggattttgtcatgcggatgcggatgtggagcagcacgctcaccgacgtgccgatgggacaggtcttatctgcccccactccgcctgacaccgggcgggacgtgggtacgctgctatccgtcccgtccgcctgttggccggcgcttgagagcacccctctctccgcccactcggccaccatgtggcagccgagcgggggccttggggcagcttgcccgagggccccgagggcggtcctcgtatggctgccgccagcaaagataattttctctgacggcagccttaagccgtctgccagtgaaaacatctcttctctggcggttggtcaccgccagtga

SEQ ID NO: 3476 - DNA, 266 bp, Oryza sativa
  unsure (1)..(266): unsure at all n locations
  Clone ID: PAT_MRT4530_10448C.1
tccactcccgcaggatcaacaccatttcttnttccggactgacccaacccagcaactaaattaattagctggacgtacgggactctctatntaattactagtngccaaattaagagtacgtcgtcccttntagctagttcctatacaaacatatccaccctggttgcaactgtagtgttaagctagcacggaatccatcactgtacaagcatgtgtgtacgtgcagtgatttaattaattaatttgctgaaaaaaaaaaaaaaaaa

SEQ ID NO: 3477 - DNA, 437 bp, Oryza sativa
  Clone ID: PAT_MRT4530_10449C.1
cccaagggaacccttggctacaaaatataaacaacaacccaatttggcccccggcccaaaaaaaaaaaaggaaccccttgggaacttggccactgttctcatctaattttaaatttttcatccaaaaaccaaaaaaaaacagggcgggggaaaacatgggaccaaaaaaaggaccccttgttttttgccaaaaaaaggggtttgcccaccatggcccggggaaaggcgaaccgaaccctggcgttgaagggaacccactaaagggccggggttgccttcccccggccgccgcgggggtcaacccaaacccgttgaagggcccccgggggggcgcggccgtcggttttgccccccccccacccaaggacctcttcggccccgggaaggccgccccccggggcgacccgttcaacgaggggcggaagaaacaccttttg

SEQ ID NO: 3478 - DNA, 211 bp, Oryza sativa
  Clone ID: PAT_MRT4530_1044C.1
cgccgtgccggtcgccgccgagcggccgcccaccgcagctaccgcctccgcgcagcccccggcaccgccgcgccgccgccgcgccggccgcctgcactgtgtcgttaacgtgcagtcactattccaattccatctgaagcagacacaacttgtgtcgcacaagccatctgaaactctgaactctgctggactgcactctgtctccgactga

SEQ ID NO: 3479 - DNA, 197 bp, Oryza sativa
  Clone ID: PAT_MRT4530_10450C.1
tatgctacgaaccaaaacatagttccagacgcttgatcagagcaccaccaggaggctgcacgccataagcgaagcaacggcagcctgttataaatctgccaataacataccgttcattccgcccatctgattggtatgagacgaggattgaacataggcagactgggacataagcaggatcatctctaaatcacccg

SEQ ID NO: 3480 - DNA, 466 bp, Oryza sativa
  Clone ID: PAT_MRT4530_10451C.1
ccttacaaaaattttgacaaaacttgaaaccctaaaccaaaactcaactctattgctctctaaagcgatacaggaagcatcacgctccctctctatttataccacaaaaatcctttactcaaagtaggtgtaaaactcctatacacaataatacacaataggactccatccttcagtttccatacgttttacaatttccaaacgtgcagcaaacaactggccgcaccagaaatccaaaacggattcgctcccaagctgacgtccacgcgtgaccatctccgactcgctgccagctggacccttgcttctcctaggccgacttggcatgccgccaacagccaccgaagcccaccgagcctttctcgtgctgctcggccaaccagtcatgcacacatacatgcttcaccatgcatgtatcgatcacacatacctgtacagcaccgtacatgcatgcatacctgcaggc

SEQ ID NO: 3481 - DNA, 586 bp, Oryza sativa
  unsure (1)..(586): unsure at all n locations
  Clone ID: PAT_MRT4530_10452C.1
cctgatgcatgcatctgttcttgcttgcgaaactgctcatttgctnccgggtacacagtgctatgtgtggncattgctgtttacttctgaatagttgtgtggtgtttatcatgtgatctagtcaatgatggtgctgtacttgaatggaaatggatttgttcctgttcaggaataagttctttcacacatatatgttggtgggaggtttgggtgtactaaactactatttcctgtctatcagtttgatatcaagttcctccttggtatcatcttatactcatgctgttcatatgtcgtgagaatagattgttcatgtcctgcaaagtaggtgcctcttagatgtatacagttttgcagtttgccctggttcttcaagtaaaagtaaaattatcactaccataagaattaataattatgcttggtctaaagaaagaattagatacagtgaaatctcctgtatccctaggcggactaaatttacttaagaaaggagtatgcacatgtttacaaagttccaacttcgacaagaagctgtcgaagtgaaaggatgttgtcacaggggcaacttcccaaaaaaaaaaaaaaa

SEQ ID NO: 3482 - DNA, 531 bp, Oryza sativa
  Clone ID: PAT_MRT4530_10453C.1
atgtcagaggctgctcatagctgcagcttccgttgtcgccattctccggctgatcgaagaaattcaacagatgcagcagcagcagcagctcaagccgtcaagcccgtgcgatcgtgtctacaggctaatgcccacgtcgtcatcgtcctcttcatcgtcttaacaaaaccagctaagaaaaaaatttatgactatagctctgttaccatattaagttttaatttatcgtctgcaggtttgatggttatgaatgtcactcggagtaaagaatcaacatatataaggatggcctctgctcaccgattacgagaccagccatttgattatgcacctcatgtcccgcgcagaatacaatacgatttcatctttcgtttcatcagaaaaaatctgggacggaaggattcgaacctccgagtaacgggaccaaaacccgctgccttaccacttggccacgccccatttcgggttttatgcgacactaataaacagtattatgtttatttcttattcgtcaatcctacttcaattaca

SEQ ID NO: 3483 - DNA, 1143 bp, Oryza sativa
  Clone ID: PAT_MRT4530_10454C.1
atggctgttgcactcgcgctcttggctgccatgtcggcgctctcgtcgtgcacaagtccggccaccgcagagctcacacggcacgagcacccggtggccgccggcgcgccgctgcgcctcctcgtcgtcggcgactggggccggaagggcggctacaaccagacaagagttgcagaacagatggggaaggttgcggaggagacggagatcgacttcgtcgtgtcaaccggcgacaacttcttggagaacggcctcgccggcgtcgacgacatggcgttccatgactccttcatggatgtctacacggctcagagcttgcacaagccatggtaccttgttcttggaaaccatgactacaggggaaatgtgctagcacagattgacccagctctgaggaagatcgacagcaggttcatctgcatgagatccttcattgtcagtgcaggaattgtcgatttcttctttgtcgacacgaccccgtttcagctccagtactggactgatcctggagaagatcactatgactggaggggagtcgcgcctcgggatgcgtacatcgccaatctcctcgaggatgttgatgctgcaatgaagaaatcaactgcaacatggaagatagctgtaggacatcataccatgaggagtgtgagtgcccatggagacacccaggagctccttgagcttctccttcctgtcctcaaggaaaacggtgtcgatttctacatcaatgggcatgatcactgcctggagcacatcagcagcagaaacagtccaattcagtacttcactagtggaggcggatcaaaggcatggagaggcatttttcaacaaaacgaagacaagctccagttcttctatgatggacaagggttcctgtcacttgagctcagtgagaaccgagctcgattcgccttctacgacgttttcggtgaagctttgtaccactggagcttcagcaaagctaatctgcagaaggttcagtcctctgctagtgtaactgaagaatgagagaagctggagccttcagaatacattcccacacagctgagtagatgtctacctgcataattctacttgtacaattatgtcacattgtgctcatcaatactggatttgctatgaaaaaaaaaaaaaaaaaaaaaa

SEQ ID NO: 3484 - DNA, 924 bp, Oryza sativa
  Clone ID: PAT_MRT4530_10455C.1
atggcgatgggattcgtagggagaaggaccgacggcggcgggagactgcacacggcggcggcgagaggggaggcacggcgccggagcggaaggggaggtcggcggccgagggaaaggtttggggaggtcgagggggtcccgaggaaggcgatggcgagccggtttgaagagagggagaccgacggcagcacgcggccatgcgcggcggcggcgagtcgggcgacatggcgccggagttggagggcaggccagcggtcggggcgacggtttggggtggctcaaggggactcaaggagggtggtggcgcgaggaatcgatgagcggggagccgacagcgacgcacgactgtctgcggcggcggcgggaagggcgggaagggagcaaaagaggaggccggcggcggaattggcggtttggggtggttcattggagctcgagacggatggcgtcgcggcgaggcagtcgcgacggcggggcggcacgacaccgagagggcgcggccggggaacaagaggggagaggtggcgcccggagctcctcgtcacgcgcccacgcacgcaccggttcctccgatgctcggcggcggacggcgacggcgagatcgggtcgagcggcaacaaggcggcgacggtgtggaggaatgtctgtttgtggagggaggaaaccgacctcgtgcgctgtcaaggatgcaagggcggcaagctggcggtcgacgcgtgcggccaaggaggcggcaggagggggagggcacgagagagacgctgcctccgtgatttggatggttgcggcgtggggttgcagggccaggcagcgcaggcgctgacggcggcgggcgaccgggcggtcggccttgaccggtcgcgggcgcccaaagcaatggcggtggcgggaggatttgcaaggcggcggcggaaatcgtgctaa

SEQ ID NO: 3485 - DNA, 1951 bp, Oryza sativa
  Clone ID: PAT_MRT4530_10456C.1
aaccctaaacctcaacaattcaacccctctgaaaaagtctattgtgccttcctctgcttttggatggaccgatgtcctcctttggcccatctctctctcggcccgttctctctctcgggccgttctctctctccgccttcccctccctcgctccgcacgtgcggcgcacgcgcgtgcgcatgaaccatcgccgagccgagctctctctctctctcggcttgcctctctcgccaaccgatttccgccgccgtcttgcaaatcctcccgccaccgccattgctttgggcgcccgcgaccggtcaaagccgaccgcccggtcgcccgccgccgtcagcgcctgcgctgcctggccctgcaaccccacgccgcaaccatccaaatcacggaggcagcgtctctctcgtgccctccccctccttcgtctctcctaaaaaaaacggcaaagaacagagcccctttctcctctcctttttccacctttgcccgacaccgccggcgtcatcacctgccgcctccttggccgcacgcgtcgaccgccagcttgccgcccttgcatccttgacagcgcacgaggtcggtttcctccctccacaaacagacattcctccactataaaacccaagccgcgccccaaaccccttcttctctcgttttcactcgcttcacacccaccgcgccattgccgccgaaccaccgtcgccgccttgttgccgctcgacccgatctcgccgtcgccgtccgccgccgagcatcggaggaaccggtgcgtgcgtgggcgcgtgacgaggagctccgggcgccacctctcccctcttgttccccggccgcgccctctcggtgtcgtgccgccccgccgtcgcgactgcctcgccgcgacgccatccgtctgccgacgccgttcccgctcgtcggtgagctcccggtccaaatcctctcatctacatcctctagcgactcctaaacagcactgggacatggtagtttgtgcgttcgtcctccaaatcgggcccttgccgatgctctacttccgcggccgccgtgagcagtcgtgcgctaccgccggtcggtcccgcgccgaatccctcccttcccgcccttcccgccgccgccgcagacagtcgtgcgtcgctgtcggctccccgctcatcgattcctcgcgccaccaccctccttgagtccccttgagccaccccaaaccgtcgccccgaccgctggcctgccctccaactccggcgccatgtcgcccgactcgccgccgccgcgcatggccgcgtgctgccgtcggtctccctctcttcaaaccggctcgccatcgccttcctcgggaccccctcgacctccccaaacctttccctcggccgccgacctccccttccgctccggcgccgtgcctcccctctcgccgccgccgtgtgcagtctcccgccgccgtcggtccttctccctacgaatcccatcgccatcaccctccccgcgtccctagcagcctccccgggacatcgccttggccgctcccctcctctctcccccttttcgccgcgtcgccccttccgccgccgcggagcgccaccgcgagcccaagtccggcaaccatcggtctccgtgccgtcgcgtgtgcgtcgcaatgccgaatcgtttcggctaagcctggccccgcgcgctcttggcccttccctcgcgcatccacgtcggacatccggcgagcttcgctgccgccgccggccgccgtcgtgcctcctctctctaatccgtgccggtgaaccgattccccatctcctcctctcgccacaggtgtccgcgcctcgctccgtctcgccgccgttcgccgggacgctccgcgcgccgccggccgtccgatgcggtctccggcctcctctttcccttgcgcttgcgtggcatccacgtggacgccacctcatctgccgaccccaccagaccgagtcaacccctg

SEQ ID NO: 3486 - DNA, 487 bp, Oryza sativa
  Clone ID: PAT_MRT4530_10457C.1
tgtttgcttacctaacatacttttacaagggggcctttgtacattgccaaagtccttcgatctcgcctcccagatctgccccgcgtcggcgaagatgaagatcaacgtgcgggggtcgacgatggtgcggccggcggaggagacgccgcgggtgaggctgtggaactctagcctggacctggtggtgccgcggttccacacgccgagcgtctacttcttccggcgcggcgaggcggcggcggcggagggcgggagctacttcgacggggagaggatgcggcgggcgctggcggaggcgctggttccgttctacccgatggcggggcggctggcgcacgacgaggacggccgcgtggagatcgactgcaacggggaaggcgtgctgttcgtcgaggccgacgcgccgggcgccaccgtcgacgacttcggcgacttcgcgcccaccatggaccttaagcgcctcattcccaccgtcgactacaccgac

SEQ ID NO: 3487 - DNA, 357 bp, Oryza sativa
  Clone ID: PAT_MRT4530_10458C.1
atggcgatgcaccaagcagcgacggcggtgaagcaagcgacgggcggcggcggcgctggccgcggagagacggcggaaaggcaaaggcacatgatcatggacgacgggactagtcgacgaggtggatgggtgaacgtggcggaggcgagcttgtcgcagcgcgacaagctcaccggaacgtgcggcgccgtggaagccctcagcgtcagctgccatcgccacttgcttgatgagaaactttacacgaatacacgacacaaacggggaagtgatggctctacgattcaggtgttgtggatcagcgggagtgcgctggatggggtatgtactcgcgattgcggccgccagccggcgtga

SEQ ID NO: 3488 - DNA, 669 bp, Oryza sativa
  Clone ID: PAT_MRT4530_10459C.1
cgggctgcaggccacttgttctatgtccagcataaacccggtacacctttccagacctgccacttccaatccaattctgctcgcagagcccagaaagaatgtcatttgaggtgaaatgcaatacgtggaagggtgttaacttccatgacaagtgatcttgtatatgctttttccttcttaagagaatgaaaccaaccactgccgaaaccaagagtacaatgctggcaacagcagaaatgagggctatatgctttccgaatagatccttgttgatgtttgctcttgccctgcagatagggaaattttggagtgaattgctcgatgagacacagaggcctgggttgaataggaagctctgctcatatgctttgttttgcaatgatgtcggaatttcccctgtgagttggttcatagagagattcagaaaattgagcagtagcttattaaaatccttcgggacctcaccagatagcttattcgatgagaggtctaggtcggtcagccctgtaataaacccaaaccctgctgggatattaccagatatctgatttccacttaggtaaagtgcatttagcctcatcagcactccaattgtcgtgggtagtgagccactaatttgattcccagaaagatcaaactctatgacttgtgaaatgcctgtcagatccc

SEQ ID NO: 3489 - DNA, 1273 bp, Oryza sativa
  unsure (1)..(1273): unsure at all n locations
  Clone ID: PAT_MRT4530_1045C.1
gtggggcccccccccccccaagaagcgggcggggggcggccccccccgccggcgccccgcaccacacctaaactgatcatacacacaaattaagttgtgatcatccgagcaaaagcaaagcaagagaacggtagctagctagttgacacaatgagggcgggcaggttggtgatcctcgtggcggtggcggtggtggtggtggtcgccggcggcggggcggcggagggcgccggcgagtgcgggagggcgtccgccgaccgggtggcgctgcggctggcgccgtgcgtgtcggcggcggacgacccgcagtcggcgccgtcgagcagctgctgctcggcggtgcacaccatcgggcagagccccagctgcctgtgcgccgtgatgctgtccaacacggccagggtcgccgggatcaagccggaggtcgccatcaccatccccaagcgctgcaacatggccgaccgccccgtcggctacaagtgcggagattacacgctgccttgacccttgaggccttgagggggactgtggcacttatcgatatcaagacgtacggatgccgtgggagcttaggctttgtgtcggaataagcgagagtccttcatgttcggggctctgccacttatatggactatgcacgtggtggttgtgaaaatatgtatcctgtgtttcgtctgagtaaactgttaaatataataagaatatacaaaagcttgcttgacaaattaaaaaaaaaaaaaaaaaaattgaccaaaaaattaaaagatagcccacactcaaagagtaacagtaatcaaacagggggccccgctcacctgccgtgtttctcgccgtgggcgccggcgcctcgtgggctccgcgttgttgcgttaaaagcgggctgtgggtggtggggttgtttgtatgggtaattgctacatttacgattgtactgcctcattaaatgctcctgccgtttttggttatttagttacaacaagagatttcggctcgggtgggaggtggtgggagtgggaggggtttttgggggtgtggttagtcgggtagtgtgggatgattggatgatcttatggttgtgagttgtgtgatcttggtgggcgttggctctcgctggtcctggtgggcgcggccgggtgctggtgattgttttgccggggatgttgcgtgcacggncagtctgcagggctgatgacgacgtacgacggccttgattaggctctggcgccctaaaagctacctacagatcgcttacagcatactactcctatatact

SEQ ID NO: 3490 - DNA, 382 bp, Oryza sativa
  Clone ID: PAT_MRT4530_10460C.1
tggatacatcgcgcccgagtactgctcccaaaatgtttattcaacaaagtctgatgtttttagctttggcattttggttcttgagatcataagtgggaaaagagccgtgggttcatacaaattatctggaagatcatacgagctcaggagagcttggcaactttggaaagaagagagatgcgacgagttggtggatccatcttttggagaagattaccaagaaatggacattattaggtgcattcaggtggcacttctgtgtgtccaagacagtgcagaggacaggccaacgatgcacgatgtaacgacgatgctaagcaacggaaacaggaggttgctcatgcctgcacaaccaggttcattcaacatagatattggcgat

SEQ ID NO: 3491 - DNA, 478 bp, Oryza sativa
  Clone ID: PAT_MRT4530_10461C.1
ccttagagcgacgctcacctggggaggcgcgcctttgctcaggaagtgtgtttgtgtgggcaccggatcaatagagggcggccaggcaccgatgtgcccctgtgtgatacgcgcccttgtgctagttactcggttgtaggtgttgctgcaccctgggtggatacaccagatgcaatgatgtgagaagaaagatggctgccccccatggttgaaatacttggtgactgactggcctggctgtgggattgagctgcccaggaagaagctatgtagtgtaataaaagtgctgatttgtattagctccacggaagaagcctaccgatgactcccctgtgatattcctctgctctctctataagtgcattgagcgaattggcttgggcttctccccttagggcttcgggataaacccccgtgccacttcatgtgtttgaggttataaaccaccccgtagataactttggttgaaaaaaaaaaa

SEQ ID NO: 3492 - DNA, 465 bp, Oryza sativa
  Clone ID: PAT_MRT4530_10462C.1
ttatggagatagagtgcaagataaaaagggcaaaaagcggagggccctttttcttggccatcccctgagagtatgggctgctcctactctttattagcaggagaacaaaacggaggcggataaatgcgctgcctgaccagcatggaattttttgctcatagcataaagtcaagtacagcatccaagctgtttaattctagtaccaagctggaaaacttgtctcatgtgtagtatatacaccaccagcacagctccagttgaaaaaaaaaaagaaaaaaacggccagatctatctcaccggcgcgcgcgacacagcgagttcgcgcgagcgaggcgtctggtggggcgtcgttttccccgcaccgtgcgggggtctcgtcgtactaccgagagtatgcgcacgccaccggcgtgcgcggcggaaaaacaggtaacgcttcttctgtggccgaccggagacacgttt

SEQ ID NO: 3493 - DNA, 423 bp, Oryza sativa
  Clone ID: PAT_MRT4530_10463C.1
atggccctccggaccctcggttcgctcctcacccggaggctctcgccacgcgcgcaggcgcaggcggagccctggctggggctctctattcaggcggcggcggcggcgacggggaggcgagtattctacagtggtgcgttggcagggttggtcgcagttctgcatctcgacaagaacacagaggattcggattcagctgcggagcagctcgatgagaccgaagacgcaaagggcctcccttttggtcgtacgagatacgcgggctggacggatgaacacttcaggcgcatggatctccgtcgcgagttcgactggaacctgtacattgctcagcggaatgctcatgggaggttcattagtaatgatccagatgtgtctctcaacgctataaagcaggctgcatctgagcgaattgatcagtag

SEQ ID NO: 3494 - DNA, 2673 bp, Oryza sativa
  Clone ID: PAT_MRT4530_10464C.1
atgtgggtgttctacctgatatcgctgcccctgacgctgggcatggtcaccgtcacgctccgctacttcgccggcccaggcgtgccgcgctacgtcatcgccaccgtcggctacgcctggttctgctccctctccttcatcatcctcgtccccgccgacatctggacgacattaactggccgtgagaaaggtggcatcggcttcttttggagttggtcgtattggagcacatttatcctaacatgggctgtagtacctactattcaaggctatgaagatgctggagatttcactgttaaagaaaggctgaagactagtattcatatgaacctgctcttttattctattgtgggggccattggcctctttggactcatattgcttctagtgatgcatagagcatgggatggtggtattgtgggctttgcaatggcatgttcaaatacttttgggctggtcactggtgcattccttcttggttttggtttgagtgaaatccctcgaaacatttggaaaaatgcagactggactcaccgacaaaaagtactttctcatagagtagcaaagatggctgtcaagcttgataatgctcatcaagaatattcaaatgcaattgttgttgctcaagccacttctaatcaaatgtcaaagcgtgaccttttgaggccttatatggatattattgacaaaatgttggctcagatgctgcgggaggatccatcttttaagccttctggtggaagattaggtgaaaatgatatggactatgatacagatgataaaacaatggccacacttcgacgtcaacttaggagggctcacgaggagtactacaggtgtaaaagtgaatatatgacttatgtcatggaagcccttgaactagaagacaccattaaaaattatgaacgacgtgacgcaaatggatggaaatttgtgtcaagttttagggaaagtcgaccgggcacactgggttcccttttggacacaatggagttcatttggcgctgtgttctgaggaagcagcttcagaaaggatttgctattgttcttggctgtatgtcagctgctatactgctggctgaagccactctgctgccaagtggtgttgatttgtcccttttctccattcttgtcaagtccgtagggaaacaggaggttttggttcaggttgctgcatttgtccctttgatgtatatgtgcatttgcacttactactcactgtttcagattgggatgttaatgttttattctctgactccgagacaaaccagttctgtcagcttgcttatgatctgctcaatggttgcaagatatgcacctcctatttcttataacttcctgaatctcattcgacttggtggtgatgccaaaactacttttgagaagagaatgggaaacatcgatgatgccgttcctttctttggaagaggcttcaacaggatatatccattatttatggttgtttatacactattggttgcaagtaatttctttgggcgtttgattaactttttcggaagctggaaaaggttcaaattccagcgtgaggaagaaaatatggatggttttgatccgtctggaatgatcattctgcagaaagagaggtcttggattgaacaaggatgtaaagtaggcgagcaggttatcccattggcaagaaatttcaataatgtcaacacagatgttgaatctggaaaggtgccattggttgaaaatacactggagatgaaatcaggagctacttcctctagagctgacggaagagtaggtcaatccaaatatgctaacaacagagaaactattgctaccaagtattcagctatcagagaacagagcagacaggcagtgaagccagcaaaaaaggaaatttcttcaacttctgtatctttgcttgaggaagggagttctgaacagtggtccaatactggtgcacccgtgggctcatcagctggaatttcccaaacatgggcaacgatgaagattggttttcagaacttcaaagcaaacatgggttccaaaaaattcattcctttgcgccaagacccaggatttgctccacattcaaatgtctcttcgcccgaatcacttgatgaaatcttccaaaaattaaaacgacgtcctgcagatatgcctgtggattaccttgacgatgatgatgacaatactggtgacatggatcctacattcccaggatcaacaagataggttatgatatattcttttagaagttagaatatgcaagctcagaaattaaaacgatttggtagcattagatgcagaacagaagatacaggatgtatagattagatgatggaggtggccttcttggaagctcaggagtcaggacgcctgcccatctggaaagctgcaaagataaaaggatgacatgatgatgacaggttctgccctacgtgtgcagaaaggacagcagattctccaaacaagagatcatgagattatgggacttttctgctctacacatacagtacattgttaacatgtttttgtaacactttggtaatggagaggatgtagtgagtcgaagctgacgagtgtaaaatgtcttggaaaaaaatcacgaatataatgtattaactgaaaaagaagtacacacaaatgtttttgtgtggtggaaattccatttgtcttgtctactgaaaaaaaaaaaaaaaa

SEQ ID NO: 3495 - DNA, 786 bp, Oryza sativa
  Clone ID: PAT_MRT4530_10465C.1
atggcaaaacatactcggaaatcatttatatcatttgagcccgattacgctcgcttcatgcatcatcacatgaagaatgcttcatgtacatcttttcatagccttacatacactaccaggatgggagacactcccgggtatgagcagaaagtttatgtagtgtgcttctatcactccgtaaattaccgggtgtttcaggggaacactctgcaacaacttctgttacggagtgttcatttagaacactggggaacaccaggatattggagtattacactagcgaatatggcgaggacagcggccggcagagttgagcgtggcggtggccgcggtggacgagcgtgtggccgccggagccacccctcatcgccggcgccatggccgtgcccgctccgccaggcgtggggcagcctcgacgtgctcgtcggccgcctccgcaccgccttcgacgagcacggaggccaccccgaggccaacccgttcggcgcccgcgttgtccgcctctacctccgcgaggtctgtgacagccaggccaaggtgcgcggcatcgcctacgagaagaagcgtcggaagcgcccgcccacctcgtcttctcactctcaggacggcacagccgccacttgcccggcgagcccagccgctagcccgacgccgctaccgccgccgccggagagatcagctgacatgggagcttgcgtcgccatcgtcgtcgccgtggggtgcacgccactctcgctagccgcccgccgcggctgctcctattgcgcgctcgctcgccgccgctag

SEQ ID NO: 3496 - DNA, 1059 bp, Oryza sativa
  Clone ID: PAT_MRT4530_10466C.1
atggccacggctgtgatggacagcgagttcggcagcctcgtcaaggtgtctgcggcggtgtgggcggcaatgttctacgcccgcctcgccgccgcaagccttcgccccggcgctccccgcctcgccgcgctccttcccgtagtcgcgctcttctgcgtggtccccttctccttctccaccaccactttccgcggctgctctgccttcttcctcagctggctcggcgtcttcaagctgctcctactcgccgcgggccgagggcccctcaaccccacgcatcccctccaccacttcgtcttctcggcctccctccccgtcaagctccggcacctcgcatccgccaagccggccaaaggtgtagatccagctccggccaacgagagcgcggcgggcaagatcctcgtctccggcgccgtcatccccctcatcatctacacgtaccagttcaagaacgccatgagccggtaccagctcctcatcctctacaccgggcacatctacttctccctgcagctcctcctggccgtcgtccacgggctgatccatggcgtgctcgggatggagatggagccgcaggtggaccggccgtacctggcgtcgtcgctgcgggacttctggggcaggcggtggaacctcatggtgccggccatcctccggccttcggtgtaccgcccggtgagggcgcgtctcggcgacgcggctggcgtcctcgcggcgttcctcgtctccgggctcatgcacgaggcgatgttcttctacatcatgtggcgtcccccgagcggcgaggtgaccgtgttcttcctcctgcacggcgtgtgcacggccgcggaagcgtggtgggcgcggcacgcggggtggtggcgcccgccgcgcgcggccgccgtgccgctgactctggcgttcgtggccgggacggggttctggctcttcttcccggccatgatcaaggctggcctggacgagatggtgctgcacgagtgccagggcatggtggccgtcatggagcagtccggccggtggctcgccggcgccaccaatctcaccttcgcgacacgctga

SEQ ID NO: 3497 - DNA, 318 bp, Oryza sativa
  Clone ID: PAT_MRT4530_10467C.1
aaagagaaacaggggattttaaaagctaagggaaagagggttaaaaagctattggaaagggggaatggcccccgccggggccggggggaaaaaagaaaggggagaaaagagggcaattccaaaaacaaaagagggggaatggaacttttaaaggggggtttaaaggggcaccaattaagggaaaacattaagaaattttttcagggggaggcaaggggggttttgggggaggggggggtgaacccggaaatttgggaaggggatttggaggggaaaaagtttttcttataggggggggtaaaaaaggtgggggaaaga

SEQ ID NO: 3498 - DNA, 639 bp, Oryza sativa
  Clone ID: PAT_MRT4530_10468C.1
atgggagacactcccgggtgtgagcagaaagtttacgtagtgtccttgtatcactccgtaaattaccgggtgtttcaggggaacactctgcaacaacttctgttacggggtgttcattcagaacactggggaacaccaggaaaatggagtattacaccagcgaatatggcgaggacggcggccggcagagttgagcggggcggtggccgcggtggacgagcgtgtggccaccggagccacccctcgccgccaacgctgtgcccgtgcccgctccgccaggcgtggggcagcctcgacacgctcgtcggccgcctctgcaccgccttcgacgagcatggaggccaccccgaggccaacccgttcggtgcccgcgttgtccgcctctacgtccgcgacagccaggccaaggtgcgcggcatcgcctacgagaagaagcgtcggaagcgccctcccacctcgttttctcactctcaggccgccgccgccgccacttgcccggcgagcccagccgctagcccgacgccggagagatcagccgacatgggagcttgcgtcgccatcgctgtcgccgtggggtgcacgccactctcgctagccgcccgccgcggctgctcctattgcgcgctcgcttaccgccgc

SEQ ID NO: 3499 - DNA, 219 bp, Oryza sativa
  Clone ID: PAT_MRT4530_10469C.1
gatttatatctagtcggactcgtgtttacgacccaaaacatagcacggttgcgacattgcttcctacacaacctaactgcggattctatacctaccttctccaactatctgaagctctgaacgcgctacatcattttgatacattcaacagatcaattactgtacaaaccgcatgcataaattatagaaccaggcatgcttcataacataccaaaattt

SEQ ID NO: 3500 - DNA, 849 bp, Oryza sativa
  Clone ID: PAT_MRT4530_1046C.1
atggactatgtatgcagcatgacgacgttcactagaagacgagggcggtcggcgcgcacggcgccgcgcgggggcgggtggtgggaggcggcggcgggtcgacgagctcggtcggctccggtggtagtcggcgcggacggcggctcccgtggccggagctgggttggcgtgcctcgccgcctgcctctctgccacggccccgcctcgccgccgcctccggccaccgtccacatctccgccacgttgctgaccgaggaataccggcagctcaacggcgtcggtagcgaggtcgccgagctggccaccatgaacaccctccaccgcatgcaatccgaggccgacgacggcaccgtggaccacttcgtcctggagtggatgaagcagctccgcgagctcgcctacgactcggaggactgcatcgaccaataccactcgtccagctacaacatatgaagaagaaggcccactccagccccttcctccttttccgcatggtggcaccttctccaggtgcaagagcgtcgtcatcttcacggggaacgcccgctcccacgcgccgccatccaccgtccgccgcccgcccctccgtgcagcgggcaaccggtaggctgcgacagccgcgacgctgaggcgggaggccaccgggacagaaggtgggcgcggaggaaatggcgagcggcggtcgcgggaatggcctcctcctccgccgccgctgtctccctcttccgcctctcttgctcctcctccccgtcctcctcccgacgccgctccagctcccgacgcgcgcctccgtccgccgtccctcgtcctcctcccgacgcttccggccatggcttgcctctccgccat

SEQ ID NO: 3501 - DNA, 3925 bp, Oryza sativa
  Clone ID: PAT_MRT4530_10470C.1
ggggggatccagatgagcgatcccaggtacgcctacccgtacccttctcaaggttattacaaccaggggccgtaccaggggccgccggtgatggcgccgccgcacgcgcagtaccagtaccagtacgcgcagccgccaccgccgccgcggcagccgggcttcctcgagggatggtacggtatctatctatctatctatctatctatctatctatctatgtcgtcgtcgtcgtcgtcgtctatggccaagggcaagcagccgcagcagcagtggaagcccaaggccacggaccccgcggccgcggcgccggctgtggtggcggcggcatcctcacccgcgtcgtcgacgtcctcttccgctgatttcgccgggggggtcgagaggatgaccatctccccgtccccgcagggaggggcgtcgcaggtgtgggtgcccagggggtacgcgacctcggcgtcgtcgtcctcctcctcctcgtcggcggcggcggctgagcagcgcatcgacgctgaaaagctctccagggtgttcaaggccgccccgaacttcgaggtggacaacaacacgttcatccagtcgcagatcagggccaccttctaccccaagttcgagaacgagaaatccgatcaggagactagaacccggatgattgagatggtgtcacatggcttagctaccttggaggttacgctcaaacattcagggtctcttttcatgtatgctggccaccatggtggtgcatatgccaagaacagctttggaaatatttacacagctgtgggcgtttttgttctgggacgattgtttcgtgaagcttgggggaaggaagcacctagaatgcaagaggaattcaatgtttttcttgagaaaaaatgcataagcatttcaatggaacttgtcactgctgtgttaggagaccatggtcaaaggccaaaggatgattatgctgtgattactgctgtgactgagttgggtcatggcaagccaaaattttattctactccagaggtaattgagttttgtcggaaatggcgtctacctacaaaccatgtctggctattttcgacaaggaaatctgcctcgtcattttttgctgcatatgacgctctatgtgaagaggggacagcaacatctgtttgcaaagccctagatgagatagctgatgtagctgtaccagggtcaaaggatcatgtaaaggtgcagggtgagatacttgaaggcctggttgcccgtattgttagccgtgaaagttcagtgcaaatagaagaagtcttgaggaactatcccctgcctccattagatggagaagttcttttttcctatgcagttggctctgatttaggaccaagtctgcgagaaatatgtgctgctaatagatcagatgaaaagcagcaaattaaagcacttcttgaaaatgttggaccttcaatgtgtccagaccattctgattggtttggatgtagtggccttgatgatcatcagtctccaagtgctaacagatcggtcgtcactaagtttttgcaagcacatcctacagactacacaactaagaaactgcaggagatgattcgtgtgatgaagcagaggaatttccctgcagcttttaaatgttattggaactaccacaaaattgactctctatcgaatgacagcttgtattacaaaatggtcatccatgtgctcagtgattctgtttttagacgctatcagcaagagatgaggagaaatcaagggttgtggccactgtataggggtttctttgttgatgtaaacctgttcaaggttaataatatgaaatcttccataccttcggaagacattgacacctcactgaaaaatatcaatggtgccttggattcaaattcgtcagctaaggatggtctggctgatgaggattcaaatctgatggtgaagctaaaattcctgacatataagctacgcacttttttaattcgaaatggtctgtctacacttttcaaagacggtccttctgcttataaaacttactacctgaggcagatgaagaactggggaacatcagcaagtaaacagaaagaacttagcaaattgctggatgaatgggctgtctatattagaaggaagtatgggaataagccactttcatcctcaacatatcttagtgaagctgagcctttccttgaacagtatgctaagcgcagccctgaaaaccaggctttgataggggcagctggtgacttggttcagacagaaaatttcttggcgatacttgaggcaaagagagatgaagagggtgatcttcaggctgaacgtggtactgcaccacctagtcctacatcaacatccttggatgtagttccgaaagccgaaggcttgattgtcttctttcctggtatacctggctgtgcaaagtcagctctatgtaaggagatattaaccactcctggtggcctaggtgataatcgtcctcttcatagtttgatgggagatcttattaaaggaaggtactggcaaaaagttgcggatgaacgaaaaaagaaaccatttcgaataacccttgctgacaaaaatgcaccaaacgaagaagtgtggaggcagtcctataggttttataacaaactgagagatcatctcttccagattgaggatatgtgtaggacaacaaaggctgctgctgttcctgttattcctgattctgaaggcacagattcaaatccattttctcttgatgctcttgctgtcttcatgtttcgtgtacttcaacgggacaatcatcctggtaatctggacaaggcatcaccaaatgctggctatgttctgttaatgttttacaacctctacgatggcaagaagcatgcacttcagagtcgaagagaatttgaaagtgaactatatgagcgttttggatccttggttaagatgccactattaaagccagatagagccccgctgcctgatgaagtgaaagctattttagatgaagggatcagcttgttcagactgcatcaaagcagacatggaagagcggagccatcaaaaggtgcatatgctaaagaatgggcacagtgggagaaaaggttgcgccaggttttgtttgcgaacaaagactatctcaactctatccaggttccatttgactttgcagtgaaagaagtattggagcagttgaagtctgttgcgaaaggtgatcttaaaacgcctgataccgcgaagcggaagtttggcaatattgtcttcgctgctgttacgttacccccagcagatatattgggtgctctcccaaagctagcagaggacaccgacgccaacaagttcctcaacaacacaaaactcgcggataacctgaccaaggctcatgtcacccttgcccacaaaagagcccatggcgtagccgcggtctcaagctacggtgtctaccagaaccatcaagtccctgtcatcttcaacgccttcctcttctccgacaagatggccgccctcgaggtggagctcgggacggtgaacggcgagaagatcgcgtcccggaacgactggccgcacgccaccctgtggaccgccccaggcgttgcgccgaaggaggcaaacacgctgccgcagctagtcacggaagggaaggcgaagcgggtggccatagaccctcccatcaccatatcaggagtgctggacttctactgaccgaccaccctcttttttctttattttctggtggcctagaggttgaacattactaacaagtggtaacggcgatagctttgtagatgcatcgagttggagggctcttgttttttcggggattacaggacaggtcgaggtattgttttttatgtttgaatttggtgaaaaatgaaatataggagtatatgctgcagtataaataaaattatttaactgctgtctacgggcaaaaaaaaaaaaaaaaaaaaaaaaaaaaaaaaaaaaaaaaaaa

SEQ ID NO: 3502 - DNA, 2937 bp, Oryza sativa
  Clone ID: PAT_MRT4530_10471C.1
tcaagggtagacctcgatcattgacctgaaacctaggatcggcataatcttgtacccactgaatccagcctccacaaaaaccttcttccactcttgctcatctctttcgatgccattgaccaacatgatgtacatatcgaacaacgcttgtacctccctgtgcttctggtcagacggccctgctccgaccactatgtccatgattatgaccttccctcctttgtctctaggagtgatggattttttgcagttcttcaatatcttgatgcaatcgttatcgccccaatcatgtagaacccacttgaggaagacagcgtctgccggtggcacactctcaaacatgtcgccggcgatgtactcgacgtcggtgccggcgggagccttggcgacgacgtgcccgaggtccatcacgctgcacctcacctccgggaacgccttcgagatgacctgcgccgccgcgccgagcccgccggcgaggtcgaccagggaggcgatcccccggaacacctcgccgtgctccctcacgacgtagtccatgatgacgcggctgtccgagaccatcccgtcgttgatgagcgcgtcgaacgccgcgtcgcggccggccagctcccacaggctccggccgtgcgcctgcttgaagatgcagtacgggtcctcctccggcggctcgcggtcgcggcggagccactcgccgacgccgaggaaggggacgacgagcgtcgggtggaggatcatggacatgatgccggacaggttcgaggagccgacgaggagccgcgacgacggcgtgagctctcctcctcgcggcaccagcagttccgcaacctcgccaagacccgcgtcgacgacctccaggagatgttctccggcctccagtccgcccgcaaggagagccgctccgccgacgccgccctcctcgaggagcaggtccaccacatgctccgggagtggcgcgccgagctctcgcagggtaacaaccgggaggcgtcggatccgccatcggagacgctgcggttgctgcagctggccggggccgaggaggaggatgacgccaccagcaagctcgtgatgccgcgatcgcctatgccgccatcttctcatcagagccatgggcatgggcaggatggcggccagaatctgcagggtgaggctgtcatgggaagtactgctgctactgctgccccgcatctgggtcagggaatgcagggcgattgcggaggaatggctggtgttaccaatgcaatgttccatgatcagctgtactatatagatcatgaactcaacattgatgattttcttcaagatgatgattataagataaatcttcctggctcaaacccagacggccccaataccatgcaggggattggtcagctggaacatcaacagtacaacctgccattagatctgccacctaactcatttgttgatgcaaataactctgcgcagagttctggagatgtttttttccacatgtcagacttgctcacaacaatgtgcccatcaccttctcaatatttggggccaaaatgtgcactctgggactgcggtcgacctgttcgaggatcagatgagtgtcaacattactgcaatccttaccatgccggtttagctttgaatgatgatggccttctagggactagacctgtgatgcgtccaagggggattgatttgaaagatggccctctgtttgctgctcttagtgcaaaagtccaaggaaaaaatgttggtattcctgtgtgtgaaggggctgcaactacaaaatctccttggaatgcacctgagcttttcgatctatctcttcttgaaggtgaatctcttagagaatggctattctttgacacaccaagacgggcatttgatagcggcaatcggaagcaaaggtcattgccagattacaatggccgtggatggcatgaatcaaggaagcaagtgatgaaagattttggaggtctgaagaggtcctattacatggatccacaaccatccagcaactatgagtggcatctttttgaatatgaaaccaatgattctgatgctctagcgctgtatcggcttgagtacaagtcttctgatactaagaggagtgttaaatcaaaattggcaagcagtccactgagtgaaatacagcagcaaatggtcaggcttagtgcagacagtcctgtggaaagcaaacggactgctaggagcagggcaaaggctaatcaaaaggataacaattcaaacgcctatccagctctcaatacccctgttcaagtcagtgcttcaaatgctcatcaaacaatgtctgtcaacaccccctgatcaggtcaatgtttcaaatgcatatcaaacaatgcctctcaacaccccaaatcaacccggtccttctaatgcttatcatgcagcatcacagatggaccagatgacgtttctggatggcagtgttgtttatggacctcatcttccatatggatactccaccgaaagaagcgatttctactggaaccctagtgacgggacatgaagatagcatattgggtttcatacattctactgcatctgtcagctgggaattttaacagcatcagctaaattatggggctcaacagtgtggcccaaaagttttctgattgtatgacctcttttaaagatggcatgtttgcaatacagtgctatactttgcattaacacttgactgtaaaaatatatcccagcacgccctagctcctgttgatggcaagttaaatggtcaaatggcttttaccaggaaccaatgctgctgtgctgggtgtatttttagcttagcctgaagccttatgaagttctgaacttctgaaggtttcgttttatcctttgtatataccctgattttctgaggcgttgtggcatcccagatttgcctttccgttaaaaaaaaaaaaaaaaaaaactcgagcctcgtgccgattcctgcag

SEQ ID NO: 3503 - DNA, 635 bp, Oryza sativa
  Clone ID: PAT_MRT4530_10472C.1
tcctttcggcagctcactacaatagaggggatccatgaattgatttctttaggcgccctcattcagaacgtgcatctccatccaagtttgccagatgatatcctttgtaaattctcgcctaacggaaattacatctcaaaaagtgcatacatgttgcaatttcaaggcatcttcaccaccatcgattttacgaggatctagtcagctcctactgaactgaaacatcgttttattggctggctcatcttgcaccaaaaaactctaaccgcacaaaatctccttcaacgccactggccttgtgattggattttccctctttgtagggaggctttcgaaaacattgctcatcttttcaaagaatgctttttcaccatcaacgtggggaacaaaatttgcgcttgaaagggtttaggtcaaaacactttgcctaacaccttagatttagaaaagttggtggagtttgctctcaacctttcgaccaaaaacccagcgaaaaagaactccagggtgcctgatcacctcctggtggaacatttggttggagcgtaatcaacgtattttcaaaaatttatgcaaggcagccaaacatggtggcttctctaattttgcaagacctcgtgtcacactgctttcca

SEQ ID NO: 3504 - DNA, 484 bp, Oryza sativa
  Clone ID: PAT_MRT4530_10473C.1
catgcgcacgcacgcgtgcgcgtgtaccctctagctcgcgccccctttttttttttttgtgaggggcattgcaatggtgtaggggattacgcaatctaatgctgacagctgaaacaaaagacaatgaggccggaacatcaataatgactaattaacaagggcctcaaacttaagacagcaaaccaggcgacacaccctttcccaccaatgagaacatataacatgcccaagactcctgaggagggggatcgccaaaaaagcgaataccatgaactcataagctaccgagggctttggatgatgggagacgctaaatcgcctagtccgcatggcattgaattgcctgtactgctgggcacactgcccccctggtccagttgcaggcttcggggggccgtcttgatcatatgcttcctgccgactgtgctggtgactgcggctgatctcctcttttatgttgacatcatgcctggcgggctcctac

SEQ ID NO: 3505 - DNA, 900 bp, Oryza sativa
  Clone ID: PAT_MRT4530_10474C.1
atgtgtgacagcttgttttggcagtcgtcggccgaccaaggggacctctcggatgtggtgagggccagccttcagctgcagacggcgcctcgccatcaggctgcatcgccgccgtatgtgcacctcttaggaggaggaggaggaggaggagaagaccagcttgcagcagtgagccaacacgctgagcagcagcagcagagcatggtggatgcttctgcagcttgcgaccttctccatgcgctgttgccaccaccaccagtagtgcaggtgcagcagcagggagcgtcgaggacgaggacgacgattgaggaggacaccaccggcgacggcgaggagttatttgctggtgctcattatgtcgttccgcccatcaagcgaaggaagagccagacgaagaaggtggtgtgcatcccggcgggggcgagtggcggcggcggcggcgaggtggtgccgtcggacctgtgggcgtggaggaagtacgggcagaagcccatcaaggggtcgccctaccctcgcgggtactaccgctgcagcagctccaaaggttgctccgcccggaagcaggtggagcgcagccgcgccgaccccacaatgctcgtcgtcacctacacctccgaccacaaccatccatggccaacccaccgcaacgccctcgccggctccacccgcccctcctcctccaactcatccaacatacgcctccaagacagtactccagttcatcatcagagtcagactggccacgatcgtcttacgaccactcacctcaagcaggaggacgtgatcatctccccctccctgctgcagcccgaccaccatcagctgtgtaccattattgacaccaagcaccacctcttgtttcatcaagactatcctcacagcttcggcttgttcgactag

SEQ ID NO: 3506 - DNA, 478 bp, Oryza sativa
  Clone ID: PAT_MRT4530_10475C.1
ggaaacaacccggcttaaaaaaaaaaaagaaggccagggaaaagggcccttctatcaaacacagggggttgggaaaaaacccgggagaagaaggttggcaaaaaaaaggaacaaaatggccttcggcataggggaaacaaaaaaaaaaacgaaacctgggggtccaaacaaattacagagctttttaggggcggaaaaaaaaccccccacaaatgggaaaaagggggaacctaaccacccgtatagggggttcttgcccggggggggaaagaggtggggggcccaacctagggggctgggggaaatggagggggccgggtatggccccgggggacagccgggggaccccattgccagggaaacaaaagggggcaaaggccaccccaccatttaccaggggggacatggtcggaaacgagggggatttttccatttaatggcccccattttaaccacacccaggggggggggggggggc

SEQ ID NO: 3507 - DNA, 349 bp, Oryza sativa
  Clone ID: PAT_MRT4530_10476C.1
atggcggcagcgtggcggcgcgcgcggcatcggcgtggcccagcggcggcgtgcggcgcgcggcgcggtggcggcgtggcgcgtggcccggtggcggcgttgcgcggcgtcgacgaagcgcgcggcacggcggcggtgttgcgcggcggcgttgtgggaccggcgttttgtcataacgacgttggcgccggcggcgacgactacgaccgcgagaccactgatattaatcatcttcgtcttctgtgctgtgaggcccttagacaacggccccgcatactgtaccgcatcccgccggaatctttgcgccccgatttccgcagtccattacggttccgtttttggtcgtggg

SEQ ID NO: 3508 - DNA, 300 bp, Oryza sativa
  Clone ID: PAT_MRT4530_10477C.1
aaggttgtgcacggcggcgccggccatggcggcttcttctcccccttgggcgccggcgccggcgacgacaagtacgatcggcactagcgcgcgccgccgcgtgtaccgtatctctctcgatctctaaaacctctgtgtgtttttgcgtgtggatcgagagatcaatcaatcgatcgatcgatggagaaattaagagaagcatttggattatggatagctaagctaagttaatgaagctgagctagcttctactacttggccactgcaactgtgttggcatttgttgtgaggagttgatta

SEQ ID NO: 3509 - DNA, 5145 bp, Oryza sativa
  Clone ID: PAT_MRT4530_10478C.1
atgcctaaaagacttttttgtctcaaaaattttgttatggatcggcaatggatgtacgctgaccggcggtccaaagagtttattgatggtgtgcattattttttgagagtggccgaagctaacaagcagaagggttttatttgttgtccatgtaataagtgtaagaatcagaaggagtattctgcatccaggactattcatttccacttgtttgagtcggggttcatgccaagctataattgttggacatcccacggagagcaaggggttgaaatggaagaagatgaagtggaagacgacaatattccagactttgctcagtacgctggatttgaaggaaatcaaacgggcgaggaggacatagatgctgattataacgacgttgcggatgatcttggtcagatgttgcaggatgccaaggaggactgcgaaagtgaaaagggggcccataaattggacaagatgttagaggaccacagaacgtcgttgtacccaggttgcgagcaggggcacaaaaagttggataccactctggagttcttgcaaaggaaggcaaaaaatggtgttagtgacaaggcatttggcgatttattgaaactcgtcaagaacattcttccggagggaaacaaattgcccgagacaacgtacgaggctaagaagatagtctgccctctaggactggaagttcagaagattcacgcatgtccaaatgattgtatcctatatcacggtgaggttgacgggcagctaacgaagaagagaattcctgctaaggtgatgtggtatttccctataataccacggctaagacgtttgttcaggaacaaggggaatgctagaatgatgcgttggcacgctgaagaacgtcaacaggacgggatgctgagacaccccgcagatggttcgcagtggcgaaacatcgacagaaaatttaaagactttggaaatgacgcacgaaacatacggtttggtttaagtacggatggcatgaatccttttggagagatgagcagcggccccaagcaacctggtaacgacatcgatgtgttcttaagaccactggtcgaagatcttaaactgttgtggaagaaggaaggtgtccccgtgtgggacgaggacaaacaggaggagtttaacctacgagcgctactgttcgtaaccatcaacgattggcctgcacttagcaacttatccaggcagtccaacaaggggtacaaggcttgcactcactgtatggatgaaacagaaagtacgtatcttaagcactgtaggaaggttgtgtacatgggtcatcgtcgattccttgcagcaaaccactcggtacggaagaaaggcaagcactttgaacatacggcggacaaccgtacgaagcctaaacatcgcagcggaaaaatagtgtttgctatggttaaagatcttaaattaccctattgggaattcttggacgtccgcgatgcaatcgacgtgatgcacctcactaagaatctttgcgtaaaccttcttggcttcctaggtgtatatggaaagtcgaaagatacactggaagcacgtaatgatctgaagcatatggaacaacgcggtgaccttcacccggaaccacaggagaaaggcagccattacttgagtccagccagctacactcttagcaaggcagagaaggaaagtatgtttcaatgcttggagagcatcaaggtaccgtctggatactccatgaatataaagcgaataataagcacgaaggagaagaagttcacaaacctaaagtctcatgactgtcacgtgttgatgacacagctgctaccagttataataaggggtatcctcccagacaatgtccgggcaacaataacaaagctatgttctttcatgaacgcaatttcgcagaaggtcatcgatccggataggttagaagcccttcagaatgatgtggtgcaatgtcttgtcagttttgagttgatatttccaccttcatttttcaatataatgacgcatctactttgtcacctagtgaaagagattggtattctcgggcctgtgttcctatacaacatgttttctttcgagaggtacatgggcattctgaagaagtatgttcgaaaccgtgctcgtccagaggcaagcatcgccaaggggtatggaacagaggaggtcattgaattctgcgtagaatttattgaagaccttcgcccaatcggggtacttgaatcacgccatgaagggagactacggggaaaggggactctcggaaggaaagcaataatgatggtagataacaatttattccgtaaagcccatttcacggttttacaacaatcttcattggtggctccttacatcgaggagcacttggctctagttcgcgccagaaacatcgcccaaaacatgaagagcacgaaccagaacaatgttgttcgtatcgatgccatgggacacgatggtacaactggcacgtattacggtgccatcgaggagatatgggaacttgactatggacctctcaaggtccctctgttccggtgccaatggattaggttgactggtggaggcgtaacgattgatgacagtgggatgacaacggttgaccttaacaaggttggatactcggacgaaccttttgtccttgccaatgatgtaacacaagttttttacgtgaaggacatgtctagcaaaggaaagaagggcaaagggcctgacgagccgaagtgccacgtggttctcccaggcaaaagaaaaactgtcggagtagaggacaagactgacgaggattacgatcagtttgataggcaaccccctttcacggtgatggttgaccctagcatcctcctatcaaacgaagacaccctttactcacgtagcgattacaaggaaggaacaatagtgaggagaaaagaagacgtcgtcgtcgtcgtccctcaagccgaagtgatggctgatcgcgatgaggaacaaatactgtacgatacaatcgcatcgggaagcagccagttctggaacgaagaagaggggaacgaggaaccaaaccagcacttgaacgaggaggggaacgcggagagggatgcagaggggaacgaggaggagttccagaccttcaagggagatctgtaccggaaatacatcctgaaggggcagacaccgaactttgacgtattcccgaagctaagggatcactgggacaagttcgttgcttacaagacaggtcaacaagggcaggcaatgatggaaagaaacaaagaaaatgccgccaagaagaagtaccatcaccacttggggtcaggcggctatagcgtcgcgatgccgaagtgggaggagatagaggcaagcttgcttgagatgggtatcgaaccggccaccgctaaatggcctaatcgatcaaagttctggtactatgctcacggtggaacgctcaacccagttgatggctccttggtcttcagcgatcagatacgcgaggctgcgaatcgactaacgggcgcagtggaagcctcttctcagggcacgttccgacccgacagagagaaggacgaactgtcactcaccctacagactcccgagcatccaggacgaacacgagggaaaggcgtgattccctggaagatgggattcaaggaggacatccacacgtacaggagtcggatgaggagcaagagagataccgaggcgaagattgcagatcttgagtacagggtatcgagctacgagctcagcatgcaagaggaggtggcccggaaggtggcgtcaggaatggccatcccaacggacatttcagggacttaccactgcaggccgattccagcaggatactcgagggtcgaagttgagctggtggaagccgtgtacgaggacctcgagttggactacccaggaggagatggtgagacgcatctacgagacacaagccacaccattatactatggcgcaagcggtacatcatcctccttgggcgacaagcggcatctcgtgcaccatctcctccggctccgccgtctcctcctgcaccatctcctccggctcctccgccacctcctcctgcaccatctcctccggctcctccggctcctccgcctcctcctccaccgtgtccgcctgcacctcccaagacaaggtctcgccaagctccacctcctaccagcacaagggcaacgaagaaggccaaagttgacaccaccaaaaacaaggagccgccgtacggttgcagtcaagaggagcttgacgcttatgtggcaggagaagtgaagaggcaactcaagcctcggagtcctgaaaagaagatacctattgacccgagcgtgaagaatttcttcaaggaaatgtccaccgcaaacaaggaggccttaaagctatcggactatgaccgaacacttaggaaagcctattacaagaagtccaaaccagttcctcagcttggagaacaaccacaccaagtggtcgagccgttggtgaccggcgaagactttggcataacggatttcatttcggacaccggtctaaccatggctcagttggttggaggcgcaccaatcccgaaggcggaagtggcatacaagtttgaactcggtaaaccgcttgtcaggcctgagcagctgcagtccctaccgacacaaatgtacaaattccatgaacggtacatggaaatgagcgccaatggtagagagatgttcggagcgaggatcagaaaccccaacttcttgcaaggagaagatgttctatggatccatttcaaggatgtcttcaatctgtaccatcgggacgccctcgacgtctctcttttaagcgtatggattttaatggagattcaaagggcccgacggcggggggtttacaatactgggttcatcgaccctcggaaaatcaacaccgaaatgctcgacaagtacgagaaagacacagaggacaatcttgtccatctcctaacgcagcagcatttcaagacgttcatactattgccgtacaacacagaagtcactgtgtacgactcaatgaataaagaggagaaggtttttgacaaggtcttccaactgatagacagggcttgggatcggttccgtcagttggtccgcgggacttggaaagcaaaacttggacggaggtttcattttccagggagtacatgcatgatccaaaattatattgaattgaatctctag

SEQ ID NO: 3510 - DNA, 3336 bp, Oryza sativa
  Clone ID: PAT_MRT4530_10479C.1
atggatatgttgcaggacgccaaggaggactgcgaaagtgaaaagggggcccataaattggacaagatgttagaggaccacagaacgtcgttttacccaggttgcgagcaggggcacaaaaagttggataccactctagagttcttgcaatggaaggataaaaatggtgttagtgacaaggcatttggcgatttattgaaactcgtcaagaacattcttccggagggaaacaaattgcccgagacaacgtacgatgctaagaagatagtctgccctctaggactggaagttcagaagattcacgcatgttcgaatgattgtatcctatatcgcggtgaggagtacgagaacctagaagcatgccctatttttaaagcactacgatacaagattagacgagatgatccaggagaagttgacgggcagctaacgaagaagataattcttgctaagtggcaaaacatcaacagaaaatttaaagactttggaaaggacgcacgtaacaaacggtttggtttaagtacggatggcatgaatccttttggggagatgagcagcggccatagcacttggcccgttacgatgtgtatctacaacctccccccttggctatgcatgaagaggaagtacataatgatgccgattattattcaaggccccaagcaacctggtaacgacatcgatgtgtacctaagaccactagtcgaagatcttaaactgttgtggaagaaggaaggtgtccccgtgtgggacgaggacaaacaggaggagtttaacctacgagcgctgctgtttgtaaccatcaacgattggcatgcacttagcaacctatccgggcagtccaacaaggggtacaaggcttgcactcactatatggatgaaacagaaacaaaccacccggtacggaagaaaggcaagcactttgaacatacggcggaccaccgtacgaaaccaaaacatcgcagcggtaaaacagtgtttgctatggtgaaagatcttaaagtagtatttggaaaggggcctggcagccagcctatagagagcgaagatggtcacgcggcgatgtggaaaaaaaactccatattttgggagttaccctattgggaattcttggacgtccgccacgcaatcgacatgatgcacctcactaagaacctttgcgtaaaccttcttggcttcctaggtgtatatggaaagtcgaaagatacactagaagcacgtaatgatctgaagcatatggaacaatgcggcgaccttcacccggaaccaaaggagaaaggaagccattacttgagtccagccagctacactcttagcaaggcagagaaggaaagtatgtttgaatgctcagagagcatcaaggtaccgtcaggatactccacgaatataaagcgaataataagcacgaaggagaagaagttcacaaaccaaaagtctcatggctgtcacgtgttgatgacacagctgctaccagttataataaggggtatcctcccagacaatgtccgggcaacaataacaaagctatgtgctttcatgaacgcaatttcgcagaaggtcatcgatccggatagattagaagcccttcagaatgatgtggtgcaatgtcttgtcagttttgagttgatatttccacctttattttttaatataatgacgcatctgctttgtcaccttgtcaaagagatcggtattcccggccctgtgtacctgcacaacatgtttcctttcgagaggtacatgggcattctgaagaagtatgttcgtaaccgtgctcgtccagaggcaagcatcgctaaggggtatggaacagaggaggtcattgaattctgcgtagaatttatcgaagaccttagcccaatcggggtacctgaatcacgccatgaagggagactacggggaaaggggactctcggaaggaaagcaataatgacggtagacaacaatttatttcgtaaagcccatttcacggttctgcaacaatcttcattggtggctccctacatcgaggagcacttggctctagttcacgccagaaacatcgataagtccgatgcctggattacacggcattacattgatactttctccgcgtggctgcgacaacatctcataggtaacgagacgattaaccaacaactggccttcctgacgaggggaccatctggctcgatcgcgacattccaaggatatgaaatcaatgggtacacattctacacgagagcccaagacatgaagagcacgaaccggaacagtgctattcgtatcgatgccatgggacacgatggtacaactggcacgtattacggtgccatcgaggacatatgggaacttgactatggacctctcaaggtccctctgttctggtgccaatgggttaggttgactggtggaggcgtaacgattgatgacagtggtatgacaacgtttgaccttaacaaggttggatactcggacgaaccttttgtcctcgccaatgatgtaatgcaagttttttacgtcaaggacatgtctagcaaaggaaaaaagggcaaagggcctgacgacccgaagcgccacgtggttctcccaggaaaaagaaaaatcgtcggagtagaggacaagactgatgaggattacgatcagtttgatgggcaaccccctttcacggtgacgattgaccctagcatcctcctatcaaatgaagaaaccccttactcatgtagcgatcacaaggaaggaacaataatggctgatcgcgatgaggaacagatactgtacgatacaattgcagagggaagcagccagtactggaacgaagaagaggggaacgaggatccaaaccagtacttgaacgaggatccaaaccagtacttgaacgaggaggggaacgtggagagggatgcggaggggaacgaggaggaggaggctagtggaagtcatccctccgctggacagaagagggcacgtggacaacgaggtgccgcgaagaagatagagggtcggcacatcataactaaggtggacgaagacggccgacctagtgccccggtagaagcagccaagaattttgtacgccacagtggttgggttgtgagggataacgtgcctgtcagcacggtgtactggcgcagaacaagggcacgcggggataatgacagctttgtcccagaatcagagaaagagatgatgtggaccacaatgctcgagacgttcacgctacccgcaggtacggagaacatagtgaaacagtggactctgaagaaaatggcagaacaattccagagcttcaaggtggtgaagagtatatggcgatcttttttctcggttggtgttatcaatcaggactacaaatag

SEQ ID NO: 3511 - DNA, 447 bp, Oryza sativa
  Clone ID: PAT_MRT4530_1047C.1
atgggtatgactgctcctcttcctctccttctccttcttcttctcttgtacttctccttcccattatcgaccctggtgctccctgctattgctgccgctgccctcgcggtgccactctcgatcctcgtcctctcccaagaggacggcggcgtcacgcagcttcttgccatccatggcgccgacggccacctcaccttcatgcgcacgacggcgacgtcacgtagcttcttgacatccatggcgtcggggcatggtaagcggcggtggcaagatgcgagcaacgaggtgagccgcggtggcgacgtgatcacaagtgctagaggtgagatacgcagcagcccacgatggttcaatgtctatctcggaaggaagggttacatgcgattggaggtgaagcgacacacgtttaatgagtttgcattcatcaaggggtatattggtatatag

SEQ ID NO: 3512 - DNA, 354 bp, Oryza sativa
  Clone ID: PAT_MRT4530_10480C.1
atgccggaagagaggacgacgggcgcgtgcgagcaacaggccctgcatgagaaaagcttcaagaacagatcgatgcctggagactggagcatccgcatttcaagaacagatcgatctctccctgcagatgtggctatgagcctgagagaaaaaggagatatgcaatttcatcggatgctgcaaaaatatgtttttagacaaggagtgttcccgggtcagatgctgcagatattgaagcaacagggacggagccattctattcttggtgtactatttgtgcccctaaatccaagaaaatatcgaggaattgcagatttgcagtggatgcataatatgtatgggatcatgagcaaa

SEQ ID NO: 3513 - DNA, 1218 bp, Oryza sativa
  Clone ID: PAT_MRT4530_10481C.1
atggctgacgagttcccgccaccaggtcctcctcaccctgcaccaatggctgatggtggcgagcctccgccgccatgggcggacctcccaatccacatcgtccgcgggatcgccagccgcctcctgtgcaagatcgaccgtcgcttcggcgaaggcgtctgccgctcctggcgcgaggcgtttctgcaagtcgggccgccgcctcccccgctcccgctgctcgtcgtcgcgaacgccggcgagcacgcgttccactgcgtccccagcaactggcgcacccaccccatccccatccccatgccacgcttcgcgcaccaccgctacttcggctcctacgacggcggctggctcttcctctccatcagccaatccagccgccacggcctccacaacatcaacaagaacgtcaactccaagcgcttcagattcagcctccctgaccagcggctataccaaatccggccgacgacagcggaagcggataagtttattgttatcgtcgccgccaccctctcgtgccagccaaccgaaccgggatgcgtcgccgccggcatcatcgacttgcacagcttccccgaccacccaagccgccatggcgctggcgccttcctcttcctcaccaacggagaacacatccgtgagctccctcaaccgatattcccgcccccaggcacggcgaagcgagtcaggaacgagctctacttcaagccgcgcggcgacgacggcggcggcggccggccggtccttgctcgctacctcgtggagtcccgagacgagctgctcatggtcgtcaggttgggtacccttgagcactcctggatcaagctggccgaccttggcggccgcatgctgttcgtcgggagaggctgctccagatcctacgaagcggcggatgggtaccccggcatggagggagtctacttcctggatgaccggagcttctacgaccggacgaccgtgttcaagaatgacgacaaaaggaagtatcaccgcagcgacatcgggaaatggtcgggatcaccaccgcaggtcaggcactgcttaccggagcaagtcctaaatcatgtgcacaatgaggctgatcgagtggctgatagagagtttgatggtattgcgctgaacattgaggttcttggctcaaatgcaaaactcacaaagtcttccatgaacattaatgggatgcatggtgcttcttatgtcgattttacaaacctgtga

SEQ ID NO: 3514 - DNA, 2547 bp, Oryza sativa
  Clone ID: PAT_MRT4530_10482C.1
atgcctagtaaaaaaaaagaagaagatgaagtggagaacgagaacattccgaattgggctcagtacgctggatttgaaggaaatcaaacgggcgaggtggacagggatgctgacgataacgacgctgcggacgatcttggttgcgagcaggggcacaaaaagttcttgcaatggaaggcaaaaaatggtgttagtgacaaggcatttggcgatttattgaaactcgtcaagaacattcttccggagggaaacaaattgcccgatacaatgtacgaggctaagaagatagtctgccctctaggactggaagttcagaagattcacgcatgtccgaatgattgtatcctatatcgcggtgaggacaatatatccgggcagtctaacaaggggtacaaggcttgcactcactgtatggatgaaactgaaagtacgtatcttaagcactgtaggaatgttgtgtacatgggtcatcgtcgattccttgctgcaaaccaccctgtacggaagaaaggcaagcactttgaacataaggcggaccaccgtacgaagcctaaacatcgcagcgggaaaatagtgtttgatatggtgaatgatcttaaagtagtgtttggaaaggggcctggcagccagcctatagagagtgaagatggtcacgcggcgatgtggaaaaagaactctatattttgggagttaccctattgggaattcttggacgtccgctacgcaatcgatgtgatgcacctcactaagaacctttgcgtaaacctgcttggcttcctaggtgtatatggaaagtcaaaagatacactggaagcacataatgatctaaagcatatggaacaacgcggcgaccttcacccggaaccaaaggagaaaggaagccattacttgagtccagccagctacactcttagcaaggcagagaaggaaaatatgtttgaatgcttagagagcatcaaggtaccgtctggatactccacgaatataaagcgaataataagcacgaaggagaagaagttcacaaacctaaaatctcatgactgtcacgtgttgatgacacaactgctaccagttataattcggggtatccttccagacaatgtccgggcaacaataacaaagctatgtgctttcatgaacgcaatttcgcagaaggtcatcgatccggatagattagaagcccttcaaaatgatgtggtgcaatgtcttgtcagctttgagttgatatttccaccttcatttttcaatataatgacgcatctgcgttgtcaccttgtcaaagagatcggtatggaggatctgataactccctctccgctggggggttggaactttgatttcggcaagtcttttgcttctcaagtcttggatctttttggttgccctgtccatttttctccttatttcagttcttctcctttcattctggttgtggattttgtccgcttcaatttccgtttgactgtcaagtcggttgctattgctctacaagcttgtctgggaggaagcccccatggttttagtgtgctttctcttaaagctaattgtttctcattccaagtctgtaacaagaatgtcggcctctatgtcaactccttccgggatttcacttgcaaagattttcatgtccgttttttcttgtggggtaatggcggtccaaattggaggagagaatttgatctttgggagaaagaggagaatgatctttgggcgcaccttcacgatgctgacttccggccggagttgtttctgctggagggaacaaacattgaggtcccgtgggaagggcgtacccctcgtgcggacctcacgcttcaaggtgttctccccaactctcaccaagagttcgctgccgttgttgttgatcctcagccgccggagcacctttttggccagttgattcaagaagtggcaaacatcatcgagcatcagcatcacattcatgttgttaggatccagaggtatccccttgctctgtgccttgttcagctaccttcggttctggatagagacattcttgttgccagtggtccggttctgctaggtaattggttccatggtactttcgttaggcatgatcagttagctaactggaggaactcgccatacaccagggagggttggcttatgattctgggcatcccgcttaatcttaaaactggggctattattgaacggatcactaatctttgtggggaattcatagactggcactatagagatagagttctgggcagagtacttgttaaagccagatacaaatctgctaatgaggtgccaaactgtattgttctgggggatactatggcttatgggggcaatggtcaaacatggacctttcatgtctatgtgctgaatggagaacccactgatatgctacctggagatgaagacctactgcccatttggcaaatgatgccacctcctcagcagcaccatcatcataataagcatcagcatcacaatgaggaagatttcaatgctaatcacaatcagaatgaagatattgggggacaaccagatgattttggagcagaaccagattga

SEQ ID NO: 3515 - DNA, 2493 bp, Oryza sativa
  Clone ID: PAT_MRT4530_10483C.1
atggaagaagatgaagtggaagacgacaatattccggacttagctcaatacgctggatttgaaggaaatcaaacgggcaaggaggaaagtgatgctgatggtaacagcgttgcggatgatcttggtcagatgttgcaggatgccaaggaggactgcgaaagtgaaaagaacattcttccggagggaaaccaattgcccaagacaacgtacgaggctaagaagatagtctgtcctctaggactggaagttcagaagattcacgcatggccgaatgattgtatcctatatcgcggtgaggagtacgagaacctagaagcatgccttgtttgtaaagcactacgatacaagattagacgagatgatccaggagaagttgacgggcagctaacaaagaagagaattcctgctaaggtgatgtggtatttccctataataccacggctaaggcgtttgttcaggaacaaggggaatgttagaatgatgcgttggcacgctgaagagcgtcaacaagacgggatgttgagacaccctgccgatggccccaagcaacctggtaaggacatcgacgtgtacctaagaccactggtcgaagatcttaaacagttgtggaagaaggaaggtgtccccgtgtgggacgaggacaaacaggaggagtttaacctacgagcgctgctgttcgtaaccatcaacgattggcctgcacttagcaacctatccggacagtccaacaaggggtacaaggcttgcactcactgtatggatgaaacagaaagtacgtatcttaagcactgtaggaagcaaaccacccggtacgaaagaaaggcaagcacttcgaacataaggccgaccaccgtacgaagcctaaacatcgcagtgggaaaacagtctttcgctatggttaaagatcttaaagtagtgttcggaaaggggcctggaagccagcatatagagagcgaagatggtcacgcggcgatgtggaaaaagaactctatattttgggagttaccatattgggaattcttggacgtacgccacgcaatcgacgtgatgcacctcactaagaacctttgcataaaccttcttggcttcctaggtgtatatggaaagtcgaaagatacactggaagtacgtaatgatctgaagtatatggaacaacgtggcaaccttcactcagaaccaaagaagaaaggaagccattacttgactccagccagctacactcttagcaaggcagagaaggacaatatgtttgaatgcttggagagcatcaagaaggtcatcgatccggatagattagaagcccttcagaatgatgtggtgcaatgtcttgtcagctgtgagttgatatttccaccttcatttttcaatataatgacgcatctgctttgtcaccttgtcaaagagatcggtattctcgaccctgtgtacctacacaatatgtttcctttcgagaggtacatgggcgttctgaagaaatatgttcgtaaccgtgctcgtccagaggcaagcatcgccaaggggtatggaacagaggaggtcattgaattttgcgtagaatttattgaagaccttcgcccaatcggggtacctaaatcacgccatgaagggagactacggggaaaggggactctcggaaggaaagcaataatgacggtagacaacaatttattttgtaaagcccatttcacggttctgcaacaatcttcattggtggctccttacatcgaggagcacttggctctagttcgtgccagaaacatcggtaagtccgacgcatggattacacagtatcacattgatactttctccgcgtggctgcgacaacatctcatgggtaacgagacgattaaccaacaaccggccttcctggcgaggggaccatctagctcgatcgcgacattccagggatatgaaatcaatgggtacacattctacacgagagcccaagacatgaagagcacgagccagaacagtgctgttcgtatcgatgccatgggacacgatggtacaactggcacgtattacggtgccatcgaggacatatgggaacttgactatggacctctcaaggtccctctgttccggtgccaatgggttaggttgactggtggaggcgtaacgattgacagtgggatgacaacggttgaccttaacaaggttggatactcggacgaaccttttgtccttgccaatgatgtaacgcaagttttttacgtcaaggacatgtctagcaaaggaagaaagggcaaagggcctgacgagccgaagcgccacgtggttctcccaggaaaaagaaaaatcattggagtagagtacaagactgacgaggattacgatcagtttgatgggcaaccccctttcacggtgacgattgaccctagcatcctcctatcaaatgaagacaccctttactcgcgtagcgatcacaaggaaggaacaatagtgaggagaaagtacgtgcggtcaaccgtcaccgccgatgtattgctgtaa

SEQ ID NO: 3516 - DNA, 458 bp, Oryza sativa
  Clone ID: PAT_MRT4530_10484C.1
cgaagacacgacgcgacgcggggcagcgcgcggcgcgtggcacgacccggaggcgacggcgatggcacggctctctcctccggccgccaccttctctccggttccttgaaatcgactggtagggatattccagataatttatttgatggtagcaattttctgaggttcctgaagatttattgcttcagacagcatgatgaaagtcagggcatcattatagtgtctcctgctgctcagctcattccactcataaacctgtttagtttgtgatttatctgagttactaagaatgtgtttaaactgagttctcccacacagtgaaatgtgtgatatttgatactgtggacatcttttttttctttgtacccatcactgttttcctgtacttctaatctgcaatactgtcccggcaagcgttgaagcgtcgctgctcagattaaaaaaaaaaaaaaaaaaaa

SEQ ID NO: 3517 - DNA, 5721 bp, Oryza sativa
  Clone ID: PAT_MRT4530_10485C.1
atgatggatcggcaatggatgtacgctgaccggcggtccaaagagtttattgacggcatgcattattttttgagagtggccgaagctaacaagcagaagggttttatttgttgtccatgcaataagtgtaagaatcagaaggagtattctgcattcaggactattcattttcacttgtttgagtcgggattcatgccaagctataattgttggacatcccacggagagcaagggcttgaaatggaagaagatgaagtggaagacgacaatattccagactttgctcagtacgctggatttgaaggaaatcaaacgggcgaggaggatagagatgctgattataacgatgttgcggatgatcttggtcagatgttgcaggatgccaaggaggactgcgaaagtgaaaagggggcccataaattggacaagatattagaggaccacagaacatcgttatacccaggttgcgagcaggggcacaaaaagttggataccactctggagttcttgcaatggaaggcaaaaaatggtgttagtgacaaggcatttggcgatttattgaaacttgtcaagaacattcttccggagggaaacaaattgcccgatacaacgtacgaggctaagaagatagtctgccctctaggactggaagagtacgagaacctagaagcatgccctgtttgtaaagcactacaatacaagattagacgagatgatccaggtgaggttgacgggcagctaacgaagaagagaattcctgctaaggtgatgtggtatttccctataataccacggctaaggcgtttgttcaggaacaaggggaatgctagaatgatgcgttggcacgctgaagaacgtcaacaggacgggatgctgagacaccccgtagatggttcgcagtggcgaaacatcgacagaaaatttaaagactttggaaaagacgcacgaaacatacggtttggtttaagtacggatggcatgaatccttttggagagatgagcagcggccatagcacttggcctgttacgatgtgtatctacagcctccccccttggctatgcatgaagaggaagtacataatgatgccgattattattcaaggccccaagcaacctggtaacgacatcgatgtgttcctaagaccactggtcgaagatcttaaactattatggaagaaggaaggtgtccccgtgtgggacgaagacaaacaggaggaatttaacctactagcgctgctgttcgtaaccatcaacgattggcctgcacttagcaacctatccgggcagtccaacaaggggtacaaggcttgcactcactgtatggatgaaacagaaagtacggatcttaaacactgtaggaagattgtgtacatgggtcatcgtcgatttcttgctgcaaaccacccagtacggaagaaaggcaagcactttgaacataaggcagaccaccgtatgaagcctaaacatcgcagcggaaaaatagtatttgctatggtgttaccctattgggaattcttggacgtccgccacacaatcgacgtgatgcaccttactaagaacctttgcgtaaacctttttggcttcctaggtgtagatggaaagtcaaaagatacactggaagcacgtaatgatctgaagcatatggaacaacgcggcgaccttcacccggaaccaaaggagaaaggcagccattacttgagtccagccagctacactcttagcaaggcagagaaggaaagtttgtttcaatgctttgagagcatcaaggtaccatctgtatactccacgaatataaagcgaataataagcacgaaggagaagaagttcactaacctaaagtctcatgactgtcacgtgttgatgacacaactgctaccagttataataaggggtatcctcccagacaatgtccgggcaacaataacaaagctatgttctttcatgaacgcaatttcgcagagggtcatcgatccggataggttagaagcccttcagaatgatgtggtgcaatgtcttgtcagctttgagttgatatttccaccttcatttttcaatataatgatgcatctgctcctgcacttagtcaaagagatcggtattctcgggcctgtgttcctacacaacatgtttcctttcgagaggtacatgggcgttctgaagaagtatgttcgtaaccgtgctcgtccagaggcaagcatcgccaaggggtatggaacagaggaggtcattgaattctgcgtagaatttattgaagaccttcgcccaattggggtacctgaatcacgccatgaagggagactacggggaaaggggactctcggaaggaaagcaataatgacggtagacaacaatttattccgtaaagcccatttcacggttttacaacaatcttcattggtggctccttacatcgaggagcacttggctctagttcgctcgagaaacatcgataagtccgatgcatggattacacggcatcacattgatactttccccggatggctgcgacaacatctcatggataacgagacgattaaccagcaactggccttcctggcgaggggttcatctagctcgatcgcgacattccagggatatgagatcaatgggtacacattctacacaagagccgaagacatgaaaagcacgaaccagaatagtgttgttcgtatcgatgccatgggacacgatggtacaactggtacgtattacggtgccatcgaggagatatgggaacttgactatggacctctcaaggtccctctgttccggtgccaatgggttaggttgactggtggaggcgtaacgattgatgacagtgggatgacaaatgttgaccttaacaaggttggatactcggacgaaccttttgtccttgccaatgatgtaacgcatgttttttacgtgaaggacatgtctagcaaaggaaagaaggtcaaagggcctgacgagccgaagcgccacgtggttctcccaggcaaaagaaaaatcgtcggagtagaggacaaaactgacgaggattacgatcagtttgatgggcaaccccctttcacggtgacgattgaccctagcatcctcctatcaaatgaagacaccctttactcacatagcgatcacaaggaaggaacaatagtgaggagaaaagaagacgtcatcgtcgtcgtccctcaagccgaagtgatactgtacgatacaatcgcagagggaagcagccagtactggaacgaagaagaggggaacgaggatccaaaccagtacttgaacaaggaggggaacgtggagagggatgcagaggggaacgaggaggggaacgtggagagggatgcggaggggaacgaggagggcaacgtggagagggatgcggaggggaacgaggaggcggctagtggaagtcatccctccactggacagaagagggcacgcggacaacgagagaaagagaagctgtggaccacaatgctcgagacgttcacgctccctgcgggtacggagaacatagtgaaacagtggactcttaagaaaatggcagaacagttcaagagcttcaagggacatctgtacaagaaatacatcctgaaggacgagttcgttgctgacaagacagggcaacaagggcaagcgatgatggtcaaaaacaaggaaaacgctgccaagaagaagtaccatcaccacttggggttaggtggctatagcgtcgcaatactgaagtgggaggagatggaggcaagaatgattgagaggggtatcgaaccggccaccgctaaatggccggatcgatcgaagttctggtactatgctcacggtggaacgcttaacccagttgatggctccctggtcttcagcgatcagatacgtgaggctgccagtcgactaacggacatagtggaagcctcttctcagtgcacgttccgacccgacagagagaaggacgagctgtcactcgccctacagattcccgagcatccaagacgaacacgagtggcgtcgggaatggccatcccaacggacatttcagggacttaccactgcaggccgattccagcaggatactcgagggtcgaagttgagctggtggaagccgtgtacgaggacctcgagttggactacctaggaggagatggagaagtgaagaggcaactcaagcctcggagtcctgaaaagaagatacctattgacccgagcgtgaagaatttcttcaagggaatgtccaccacaaacaaggaggccttaaagctaacggactatgaccgaacacttaggaaagcctattacaagaagtccaaaccagttcctcagcttggagaacaaccaaaccaagtggtcgagccgttggcgaccggcgaagactttggcataacgtatttcatttcggacaccggtctaactgttgctcagttggttggaggcgcaccaatcccgaaggcggaagtggcatacaagtttgaactcggtaaaccgcttgtcaggcctgagcagctgcagtccctaccaacacaaatgtacaaattccatgaacggtacatggaaatgagcgccaagggtagagagatgttcggagcgaggatcagaaaccccgacttcttggaaggagaagatgttctaaggatccatttcaaggatgtcttcgatcggtatcatctggacgccctcgacgtctctcttctgagcgcatggattttagtcactgtatacgactcaatgaataaagaggagaaggtttttgacaagtgtgcaaagcaggaccagggaactaacttatgcggctactacgtatgcgagtatgcccactgcctatcaaaccaaatatacaccacacgagagctcgatcgtattcacatgaggaaaaatctcccatacaaggattttatcacggctgttcaagaacaactgatggggttcatcaacgaagaagaccttattcccgatgaattacgggaccctcttggactgcttcgtgtagcaggagggttgcgtaatacccctgaccctaaaggttccacaaccctgactaggatcgtccttggagccaagaagctccgccagacgatcgggatgggcaccccgcaggaccgagcgcctacccctgatgagaacgatcgggtgctgcacttcctacggcaccacctttgcgccacgctcaagaatgagtacatgggattgcggagcccactcactctttggaccatactcaagaagcggttcgagaagttgaagtacaccatcctgccccaagcagagcaggactgggctcgcctgaggttcgccgacttcaagagcgtctccgagtacaactccacgctgcaccagatctgtactaacctctccctctgcgacaaggttgtcacggatacggagaagatcgagaagacactctccaccttccaccctagcactgtgcagagcgcttgtaactacaggcaagcgtcatacaaggagtatgacgagatgatcgacatcatgcaggtgtctgaatctcatgacgaggttctccgcaagaactttgtctcccaaccgcctggcaagagtgttggccttgaagtcaatgctagcagttacaaggtccgcaagcctgtccagaggaagaggggcaagcgtggtgggaagaaggtagctgagaagtcagagggaaaagctccagctgcccagggagcacagggaggcaagggcaagaaggaagccaagccacctcgcaatgacaaggcatatggccagcaggactag

SEQ ID NO: 3518 - DNA, 201 bp, Oryza sativa
  Clone ID: PAT_MRT4530_10486C.1
atggcctatggaaatagtgttcggaagttgggaaggagaatgagggcctgtttagagaagattaagattctgagaagcagctggttggtagccagcctattagaatctagaaaagttgggttttccagcttcaggtttctaggttatttccgaatctggaaaaaaactggactgtttggaggagcttctgattttggttga

SEQ ID NO: 3519 - DNA, 3528 bp, Oryza sativa
  Clone ID: PAT_MRT4530_10487C.1
atggaagaagatgaagtggaagacgacaatattccggactttgctcagtacgctggatttgaaggaaatcaaacgggcgaggaggaaagggatgctgatggcaacaacgttgcggatgatcttggtcagatgttgcaggacgcaaaggaggattgcgaaagtgaaaaggggacccataaattggacaagatgttagaggaccacagaacatcgttgtacccaggttgcgagcaggggcacataaagttggataccactctggagttcttgcaatggaaggcaaaaaatggccccaagcaacttggtaacgacattgatgtgtacctaagaccactggtcgaagatcttaaactgttgtggaagaaggaaggtgtccccgtatgggatgaggacaaacaagagaagtttaacctacgagcgctgctgttcgtaaccatcaacgattggcctacacttagcaacctatccgggcagtccaacaagggtgacctttacccggaaccaaagttgaaaggaagccattacttgagtccagccagctacactcttagcaaggcagagaaggaaagtatgtttgaatgcttggagagcatcaagctgctaccagttgtaataaggggtatcctcccagacaatgtccgggcaacaataacaaagctatgtgctttcatgaatgcaatttcgcagaaggtcatcaatcctgatagattagaagccctgcagaatgatgtggtgcaatgtcttgtcagctttgagttgatatttccaccttcatttttcaatataatgacgcatctgctttgtcaccttgtcaaagagatcggtattcttggtcctgtgtacctacacaacatgtttcctttcgagaggtatatgggcgttctgaagaagtatgttcgtaaccgtgctcgtccagaggcaagcatcgccaaggggtatggaatagacgaggtcattgaattctgcgtagaatttatcgaagaccttcgcccaatcggggtacctgaatcacgccatgaagggagactatggggaaaggggactctcggaaggaaagcaataatgacggtagacaacaatttattccgtaaagcccatttcacggttctgcaacaatcttcattggtggctccctacatcgaggagcacttggctctagttcgcgccagaaatatcggtaagtccgatgcatggattacaaggcatcacattaatactttctccacgtggctgcgacaacatctcatgggtaacgagacgattaaccaacaactggccttcctggcgaggggaccatctggctcgatcgcgacattccagggatatgtaatcaatgggtacacattctacacgagggcccaagacatgaagagcatgaaccagaacagtgctgttcgtatcgatgccatgggacacgatggtacaactggcacgtattacggtgccatcgaggacatatggaaacttgactatggacctctcaaggtccctctgttccggtgccaatgggttaggttgactggtggaggcgtaacgattgatgacagtgggatgacaacggttgaccttaacaaggttggatactcggacgaaccttttgtccttgccaatgatgtaacccaagttttttacgtcaaggacatgtctagcaaaggaaaaaaggccaaagggcttaacgagccgaagcgccacgtggttctcccaggaaaaagaaaaatcgtcggagtagaggacaagactgacgaggattacgatcagtttgatgggcaaccccctttcacagtgacgattgaccttagcatcctcctatcaaatgaagacaccccttactcacgtagcgatcacaaggaaggaacaatagtgaggagaaagtacgtgcggtcaaccgtcaccgccgatggcaaccccgcgccgacaccgccgtcgtctctcgccgtcgcttggcagtcctcgccgcctccgctgcagacgccaccgccgcatctcttgggtgagagccgtcgctgcctttctctctctctcgatctcgatctcgatatctctctctctccacggccgacgaccgacttcgacgcggctgccgccgccgccgacgccatcgccactaccactccgccgcccctgcctcgagctcaccacgccgccgcgtcacgccgccgggccgctacgccacgccgccgcgacgccacgccgtcgccagtgccactccgccgccaccacctcgagctcgcgatgccacgccgcggccgccacacccccacgccgccgggccccgacgccgccgccgcgcccacacgccaccgtgcccccacgccgccgccgcgcccgcacgccgccgggccggcccacggcgccccgacaccgccgccgcgccaccacgccactgccgcgcacgcccaatattgccgaatgttaacgaacgtgattgaaaccggttgggttgtgagggacaacgtgcctgtcagcacggtgtactggcgcagaacaagggcacgcggggataatgacagctttgtcccggactcagagaaagagatgctgtggaccacaatgctcgagatgttcacgctacccgcgggtacggagaacatagtgaaacagtggactctgaagaaaatggcagaacagttccagagcttcaagggagatctctacaagaaatacatcctgaagggactaacactgaacttcgacgtattcccaaagctaagggatcattgggacgagttcgttgcttacaagacaaggcaacaagggcaagcgatgatggccagaaacaaagacaatgccgccaagaagaagtaccatcaccacttgggtggaacgcttaacccagttgatggctcccttgtcttcagcgatcagatacgcgaggctgccagtcgactaacggacacagtggtagcctcttctcagggcacattccgacccgatagagagaaggatgagctgtcactcgccctacagactcccgagcatccaggacgaacacgagggaaaggcgtgattccctggaagattggatttaaggagaacatccacacgtacaggagtcggatgaggagcaagagagataccgaggtgaagattgcagatcttgagtacagggtatcaagctacgagctcagcatacaagaggaggtggcaaggaaggtggatgaacgtatggccgcacatcggtcccaggatccccagccgtacattcatcctgcaatggtcagcccatcaggcaatcatagcagctgcgcctcaacggggcaggtcggatcacagagcatggacgccatgcaaacccaggacgaaaccacctgccccgttgatgagatcacgcagcggacaccatgtgagctgcatattcccttcaagaacttatcaatcaaggttgcgtcgggaatggccatcccaacggactcttccgggacttaccactgcaggccgattccagcaggatactcaagggtcgaagttgagctggtggaagccgcgtatgaggacctcgagttggactacccaggaggagacggttag

SEQ ID NO: 3520 - DNA, 678 bp, Oryza sativa
  Clone ID: PAT_MRT4530_10488C.1
atggcggcgaatatggaggcagcagcggcggcgcatcacgcgtcggcgccacaacggggagatggcggcggcagatggtgcggcggcggcggaggaagggcggtgccccccctcggcgctccctcggcggcgtcggtggcgcccaacggcggcgtcgatagcggcgaactggcggcggtgggcggcgaaaagggcggcggcgacgaaatcgtgggggcgaataatgctgagaataagaaagaattcaagggaaattcttcgaataatcctaagaatctgactggaaagcgcaaacgcaacaacaacaggcgcaaattcaagggtcgaaagaaaggaaaagggaaggataaggcaccacaacctcgtagcaatggcaacaagcattgcaacatgtgtggatctgacactcatgtcgctaaagactgccgcatcccgaaacatcttgttctcttgtacgaaaaatccctcaaggacaaaaagtcttctgaaaacccaagatttgaagcccacttcaatcttacacataaagagcgccctgaggttgcaagttctcaccaggctcctattgaaccagagagcaacctcaatgttctcccagaagatgtcgctccactctctgcgatggacgatatgttcatcgaatactgctcaacggatccacttggagatttgcaatga

SEQ ID NO: 3521 - DNA, 189 bp, Oryza sativa
  Clone ID: PAT_MRT4530_10489C.1
acaaacagattaaacgcacgccgctgccatcaagaacccacaaaaccggccgcaaagaaacctccttttatttctgcaaacgaaccttcgatttcagatgacgcctgcagccgacgcaacccagaaaaaaagggatttggtgtccgattcgagggtttggtggtgcttttgccgcaaggagggagttgg

SEQ ID NO: 3522 - DNA, 725 bp, Oryza sativa
  Clone ID: PAT_MRT4530_1048C.1
ggtgccatgtgtaaggggggtcatgaacattgtatggtggggggtgtcttgagccctagctctccatgtcagatatcctataaagtgttgtgtccaaacccgtcatatggatgtaggtgacggtcatcataggggtgatcaggagagtttgctcttgtcagtatgtgtttgtgcttgtccgccaaggccccaatggtgagaatcgaggcccagtccacgatagtcggtcagaggtagcacgagtcaaggcgttggatatatcagcgtatccatgtgtcaaatcagcgttgtcaagccgtccgtcagggtgatgtgtcgaacaataggtagcaagtccgaagtgagtcgtgtcctgtgtgtcaatgaagatgggtcctgtgagtgtcggagaaccgtcgccgatgcgatcctgtgacgtccgtcggtcgagtcgtcgttgggtgaggtgccgtcaagcgtccacagccgtcgggggtccagcgtcgttggtgtcgtgtcggtccgtcgttcagccggcgccgcctccgtgcgcctccgtcgttcctcctcgtcgtcatcatcgtagttgtgaccgtagttgctctcccggcgcggcggaggcgctcgtcgtcggagtcagagtcagagtcgtcatcgacgtcgtccggcggccgctctagaggatccaagcttacgtacgcgtgcatgcgacgtcatagctcgttatagggtcacctaatcatcgg

SEQ ID NO: 3523 - DNA, 2136 bp, Oryza sativa
  Clone ID: PAT_MRT4530_10490C.1
atggagagcaaggggttgaaatggaagaagatgaactggaagacgacaatattccggactttgctcagtacgctggatttgaagaaaattaaacgggcgaggaggaaagggatgctgatggagtacgagaacctagaagcatgccctatttgcaaagcactacgatacaagattagacgagacgatccaggagaagttgacgggcagctaacaaagaagagaattcctgctaaggtgatgtggtatttccctataataccacgactaaggtgtttgttcaggaacaagggaaatgctagaatgatgcgatggcacgctgaagagcgtcaacaggacgggatgctgagacaccccgccgatggttcgcagtgcaacctatccgggcagtccaacaagggttacaaggcttgcactcactgtatggatgaaatagaaagtatgtatcttaagcactgtaggaaggttgtgtccatgggtcatcgtcgatttcttgctgcaaaccacctagtacggaagaaaggcaagcactttgaatataaggcagaccaccgtacgaagcctaaacattgcagcgggaaaacggtgtttgctatggtgaaagatcttaaagtagtgtttggaaaggggcctggcagccagcctatagagagcgaagatggtgtatatggaaagtcgaaagatacactggaagcacgtaatgatctgaggcatatggaacaacgcggcgaccttcacccggaaccaaaggagaaaggcaaccattacttgagtccagccagctacactcttagcaaggcagagaaggaaagtatgtttgaatgcttggagagcatcaaggtaccgtctggatactccacgaatataaagcgaataataagcacgaaggagaagaagttcacaaacctaaagtctcatgactgtcacgtgttgatgacacaactgctaccagttataataaggggtatcctcccagacaatgtccgggcaacaataacaaagctatgttctttcatgaacgcaattccgcagaagatcggtattctcgggcctgtgtacctacacaacatgtttcctttcgagaggtacatgggcgttctgaagaagtatgtttgtaaccgtgctcgttcagaggcaagcatcgccaaggggtatggaacagaggaggtcattgaattctacatagaatttattgaagaccttcgcccaatcggtgtacctgaatcacgccatgaagggagactacggggaaagactacggggaaaggggactctcggaaggaaagcaataatgacggtggacaacaatttattcctaaagcccatttcacggttctgcaacaatcttcattggtggcttcttacatcgaggagcacttggctctagtccgcgccacaaacatcgataagtccgatgcatggattacatggcatcacattgatacttttcccgcgtggctgcgacaacatctcatgggtaacgaggcgattaaccagcaactggccttcctggcgaggggtccatctggcttgattgtgacattccagggatatgagatcaatgggtacacattctacacgagagcccaagacatgaagagcacgaaccagaacagtgttatttgtatcgatgccatgggacacgatggtacaactggcacgtattacggtgccatcgaggagatatgggaacttgactatggacctctcaaggtccctctattccggtgccaatgggttaggttgactggtagaggcgtaacgattgatgacagtgggatgacaacggttgaccttaacaaggttggatactcggacgaatcttttatccttgccaatgatgtaacgcaagttttttacgtgaaggacatgtctagcaaaggaaagaagggcaaagggcctaacgagccgaagcgccacgtggttctcccaggcaaaagaaaaatcgtcggagtagaggacaagactgacgaggattacgatcagtttgatgggcaacccactttcacggtgacgattgaccctagcatcctcctatcaaatgaagacaccccttactcacgtagcgatcacaaggaaggaacagtagtgaggagaaagtacgtgcggacaaccgtcaccgccgatgtattgccgtaa

SEQ ID NO: 3524 - DNA, 3312 bp, Oryza sativa
  Clone ID: PAT_MRT4530_10491C.1
ctttccaaataatgcgaaaggcaagcactttgaacataaggcggaccaccgtacgaagcctaaacatcgcagcgggaaaatagtgtttgctatggtgaaagatcttaaagtagtgtttggaatgggacctggcagccaacctatagagagcgaagatggtcacgcagcgatgtggaaaaagaactctattttttgggagttaccctattgggaattcttggacgtccgctacgcaatcgatgtgatgcacatcactaagaacctttgcgtaaacctgcttggcttcctaggtgtatatggaaagtcgaaagatacacttgaagcacgtaatgatctgaagcatatggaacaacacggcgaccttcacctggaaccaaaggagaaatgaagccattacttgagtccagccagctactctcttagcaaggcagagaaagaaagtatatttgaatgcttggagagcatcaaggtatagtctggatactccacgaacataaagcgaataataagcacgaaggagaaaaatttcgcaaacctaaagtctcatgactgtcatgtgttgatgacacaactgttaccgctaccagttattattcggggtatccttccagacaatatccgggcaacaataacaaagctatgtgctttcatgaacgcaatttcgcagaaggtcatcgatccagatagattagaagccctttaaaatgatgtggtgcaatgtcttgtcagctttgagtcgatatttccaccttcatttttcaatataatgacgcatctgctttgtcaccttgtcaaagagatcggtattctcgggcctgtgtacctaaacaacatgtttcctttcgagaggtacatgggcgttctgaagaagtatgttcataaccgtgcttgtccagaggcaagcatcgccaaggggtatggaacagagaaggtcattgaattctgcgtagaatttatcgaagaccttcgcccaatcggtgtatctgaatcacgccatgaagggatactatggggaaaggggactttcggaaggaaagcaataatgacggtagataacaatttattccgtaaagcccatttcacggttctgcaacaatcttcattggtggctccttacatcgaggagcacttggctcttgttcacgccagaaacatcagtaagtccgatgcatggattacacggcatcaaattgatactttccccgcatggttgcgacaacatctcatgggtaacgaggcgattaactgacaactggccttcctggcgaggggaccatctggctcgatcgcgacattctagggatatgagatcaatgggtacatattctatacaagagcccaagacatgaagagcacgaaccagaacagtgctattcgtatcgatgccatgggacacgatggtacaactggcacatattacggtgccatcaaggacatatgggaacttgactatggacctctcaaggtccctctgttccagtgccaatgggttaggttgactggtggaggcgtaacgattgatgacagtgggatgacaacggttgaccttaacaaggttggatactcggacgaaccttttgtccttgccaatgatgtaacgcaagttttttacgtgaaggacatgtctagcaaaggaaagaagggtaaagggcctgacgagccgaagcgccacgtggttcttctaggcaaaagaaaaatcgtcagagtagaggacaagactgacgaggattacgatcagtttgatgggcaaccccctttcacggtgacgattgaccctagcatcctcctatcaaatgaagacaccccttactcacgtagcgatcacaaggaaggaacactagtgaggagaaagtatgtgcggtcaaccgtcaccgccgatgtattgccatatttcttgtatgaacagatggctgatcgcgatgacgaacagatactatacgatacaattgcagagggaagcaaccagtactggaacgaagaagaggggaacgaggatccaaaacagtacttgaatgaggaggggaacgtggagagggatgcggaggggaacgaggaggggaacaaggaggaggaggctagtggaagtcaaccctccgctggacagaagagggcacgcggacaacgaggtgccgcgaagaagatagagggtcggcacatcataactgtggtggacgaagacgaccgacctagtgccccggcagaagtagccaagaattttgtacgacacggcggttgggttgtgagggataacgtgcctgtcagcaaggtgtactggcgcagaacaagggcacgcggggattatgacagctttgtcccggaatcagagaaagagatgctgtggaccacaatgctcgagacgtttacgctccctgcgggtacggagaacatagtgaaacagtggactcttaagaaaatggcagaacagttcgagagcttcaagggagatctctacaagaaatacatcctgaagtggctgacaccgaacttcgacgtattcccaaagctaagggatcattgggacgagttcgttgcttacaagatagggcaacaagggcgagcgatgatggacaaaaacaaagaaaatgccgccaagaagaagtaccatcaccacctagggtcaggcggctatagcgtcgcaatgccgaaatgggaggagatggaagcaagcttgattgagaggggtattgaaccggtcaccgctaaatggccagatcgatcaaagttctggtactatgctcacggtggaacgcttaacccagttgatggctccctggtgttcagcgatcagatacgcgaggctgccagttgactaacggacgtagtggaagcctcttctcagggcacgttctgacccgatagagagaaggacaagctgttactcgccctgcagactcccgagcatccaggacgaacacgagggaaaggcgttattccttggaagattggattcaaggaggacatccacatgtacaggagtcgcctgaggagcaagagagataccgaggcgaagattgcagatcttgagtacagggtatcgagctacgagctcagcatgcaagaggaggaggcaaggaaggtggatgaactcatggccgcacatcggtgctaggatccccaaccgtacattcctcctgtaattgttagcccctcaggcaatcgtagcatctgcgcctcaacggggcaggtaggatcacatagcatggacgccatgcaaacttaggacgaaaccacctgccccgttgatgagatcacgcagcggacaccaggtgagctgcatattcccttcaagaacttatcaatagaggtatgctc

SEQ ID NO: 3525 - DNA, 3281 bp, Oryza sativa
  Clone ID: PAT_MRT4530_10492C.1
atggatcggcaatggatgtacgctgaccggcggtccaaagagtttattgacggcgtgcattattttttgagagtggccgaagctaacaagcagaagggttttatttgttgtccatgcaaaaagtgtaaaaatcagaacgagtattctgcatccaggactattcatttccacttgtttgagtcggggttcatgccaagctataattgttggacatcccacagagagcaaggggttgaaatggaagaagacgaagtggaagacgataatattccagactttgctcagtacgctggatttgaaggaaatcaaacgggcgaggaggacaaagatgctgattataacgacattgcggatgatcttggtcagatgttgcaggatgccaaggaggactgcgaaagtgaaaagggggcccataaattggacaaatgttagaggaccatagaacgtcgttgtacccaggttgcgagcaggggcacaaaaagttagataccacactgcaatggaaggcaaaaaattgtgttagtgacaaggcatttggcgatttattgaaactcatcaagaacattcttccagagggaaacaaattgcccgagacaacgtacaaggctaagaagatagtctgccctctaggactggaaattcagaagattcacgcatgtccgaatgattgtatcctatatcgcggtgaggagtacgagaacctagaagcatgccctgtttgtaaagcactacgatacaagattagacgagatgatccaaggaaggttgacgggcagctaatgaagaagaaaattcctgctaaggtgatgtggtatttccctataataccacggctaaggcgtttgttcaggaacaaggggaatgctagaatgatgcgttggcacgctgaagaacgtcaacaggacaagatgctgagacaccctgcagatggttcgtagtggcgaaacattgacagaaaatttaaagactttggaaaggacgcacgaaacatacggtttggtttaagtacggatggcatgaatgcttttggagagatgagcagcggccatagcacttggcccgttacgatgtgtatctacaaccttccccttggctatgcatgaagaggaagtacataatgatgccgattattattcaaggccccaagcaacctggtaacgacatcgatgtgttcctaagaccactgatcgaagatcttaaactgttgtggaagaaggaagctgtccccatgtgggacgagaacaaacaggaggagtttaacctacgagcgctgctgttcgtaaccatcaatgattggcctgcacttagcaacctatccgggcagtcaaacagaaagtacgtatcttaagcactgtaggaaggttgtgtacatgggtcatcgtcgatttcttgctgcaaaaaacccagtacggaagaaacgcaagcactttgaacataaggcggaccaccgtacgaagcttaaacatcgcaacaggaaaacagtgtttgctatggtgaaagatcttaaagtagtgtttggaaaggggcctagcagccagcctatagagtgcgaagatggtcacgcggcgatgtggaaaaaaaactccatattttgagagttaccctattgggaattcttggacgtccgcctcgcaatcgacgtgatgcacctcactaagaacctttgcgtaaaccttcttggcttcctaggtgtatatggaaagtcgaaagaaacactagaagcacgtaatgttctgaagcatatggaacaacgcggcgaccttcacccggaaccaaaggagaaaggcagccattacttgagtccagctagctacactcttagcaaggcagagaacgaaagtatgtttcaatgcttggagagcatcaaggtaccatctggatactccacgaatataaagcgaataataagcacgaaggagaagaagttcacaaacctaaagtctcatgactgtcacgtgttgatgacacagctgctaccagttataataaggggtatcctcccagacaatgtccgggcaacaataacaaagctatgttctttcatgaacgcaatttcgcagaaggtcatcgatccggataggttagaagcccttcagaatgatgtggtgcaatgtcttgtcagctttgggttgatatttccaccttcatttttcaatataatgacgcatctgctttgtcacctagtgaaagagatcggtattctcgggcctgtgttcctacacaacatgtttcctttcgagaggtacatgggcgttctaaagaagtatgttcgtaaccgtgctcgtccagaggcaagcatcgccaaggggtatggaacagaggaggtcattgaattctgtgtagaatttattgaagaccttcgcccaatcggggtacctaaatcacgccatgaagggagactacggggaaaggggactctcggaaggaaagcaataatgatggtagacaacaatttattccgtaaagcccattttacggttttacaacaatcttcattggtggctccttacatcgaggagcacttggctctagttcgcgctagaaatatcggtaagtccgatgcatggattacacggcatcacattgatactttcaccgcatggctgcgacaacatctcatgggtaacgagacgattaaccagcaactggccttcctagcgaggggtccatctggctcgatcgcgacattccagggatatgagatcaatgggtacacattctacacaagagcccaagacatgaagagcacgaaccagaacagtgctgttcgtatcgataccatgggacacgatggtacaactggcacgtattacggtgccatcgaggagatatgggaacttgactatggacctctcaaggtccctctgttccggtgccaatggattaggctgactggtggaggcgtaacgattgatgacagtgggatgacaacggttgaccttaacaaggttggatactcggacgaaccttttgtccttgccaatgatgtaacacaagttttttacgtgaaggacatgtctagcaaaggaaagaagggcaaagggcctgacgagccgaagcgccacgtggttctcccaggcaaaagaaaaatcgtcgtagtagaggacaagactgacaaggattacgatcagtttgatgggcaaccccctttcacggtgacgattgacccaagcatcctcctatcaaatgaagacaccccttactcacgtagcgatcacaaggaaggaacaatagtgaggagaaagtacgtgcggacaaccgtcaccgccgatgtattgccg

SEQ ID NO: 3526 - DNA, 267 bp, Oryza sativa
  Clone ID: PAT_MRT4530_10493C.1
atggaagaactcaccgagatatgccgagatgaaggattgcggccggaaaaactcctcggcggcgaagaacagagcagcgcgggggcggcggtgctcggcttggtgcggcgaggggtatttagggcggaggatagatggagaggtgtggagtcgatcgcgcacaaggtgttcaaccgacgggcgatgaaggagtggatgagctcggacaccgtcattgccatggatgagctcaatctttggatagggttggggcggcagaggctgtga

SEQ ID NO: 3527 - DNA, 2805 bp, Oryza sativa
  Clone ID: PAT_MRT4530_10494C.1
atgttagaggaccacaaaacgtcgttgtacccaggttgcgagcaggggcacaaaaagttggataccactctagagttcatgcaatggaaggcaaaaaatggtgttagtgacaaggcatttggcgatttattgaaactcgtcaagaacattcttccggagggaaacaaattgcccgagacaacgtatgaggctaagaagatagtctgccctctaggactggaagttcagaagattcacgcatgtccgaatgattgtatcctatatcacagtgaggagtacgagaacctagaagcatgccctgtttgtaaagcactacgatacaagattagacgagatgatccaggtgaggttgacgggcagctaacgaagaagagaattcctgctaaggtgatgaacaaggggaatgctagaatgatgcgttggcacgctgaagaacgtcaacaggacgggatgctgagacaccccgcggatggttcgcagtggcgaaacatcgacagaaaatttaaagactttggaaaggacgcacgaaacatacggtttggtttaagtacggatggcatgaatccttttggagagatgagcagcggccatagcacttggcctgttacgatgtgtatttacaacctccccccttggctatgcatgaagaggaagtacataatgatgccgattattattcaaggccccaagcaacctggtaacgacatcgatgtgttcctaagaccactggtcgaagatcttaaactgttgtggaagaaggaaggtgtccccgtgtgggacgaggacaaacaggaggagtttaacctacgagcgctgctgttcgtaaccatcaacgattggcctgcacttagcaacctatccgggcagtccaacaaggggtacaaggcttgcactcactgtatggatgaaacaaaaacaaaccacccggtacggaagaaaggaaagcactttgaacatacggcggaccatcgtacgaagcctaaacatcgcagcgggaaaacagtgtttgctatggttaaagatcttaaagtagtgtttggaaaggggcctggcagccagcctatagagagcgaagatggtcacgcggcgatgtggaaaaaaaactccatattttgggagttaccctattgggaattcttggatgtccgccacgcaatcgacgtgatgcacctcactaagaacctttgcgtaaaccttcttggcttcctaggtgtatatggaaagtcgaaagatacactggaagcacgtaatgatctgaagcatatggaacaacgcggcgaccttcacccggaaccacaggagaaaggcagccattacttgagtccagccagctacaatcttagcaaggcagagaagaaaagtatgtttcaatgcttggagagcatcaaggtaccgtctggatactccacgaatataaagcgaataataagcacgaaggagaagaagttcacaaacctaaagtcttatgactgtcacgtgttgatgacacagctgctaccagttataataaggggtatcctcccagacaatgtccgggcaacaataacaaggctatgttctttcatgaacgcaatttcgcagaaggtcatcgatccggataggttagaagcccttcagaatgatgtggtgcaatgtcttgtcagctttgagttgatatttccaccttcatttttcaatataatgacgcatctgctttgtcacctagtgaaagagatcggtattctcgggcctgtgttcctacacaacatgtttcctttcgagaggtacatgggcgttctgaagaagtatgttcgtaaccgtgctcgtccagaggcaagcatcgccaaggggtatggaacagaggaggtcattgaattctgcgtagaatttattgaagaccttcgcccaatcggggtacctgaatcacgccatgaagggagactacggggaaaggggactctcggaaggaaagcaataatgacggtagacaacaatttattccgtaaagcccatttcacggttttacaacaatcttcattggtggctccttacatcgaggagcacttggctctagttcgcgctagaaacatcggtaagtccgatgcatggattacacggcatcacattgatactttccccgcatggctgcgacaatatctcatgggtaacgagacgattaaccagcaactggccttcctggcgaggggtccatctggctcgatcgcgacattccagcgatatgagattaatgggtatacattctacacaagagcccaagacatgaagagcacgaaccagaacagtgctgttcgtatcgatgccatgggacacgatggtacaactggcacgtattacggtgccatcgaggagatatgggaacttgactatggacctctcaaggtccctctgttccggtgccaatgggttaggttgactggtggaggcgtaacgattgatgacagtgggatgacaacggttgaccttaacaaggttggatactcggacgaaccttttgtccttgccaatgatgtaacgcaagttttttacgtgaaggacatgtctagcaaaggaaagaagggcaaagggcctgacgagccgaagcgccacgtggttctcccaggcaaaagaaaaatcgtcggagtagaggacaagactgacgaggattacgatcagtttgatgggcaaccccctttcacggtgatggttgaccctagcatcctcctatcaaacgaagacaccccttactcacgtagcgatcacaaggaaggaacaatagtgaggagaaagtacgtgcggacaaccgtcaccgccgatctattgccgtaa

SEQ ID NO: 3528 - DNA, 474 bp, Oryza sativa
  Clone ID: PAT_MRT4530_10495C.1
atgcagacgataaggtggtcgtcgtcgcccgcgtcgctctgtttcttcttgctcatgtctctccttgtccatagctcgcatggcgcacgcccgtctccacgcgagcttcagggatggtttgcggcggcggcgggatcatcgtccgcggagaagcagttggtggatccacggatcatcgccgctggcgcagcaggccgtgtcgcggatgtcgtcgcggcgccggtgatgacggtgacgacaccggctggcgccgtgggcgacgatcggcgtagacgcggcggtgatgacgacgtgcagcttcttccgcggcgggggaggagcgtcggcgtcgcgctggtgatggcgcgggcggcgcgtcgcgctctggcggcggctgcggcggcggcggcgtcctcctccgccacggacggcactggtccttcttgccattccaacaacgtgcacatcacctgttcgccgccattgcagaactga

SEQ ID NO: 3529 - DNA, 526 bp, Oryza sativa
  Clone ID: PAT_MRT4530_10496C.1
cggcagcttgttctgcatcacgggcgcttccttcagaaggaggagctgcctcaacctcaacaacgtgatttcaggcgccatcatgctcccgaagatgtggctcaagaacctcatcatgctcgcctacgtctcggcgatcaggctcgtctcttcggtcgcactgacggcgccgctagtctgggccggcatggccgatatgtgcttccacatggcgggcagcagcctgttgaacatgaaccgggggggtgagtatagacctcgcacccggctcgggagagggccgctcctggggaagttgaaggatatggcttgcgctggggtcgggagaggagggaaggaggggaaggggaggatcaccggaatcttcgccagcggggggaggaggggaaagtgggtgtgggagggggggattgctggcggcgtcgccctcgcacgaatcgcggggaaagggaggagaggaggggggccgttagaggttgaccaccacgacatgcataaatatgctccggctgtgttcgggaggtga

SEQ ID NO: 3530 - DNA, 530 bp, Oryza sativa
  unsure (1)..(530): unsure at all n locations
  Clone ID: PAT_MRT4530_10497C.1
ggaaacatgggcagtggtgcatccggttgatattctggcctatataaacttttcaaatgcaatcaaaatacatgcccacgcaatataagtttttcaaacatggcaatataagtttttcgaagtagtacttttgaaaaacatggcaggtgtcatccggttgatattccgcctatataagtttttcaaacgcaatctaaaatacatggccgcacaaggcgcgggctaccttcctagttttggataaaaaaaaggacagaatgaaaatacaccaaggaatcataacacatatacatccggcccagcctgcagttgggcttaaggtctgaacggncaccttgctcaacattcccttcatcgtcttcccatggatgcctaaagccctgctgatgcaacgccatggcgccatgatgcctcgtcttgagagctatggatatcataggattattttttcgagaatgtgctggatcttttcccaattttctccattcttcatattcttgcagtgggagatcatcagaactttgagagtc

SEQ ID NO: 3531 - DNA, 300 bp, Oryza sativa
  unsure (1)..(300): unsure at all n locations
  Clone ID: PAT_MRT4530_10498C.1
gcgtcttcgtactcgtctctntccgtgccctgctncgccgncgctcncgcgttcgtctccnccgcancgtcgcgcangagggngtcatctcgngccacatngngcaggctgtatcatgtcgggtcggtgctggagctcttnntctgngcatngnatgcagcttatggacagatgcccgtgcangaccnttngggaggnannatgcttntacactnctcantgagacttgtgctgggnagatgtncccgngctgtctcgcgnctngagctncgtgatcntgaggtangactgngacnccgc

SEQ ID NO: 3532 - DNA, 346 bp, Oryza sativa
  unsure (1)..(346): unsure at all n locations
  Clone ID: PAT_MRT4530_10499C.1
gtgttgacccgaaacggagggaggacaaacaaattatatccattgtatattacagctcaagtttatttattaatgatccaaaataagcaagcatcatggtgtacgtacgtgtaccctcgcacacatacgagggagtagtatactatactcgtatataaataccggatatgtattttgtacttcaatatatccgacggtggagaagcgtccgatgcaacaatcggacgggtaggatcaaaaggaggtgcgcgggttgagcgccnagtcttctttttggcaacttcaactgctgctcttcttcttcctcatgaacaatgctccaaccagaggaatcaacgatttcttc

SEQ ID NO: 3533 - DNA, 3240 bp, Oryza sativa
  Clone ID: PAT_MRT4530_1049C.1
atgtcatcccctctctctccctttcttcttcctcacttaactctttctctcattctcttctctccccgtcggctcgccaccgggtgtacgatccgagttaactgttgctgcggggggccgtggcagtgcagcgggggcggtagtctctacataagcctcgccaagtggagagaggagatgagaggagagcagcggcagcgccgcgcacgccggcggccggcatgcatggcgcggcgcggggaagggcgatgggcagcaacgcgggggcaggctggcggtcgatgcgcacgcggtgcgcggggaggtggaggggatgggggagagacgggcgccggcggccatggcggagaggcgagccatggccggaagcgtcggggggaggacgggggatggcggacaaaggcgcgcgtcgggagctggagcggcgtcgggatgaggacggggaggagcaagagaggcggaagagggagacagcggcggcggaggaggaggccgttcccgcgaccgccgctcgccatttcctccgcgcccaccttctgtcccggcggcctcccgcctcagcgtcacgcccgtcacagcctaccggttgcctgctgcacagaggggcgggcggcaaacggtggacgacgccgcgtgggagcgggcggtgggcgtcggacggcgatgcgcgggggcgggcggtcccgcgccttgagacgctcaaccaggacgtccaccacgtccccgatgctaaccacctgctggtgcctagcggcggtgccgccattgttggcatggtggagcagctgcgtgggcgacgcgaacgccgccatcaccggggaggcggcgactgggaacggcgtggcgctcgctgatggcgacggcgaggcagcggcgcaggaagagcgtggcgagcaggacgaagtggtccacggtgccgtcgtcggcctcggattgcatgcggtggagggtgttcatggtggccagctcagcgacctcgctaccgacgccattgagctgccgatccatttgcaactgggtgtcagcccaacttgtgcatcgtggaagggccgaactgcaatgaacaagccatacaggcacagcagagcacgcagcttagctcgaccgagtgataatgatgcaacagcgaagccgaagctccctgacgtcgacgcggggagttcaaacagagactcactggtcactacagttgcagatatggcaccgatccgtgatgatatggttatattccagcagtacgagcgggaggaatggctccttggaacaccctacccggacgtcttcccagggagctaccaagacgagccggacggcgaggccggccgggccggactccgccgccgacaggccgtcgacgaagtcgccgcccgccgggaggagccccaaggtggagcgccgcatgacgatgagcgcggagagagaggtaagtgttctatgtggacactttggacacattctcaattagtagttgttggctggctcttgaaaaggaggccaccgacgaagctatcggagctagagtcccagctctcgcagctgcaagacgagctcaagaaagccaaggagcagctgctctccaccgagcactccaagcggcgcgccctgcaggaggccgaggacgccagggcgcaggcggcggcggcgtccgcgcaggtcagggactccgaggcgcagctcgccgagctctcctccgccgaggagagccgcctcctcgagcttcgccggctgtcccaggagcgcgaccgctcgtggcagtcggagctcgaggccatgcagaagcagcacgccgccgactcggccgcgctcgtcgcggccatgggcgaggtgcaccgcctccgcgtgcagctggccgcggcggcgcgcgccgaccgcaagcaggacgtggtggaggcgatggccaccatcgacgagctcagggtgaagctcaaggcgagcgaggaggccgaggcgcaggcgcgcgccttgcacgaggagtgcaagcagcagctggagacgagccgtgccaccatcgactcgctgctcacggacggctccaagctcatggactccttcagcctcgtggtcaaggagctcgaggagtcacgagccaaggtgaaggcactcgaggaggagatcgcggagacgtcggcggcaaaggccggcgagcgttgcaactgctcggcgtcggcgtcggcatcggaggtcgctgagctgaggtcggaattggagtccacggaggccaggttccaagaagagcgcatcctgagcacagtggagacgcagtgcgcctacgagctcatggaccagataaaaatggagtccgactcgcggcacggcaagctcgccgcggcgctcgagagcaccaagtccgaggtcatcttcctcaaggcgagcctcttcgacaaggactccgagctgcggcgcgccctggacgcgaacgagaagctccaatccgagacgagaacggacaacgagctgaaggagcagctgcagggcgcgctcctggagaacgggcagctgaagcgcgagctgcagcagcacacctccgagaagaaggcctcggcgaaggcgacggacgccgccgacgcggcggcggaggcggcgaagaagggggagatggaggccgagctgaggcgtctgcgggtgcaggccgagcagtggaggaaggccgccgagaccgccatggcgctgctcacggtgggcaagggcggcaacgggaaggtggtggaccggagcgagtcgcttgaaggaggcggcggcggcggcggcaagtacgccggcctgtgggacgagctcgacgacgacgcggcggccaggaagaacggcaacgtgctcaggcggatcagcggcatgtggaagaaatgaggctgatcagaatcaaactgcgcgcgctatgcgctagggaatttgctcatcttttcccgtgttgtagtaaattctttttgccggttgctttggtacaaaaggaaaaaggagaaaaacataggagtgtgcttgtactggttgggggtaaacgtgctcatagctgtatcatacgtggtatatgaagggttaattcatccgggcgtgacagattggattaggctttttgttagttttcgtcaattctgattctctcagattcaccgatgagagctgtttgtatgtaaccttttgttcttcaatcggcgtgattcaaccattctcgccccaaaaaaaataaaaaaaaaaaaaaaaaaaaaaaaaaaaaaaaggggagggcctcgtccgatcctcagcccg

SEQ ID NO: 3534 - DNA, 1706 bp, Oryza sativa
  Clone ID: PAT_MRT4530_104C.1
gcacgaggcgaagcccgtccttcctaacgtatcgcccacattcctccacgtctcccgcaccggccgttatttcccttctcgattctccccggccggcatagttccataccctccccgttgcctcgcctaaacccatcaccccacgccaccacctcgccaccgccgccgccgccgccgccgacgaagacgacgatgaaggtggtgcggaacctcgacctggagcggtacatggggcggtggtacgagatcgcgtgcttcccgtcgcggttccagcccagggacggcaccaacacgcgcgccacctacacgctcgccggcgacggcgccgtgaaggtgctcaacgagacgtggaccgacggccgccgcggccacatcgagggcaccgcctaccgcgccgacccggtcagcgacgaggccaagctcaaggtcaagttctacgtgcccccgttcctccccatcttccccgtcgtcggcgactactgggtgctccacgtcgacgacgcctactcctacgcgctcgtcggccagccctccctcaactacctctggatcttgtgcaggcagccgcacatggacgaggaggtgtacggccagctggtggagagggccaaggaggaggggtacgacgtgagcaagctgaagaagacggcgcacccggacccgccgccggagaccgagcagagcgccggcgaccgcggggtgtggtggatcaagtccctcttcggcaggtaggtaggtggtcgtgccagctgccatgccgtccagactccagagcttgatgccaccatgatcgtgtacattattattgcttcagttcaaaggctagttggtgaattctgttcaactcgtcggcctcggggaatcccccaagctgtgaacctgttcgttttctggattagtgtttaatgtgtccgttttgtgatgaattgtggatatctgcaaaaaaaaaaaaaaaaaaagtgtgtttggttgcaagccacactttgccacagtttgccacgcctaagttgtggcaagattcccctccaacaaattgggtcccacgtgtcaatggctcaaaaaagtgtggcaagattctcttaggcttatgggacccatatcttcatatatctcattctctttctccatctcatccccttcctttcatgtcgtattgttctccagtaagtccagatgatgttcagtggcgctacggcggtgtggatgcaggagatggcagcagccgtgcgacgatgaggaagatggcggcagccgtgcagcggatgtgggtgatgccggcagccgggcatgatgagggcgcccatgcggcggacgcgagatatggcggtcggtgtgcggataacacgggagatgagcaggacgggggtggcggtcgtgcggcagacgcgggagacagcgacggttgtgcggcgggcatggaagacaaaggcggccgagccagatggcgacggtcgtgcgatagacgcagaagatgggggtggccgaactggaaggcggtgacggttgatccagacgactgtgaccgtgcggcggacgtggaaggcgccgccaaccgtgcggataacgcgagagacgacgatggtcgtgttgtacgacggatgcatgatatggtgtcggtcgggcggaatgagagcggtggtgacggctgcagccaaggtggacgagggaagttgctgcaccggacaagggtgatgtctacgacgtga

SEQ ID NO: 3535 - DNA, 480 bp, Oryza sativa
  Clone ID: PAT_MRT4530_10500C.1
aaaaaaatgtgataagattcactttggtaggccataacacccatatctgaactccccgtacaggatatgctcagtattcagtaccatcctgtgcatatgtggcggtgtattatacagatgcatgcacgtgctgatcacagcgaggtgactctacggtgtacactatactaacactactgtgcgctggccacagatgtagtttgacacgaaatgcaaggtgattgatgacaacagctacgagatttcattcgtcatgcttatgaaattgctgaaacactacacatttatgatgagagaaacgtgaacaaaataatcccgttcacgtacaattttattcgaagtagtaaagactagtactagtagcttaatttgcagtcagttacaccagtatcttgagccgtttcaccgacttggcaaaggcctcccatggcacgtctccgacctgcatccagtctccttccccatcctcgtaggtgacag

SEQ ID NO: 3536 - DNA, 273 bp, Oryza sativa
  Clone ID: PAT_MRT4530_10501C.1
agggccccaaaaggaacccaaatttttttttttttttccaaccctccccttttacataggggaaaaaacaggcccttttttatgggttaggatttattggaaaaccatccttaacaatccaagcctttgatggacatttttgggttatccccccacaaatttttttggggagcttttgggggcttgactgggggggaacccccctaacttatttcccctgtggggcttgaccttgatttttataaaaggaaccccccctaaattgctgcagtt

SEQ ID NO: 3537 - DNA, 3023 bp, Oryza sativa
  unsure (1)..(3023): unsure at all n locations
  Clone ID: PAT_MRT4530_10502C.1
ttttttttttttttttttttggaaatacatgcaatatatatatatatatatatgaatctgtatgaaatgcatttcagtatgggtttctttctttatcagtttattattattacacagggcaatcaccacaataggggaatcaatcaatcaataaaatcatgtgcacgtgtggtttggtggagaaggcatgtcagctgtaatctagtctaactctacattgtagtacaccatgaattttggtccaaggtgcttttcaccaccttggcataggcacctttctttcagcaaaagtgtcctttggtngcttttagaattcccaattatagaataggtntgtgctgcgaattccttgtagtttagccattaatatgtgcacctcaaatctcaaatttcaagatggggcaatcaccagtaggatcaatactagcatgaattgagaaacagtacatggtaaatttcagatatttgaactcaggtgagacatgtgcaatggttgtctgcattgaatccgaacgatctgggttgtatatttgttgactgcactcttcaaccacctttgttggagcttttgctttaagcagcatctcattgtactctgcttctggatctgacaatgctacaatagccccgcctgccccaatcgaagcttctccattgtgcaggacaactgttctgatcacgatattcaagtcaaaagtcttgttatatgaaaagaatccaactgatcctgagtatattcctctcggactagtttcaagtgaatcaagaatctccatggatctaactttcggggccccggtcattgaacctcctggaaaggcagcctttacacaatcgacagggcttaggtccgacattttggttccacgaatggtacttaccatggtatgtacagttttatatgattccacatccatgaggcgaggaacatgcacactcccaggttcacaaaccttaccaagatcgtttcttaggaggtcaacaatcatcaagttctcagcttgatctttttcactttcaggagaagagcaacatatactcaggttttctgaggagaagttaagccaagctgcataaggggctggattttgttttcgcaatttcaggtagagtttcaaagcatccatataatccgttcttctcttcatctgagtagttaagcacaattcatagctttctccgtctcttatgtaatccaggcaactctgcacatctctgatatattcatcttttgatttctcgatgacaaatctttgcttattcacactggatgatatggtaaatgagttcccattgatcgacgagtttccattgatcgataatcttggggccatggcatccatcctgagaagcttcttctcagtatttgctaaccataaactatgtattgagttttggtaatctccatctccattaccagaagaatattcatcatgtaatgataaaatgtacacatccccattgttgtgatcaaccacaactaggttatcagcaaagaagaagcatgcatcaggggtacttgattttgcactattagatgatgcatcgcattcaactttaagaccatatcctatgtatccaacaaatccaccatggaagtcaaatggaagtccttcataatccttttcaatgtattgaatggattgcatctccttgtcaaggaaatccaagaaaccatccttgagaaagtttctgacagtacaaccataagcatctcgaatagtaaggtttcctccacaattggctcgttgactggcaaggtgaaatgtcatttgcttccaaaggggcccgcccttgccgcccatgaatgaaaatcgtgccctattctggtcaactgatgagctatccagccaaaatgtatcttcagcgctatgatggccaaaaagcactgaaaaaatgttttcagagccacctatgcgattgaggaagttatcaatctttttccattgcaaccgtaagcatttgtccccactgcttcgctttggaagagcacaaggcccaacagaatcccaaagtttcaaccttgcagaatgtaacaagtcatttgcaacaaagttcttgagatctggagaactgatctttctttcctgaagcaatggtgtctgtaatccaaagtcagttgttatcttcttgaagttttgaaatatctgtcttccataatgagtagcaacactctcggggtgaaactgcactccatagtgaggcctggtagagtgcctaacgcccatgagaaccctgtagccatctaactcacttgcatcgtttatgctgggcatttttccatcagtggtactgcactctgactggtttgttacgaataagttatccaatgatccccacaaggtactgctagttatatcaggcttatcgctttcaaggaatgagagcatttttggagaagcagtccatgctattgatataagatcctcagatagagagtctggttctattacaagtgagtgatagcgcactaccttgaatccagagtttatacctgatgggatgtgattaaagaggtagcatccattgtgttcaagttcactaagccggccatgtatagcttcaggagcatggacgattttagcaccatggacaaatcccagggcctggtggccaaggcagacacccaggatgggtatatctccacactcgcaaagtatccgcaggcctatacctatgtcgctagggcaggccggagatcccgggccaggcgagatgacgatgttgtcgaaggccctctccttgtacacccacctgtacacgtccctccacgtccactcgtcgttgcgcaccaccaccggcggcacgccgttgacgacggagagctcctggaagatgttgtaggtgtagctgtcgtagttgtcgatcaggagcgtcctcaccggcggcggcgggaccgccccgcccccgcccccgcccccgcccgcgccccgcggcgccgcaacccgacggcggtgggaagaatggagccacggcgcgggggcgcggggcggcggcggggtggggaggcggagggcggccat

SEQ ID NO: 3538 - DNA, 645 bp, Oryza sativa
  Clone ID: PAT_MRT4530_10503C.1
atgggggctggcggtggcggcaaccagcggcggcggcgggagggcgggcgggtgaggggcgccgccagctcgtcgcaatgggagcacgaggggagtcggtgccggtgcgagcggcggctgagggacggggaccggcaggcgggagccgtgggaggacgaggggagccggcggcggtgcgagtagtggctgagggacgggccggggccggtgggcgggaactggcggcggcggcttgtggtagtgggaggatgtggggagccggcggcggctgctcgtggcagagggaggacgaggggaagcggcggccgcggcgaccggatcatggcgcttctcctctcggcacgtgctatgcgagaaaggggctggtcaccgaggtatccaagttcctcttcggccgcttcgccgccgaccacgccgccatcgccatcgccattgcaggagtcaaagtcgaagtcgccgccgcggcgtgcttctcccgcccgccaccgttcccctcgtcctcccactgccacgagttgccgccgccctcgcccgcccgcctgccctcccgccgccacccaccactgccgcccgccgactgccgccgccgcttgccgaagagaaagagagagagggaggatgaggaagcatgggttacgaattag

SEQ ID NO: 3539 - DNA, 474 bp, Oryza sativa
  Clone ID: PAT_MRT4530_10504C.1
gggttgtgttctttttttctctttttgcttttgttcattgtttgttttctcttttttttctttttttttttttttttttgttcgggaacacgggcgaccccctaaagtttaacggcaaaaacggcgaccacgccatttcttattctcaacaggtaaccccccgggggggggggggaacggaatccccacccaccccaccattgcgctgggatcacccccgaccaagtaaagctaaaaaacccccaaagtcaaacggactttcttttttagggaaaaagagccgggcctgggaaagccaacccaccggaaaaaccactcttctttttggcattcccgaaaccagaaaatggcagcaaagcaaaaaaacgccaagccccccccctttcaaagacccaccctgaaaaggtggcaccaaaaattttttgacggcttcccctcgagctcacagggaccgggctatccagggggccggcc

SEQ ID NO: 3540 - DNA, 265 bp, Oryza sativa
  unsure (1)..(265): unsure at all n locations
  Clone ID: PAT_MRT4530_10505C.1
cgacccacgcgtgcgggcgaggtgnntatgaggatgagactgatatacacggctactagtcaggtatttggttaggcatatgttgccatcatatcagtgtgcacgggtatttgtgttctgttattggagttatactggcttgcattcgcctgatcgtaaaggcgcctaacaagtccgacgtactcctgccgcgagatggtccacttcgccatctccaagtgggccgacggcaggcaggagaagccgactgtccgcacagatgatg

SEQ ID NO: 3541 - DNA, 2571 bp, Oryza sativa
  Clone ID: PAT_MRT4530_10506C.1
atggaagaagatgaagtggaagacgacaatattccagactttgctcagtacgctggatttgaaggaaatcaaacgggcgaggaggaaagagatgctgattataacgatgttgcggatgatcttggtcagatgttgcaggatgccaaggaggactgcgaaagtgtaaagggggcccataaattggacaagatgttagaggaccacagaacgtcgttgtacccaggttgtgagcaggggcacaaaaaattggataccactctggagttcttgcaatggaaggcaaaaaatggtgttagtgacaaggcatttggcgatttattgaaactcgtcaagaacattcttccggagggaaacaaattgcccgagacaacgtacgaggctaagaagatagtctgccctctaggactggaagttcagaagattcacgcatgtccgaatgattgtatcctatatcgcggtaaggagtacgagaacctagaagcatgccctgtttgtaaagcactacgatacaagattagacgagatgatccaggtgaggttgacgggcagctaacgaagaagagaattcctgctaaggtgatgtggtatttccctataataccacggctaaggcgtttgtttaggaacaaggggaatgctagaatgatgctttgtcacgctgaagaacgtcaacaggacgggatgctgagacaccccgcagatggttcgcagtggcgaaacatcgagagaaaatttaaagactttggaaaggacgcacgaaacatactgtttggtttaagtacggatggcatgagtccttttggagagatgagcagcggccatagcacttggcccgttacgatgtgtatctacaacctccccccttggctatgcatgaagaggaagtacataatgatgccgattattattcaaggccccaagcaacctggtaacgacatcgatgtgttcctaagaccactggtcgaagatcttaaactgttgtggaagaaggaaggtgtccccgtgtgggacgaggacaaacaggaggagtttaacctacgagcgctgctgttcgtaaccatcaacgattggcctgcacttagcaacctatccgggcagtcaaacaaggggtacaaggcttacactcactgtatggatgaaacagaaacaaacaatccagtacggaagaaaggaaagcactttgaacatacggcggaccaccgtacgaagccaaaacatcgtagcgggaaaacagtgtttgctacggtgaaaggtcttaaagtagtgtttggaaaggggcctggtagccagcctatagagtgcgaagatggtgtatatggaaagtcgaaacatacactggaagcacgtaatgatctgaagcatatagaacaacgtggcgaccttcacccggaaccaaaggagaaaggcagccattacttgagtccagccagctacactcttagcaaggcagagaaggaaagtatgtttcaatgcttggagagtatcaaggtaccatctggatactccacgaatataaagcgaataataagcatgaaggagaagaagttcacaaacctaaagtctcatgactgtcacgtgttgatgatacagctgctaccagttataataaggggtatcctcccagacaatgtccgggcaacaataacaaagctatgttctttcatgaacacaatttcgcagaaggtcatcgatccggataggttagaagcccttcagaatgatgtggtgcaatgtcttgtcaggtttgagttgatatttccaccttcatttttcaatataatgacgcatctgctttgtcacctagtgaaagagatcggtattctcgggcctgtgttcctacacaacatgtttcctttcgagaggtacatgggcgttctgaagaagtatgtttgtaaccgtgctcgtccagaggcaagcatcgctaaggggcaactggccttcctggcgaggggtccatctggctcgatcgcaacattccaaggatatgagatcaatgggtacacattctatacaagagcccaagacatgaagagcacgaaccagaacagtgctgttcgtatcgatgccatgggacacgatggtacaactggcacgtattacggtgccatcgaggagatatgggaacttgactatggacctctcaaggtccctctgttccggtgtcaatgggttaggttgactggtggaggtgttataattgatgacagtgggatgacaacggttgaccttaacaaggttggatactcggacgaaccttttgtccttgccaatgatgtaacgcaagtttttaacgtgaaggacatgtctagcaaaggaaagaagggcaaagggcctgacgagccgatgcgcaacgtggttctcccaggcaaaagaaaaatcgtcggagtagaggacaagactgacgaggattacgatcagtttgatgggcaacgccctttcacggtgacgattgaccctagcatcctcctagcaaatgaagacaccccttactcacgtagcgatcacaaggaaggaacaatagtgaggagaaagtacgtgcggacaaccgtcaccgccgatgtattgccgtaa

SEQ ID NO: 3542 - DNA, 3475 bp, Oryza sativa
  Clone ID: PAT_MRT4530_10507C.1
atggaagaagatgaagtggaagacgacaatattccagactttgctcagtacgctggatttgaaggaaatcaaacgggcgaggaggacagagatgctgattataacgacgttgcggatgatcttggtcagatgttgcaggatgccaaggaggactgtgaaagtgaaaagggggcccataaattggacaagatgttagaggaccacagaacgtcgttgtacccaggttgcgagcaggggcacaaaaagttggataccactctggagttcttgcaatggaaggcaaaaaatggtgttagtgacaaggcatttggcgatttattgaaactcgtcaaaaacattcttccggagggaaacaaattgcccgagacaacgtacgaggctaagaagatagtctgccctctaggactggaagttcagaagattcacgcatgtctgaatgattgtatcctatatcacagtgaggagtacgagaacctagaagcatgccctatttgtaaagcactacgatacaagattagacgagatgatccaggtgaggttgacgggcagctaacgaagaagagaattcctgctaaggtgatgtggtatttccctatattaacacggctaaggcatttgtttaggaacaaggggaatgctagaatgatgcgttggcacgctgaagaacgtcaacaggacgggatgctgagacaccccgcagatggttcgcagtggcgaaacatcgacagaaaatttaaaggctttggaaaggacgcacgaaacatacggtttggtttaagtacggatggcatgaatccttttggagagatgagcagcggccatagcacttggcccgttacaatgtgtatctacaacctccccccttggctatgcatgaagaggaagtacataatgatgccgattattattcaaggccccaagcaacctggtaacgacatcggtgtgttcctaataccactggtcgaagatcttaaactgttgtggaagaaggaaggtgtccccgtgtgggacgaggacaaacaggaggagtttaacctacgagcgctgctgttcgtaaccatcaacgattggcctgcacttagcaacctatccgggcagtccaacaaggggtacaaggcttgcactcactgtatggatgaaacagaaagtacgtatcttaagcagtgtaggaaggttgtgtacatgggtcatcgtcgattccttgcagcaaaccacttacggaagaaaggcaagcactttgaacatacggcggaccaccgtatgaagcctaaacatcgcagcgggaaaacagtgtttgatatggttaaagatcttaaagtagtgtttggaaaggggcctggcagccagcctatagagagcgaagatggtcacgcgacgatgtggaaaaaaaactccatattttgggagttaccctattgggaattcttggacttccgccacgcaatcgacgtgatgcacctcactaagaacctttgcgtaaaccttcttggcttcctaggtgtatatggaaagtcgaaagatacactggaagcacgtaatgatctgaagcatatggaacaacgcggcaaccttcacccggaaccacaggagaaaggcagccattacttgagtccagccagctacactcttagcaaggcagagaaggaaagtatgtttcaatgcttggagagcatcaaggtaccgtctggatactccacgaatataaagcgaataataagcacgaaggagaagaagttcacaaacctaaagtctcatgactgtcacgtgttgatgacacagctgctaccagttataataaggggtatcctcccagacaatgtccgggcaacaataacaaggctatgttctttcatgaacgcaatttcgcagaaggtcattgatccagataggttagaagcccttcagaatgatgtggtgcaatgtcttgtcagctttgagttgatatttccaccttcatttttcaatataatgacgcatctgctttgtcacctagtgaaagagatcggtattctcgggcctgtgttcctacacaacatgttaactttcgagaggtacatgggcgttctgaagaagtatgttcgtaaccgtgctcgtccagaggcaagcatcgccaaggggtatggaacagaggaggtcattgaattctgcgtagaatttattgaagaccttcgcccaatcggggtacctgaatcacgccatgaagggagactacggggaaaggggactctcggaaggaaagcaataatgacggtagacaacaatttattccgtaaagcccatttcacggttttacaacaatcttcattggtggctccttacatcgaggagcacttggctctagttcgcgccagaaacatcgcccaagacatgaagagcacgaaccagaacagtgctgttcgtatcgatgccatgggacacgatggtacaactggcacgtattacggtgccatcgaggagatatgggaacttgactatggacctctcaaggtccctctgttctggtgccaatgggttaggttgactggtggaggcgtaacgatagatgacagtgggatgacaacggttgaccttaacaaggttcgatactcggacgaaccttttgtccttgccaatgatgtaacgcaagttttttatgtgaaggacatatctagcaaaggaaagaagggcaaagggcctgatgagccgaagtgccacatggttctcccaggcaaaagaaaaatcatcggagttgaggacaagactgacgaggattatgatcagtgttatgggcaaccccctttcacggtgacggttgaccctatcatcctcctatcaaacgaagacaccccttactcacgtagcgatcacaaggaaggaacaattgggcatcccacgcgccgacgccactgtcgtctctcaccgtcgtctcgctgtcgtcgtcgtcgccgccgccgccttctcgatctctctctctccaaaccgccgccgcctcgtcgtcgtcgtcgttgcgacaccgccgtgccacgccgatgccgaccccgactccgcctcccgccgatgccaaccccgacgtcgacccggccggcactgtcgacgacgtacgccaaccccgtcgacgccgaccccgcgatgcgccgtcactgccaacaacgccgccgccactgccgcgccttgccatgccgccgcccccgctgcggcacgccaccgccgctccttttcggtgccgccccatcaatgccgaatgggaacgaacgcgaacggaagtgaacggacgtgaacgaatgcgaacgaacgcgaacgaacgtgaacgaaacgtgtgaacgaacgcgaacgagacgtgtacgaacgagaaaattaaacgattattagacttagcatatatgattatatacttgaaaacgtgaacgaaaaatatatgttcctttgcatttcggctaatacattttttttgcatgttgcagaaaatatgtcgtcgtcgtccctcaagccgaagtgg

SEQ ID NO: 3543 - DNA, 269 bp, Oryza sativa
  Clone ID: PAT_MRT4530_10508C.1
cggacgcgtgggatgaagcattgtaccgcatatgatatgtattacatgtgcaggtctcgtgcacacctgtgaagcgaatggatatataatgaatatatagtactgaacatattatacatggggcagaacactgtataatatgtgcagtactatatatgaagcattgtcccagctatgtaatgtattacatgtccatgtattgggcacacctgcagagtgaatgagctgttcttgattgtctacaatgatgaacataaaggcggggtgca

SEQ ID NO: 3544 - DNA, 1167 bp, Oryza sativa
  Clone ID: PAT_MRT4530_10509C.1
atgccgccgaggaaagccccggcaatggagaacgtgggcgtcgtcgattttccgacggacgttctggtggacatcctgtcgcagctcccgacgagctcccggcggctttgccggctcgtgtgccggcggtggcgcgacaccatcgacaagcgcacgccggagcgcgacgtccggaccaagatgctcacattcgtcaagggcctcgacaacgaggcgtcggcctacgtcgtcgacgaggcgcggggccggcacaggcgcgtgtggaccagctcctgctccgtcgacgtgatcggcacccgcaacggcctcatctgcgtcctggacggcggcacgggcgccgtcacggtggccaacccggcgacgcgcgagtcgctgtccgtgccgccgccgccgccgcgccaggcggggctcctgccgtgcttcccggacgcgcgcacgcacgaggcgtacgggttcgcgttccacccggcgacgctgcggtacgccgtcgtgcacgtcccgtgctacttcaacaagtccggcacgttcgacgccgtgcaggtgtacaccctcggccgcggcgggcgcggcgcgccgccgtcgtggcggagcgtgcctaccccaggcgccagcggccgtttccagccgggaggggtcgcctgcgtcgacggcgtggcgtactggatcaccgccgggacgccggcggcgatcatgtcgctcgatctcaaggacaaccgcgtcgcgcccgtcaagtggtcgccggagacgccggggcgcgggtgcaggtgcagctaccgcctgacggagatgcgcgggaggctctgcgtcgcggtcaccgtggaagagacggagaagccaactaaaagggtggaggtgtggtggatggagagcacaagagatcaacggtggactcgcagatacaacataatgctagaaacgcccaagcagcacgtgatgtggccgctgtttgcacacggggagaatgtcctaacagtggcgcaggtgttcaaggagtataacctgcacaagcacaaggtgagcgacaagaggagctcgcagtgcagcatggtgaagatatggaagaagaagccgggagtggagatcatgaactacggcgtcgctgaccacaccgggatcagtaccttcgcctacatggagacttcagaaccactcgagatttataaatag

SEQ ID NO: 3545 - DNA, 419 bp, Oryza sativa
  Clone ID: PAT_MRT4530_1050C.1
cacaattccttgatgcttatcttgacaggaattatactcattcatacacagcacaatacaaggatgtcagctcggaacataacaattggggtctaagatgcatccaaacaggggccgaggtagaaaagactctctttactgcgccattccaagcctatacggtcaagaccggtgcatcaatgataagagccttaatcaggttggccaggagggactagtactcctggaggggggaccagacgacccaggggtacctcccgagatcaggagaaaggactccataggttttcatcacgcagacaagggtgaccgtgaccaatccgccaaggcccttggaggatccacggggcgagtggaagaccttgacaatgtcggggacccgagcaccttgtcgagcacgcgggcgaagactgtatcgg

SEQ ID NO: 3546 - DNA, 2517 bp, Oryza sativa
  Clone ID: PAT_MRT4530_10510C.1
atggaggactgcgaaagtgaaaagggggcccacaaattggacaagatgttagaggaccacagaacgtcgttgtacccaggttgcgagcaggggcacaaaaagttggataccactctggagttcttgcaagggatggcaaaaaatggtgttagtgacaaggcatttcgcgatttattgaaactcgtcaagaacattcttccggagggaaacaaattgcccgagacaacgtacgaggctaagaagatagcctgccctcttggactggaagttcagaagattcatgcatgtccgaatgattctatcctacatcgcggtgaggagtacgagaacctagaagcatgccctgtttgtaaagcactacgatacaagattagacgagatgatccaggtgaggttgacgggcagctaacgaagaagagaattcctgctaaggtgatgtggtatttccctataataacacggctaaggcgtttgttcaggaacaaggggaatgctagaatgatgcgttggcacgatgaagaacatcaacaggacgggatgctgagacaccccgcagaaggttcgcagtggcgaaacatcgatagaaaatttaaagactttggaaaggacgcacaaaacaaacagtttggtttaagtacggatggcatgaatccttttggagagatgagcagcggccatagcacttggcctgttacgatgtgtatctacaacctccccccttggctatgcatgaagaggaagtacataatgatgccgattattattcaaggccccaagcaacctggtaacgacatcgatgtgttcctaagaccactggtcgaagatcttaaactgttgtggaagaaggaaggtgtccccgtgtgggacgaggacaaacaggaggagtttaacctacgagcgctgctgttcgtaactatcaacgattggcctgcacttagcaacttatccgggcagtccaacaaggggtacaaggcttgcactcactgtatggatgaaacagaaagtacggatcttaagcactgtaggaaggttgtgtacatgggtcatcgtcgattccttgcagcaaaccacccggtacggaagaaaggcaagcactttgaacatacggtggaccaccgtatgaagtctgaacatcgcagcgggaaaacagtgtttgatatggttaaagatcttaaagtagtgtttggaaaggggcctggcagccagcctatagagagcgaagatggtcacgcggcgatgtggaaaaaaaactacatattttgggagttaccctattgggaattcttggacgtccgccacgcaatcgacatgatgcccctcactaagaaccttggcgtaaaccttcttggcttcctaggtgtatatggaaagtcgaaagatacactggaagcacgtaatgatctgaagcatatagaacaacacggcgaccttcacccggaaccacaggagaaaggcagccattacttgagtccagccagctacactcttagcaaggcagagaagaaaagtatgtttcaatgcttggagagcatcaaggtaccgtctggatactccacgaatataaagcgaataataagcacgatggagaagaagttcacaaacctaaagtctcatgactgtcacgtgttgatgacacagctgctaccagttataataaggggtatccttccagacaatgtccgggcaacaataacaaagctatgttctttcatgaacgcaatttcgcagaaggtcatcgatccgaataggttagaagcccttcagaatgatgtggtgcaatgtcttgtcagctttgagttgatatttccaccttcatttttcaatataatgacgcatctgctttgtcacctagtgaaagagatcggtattctcgggcctgtgttcctacacaacatgtttcctttcgagaggtacatgggcgttctaaagaagtatgttcgtaaccgtgctcgtccagaggcaagcatcgccaaggggtatggaacagaggaggtcattgaattctgcgtagaatttattgaagaccttcacccaatcggggtacctgaatcacgccatgaagggagactacggggaaaggggactctcagaaggaaagcaataatgacggtagacaacaatttattccgtaaagcccatttcacgattttacaacaaccttcattggtggctccttacatcgaggagcacatggctctagttcgcgctggaaacatcggcgtaacgattgatgaaagtgggatgacaacagttgaccttaacaatgttggatactcggacgaaccttttgtccttgccaatgatgtaacacaagttttttgcgtgaaggacatgtctagcaaaggaaagaagggcaaagggcctgacgagccgaagtgccacgtggttctcccaggcaaaagaaaaatcgtcggagtagaggacaagactgacgaggattacgatcagtttgatgggcaaccccctttcacgatgacaccccttactcacgtagcgatcacaagtaaggaacaatag

SEQ ID NO: 3547 - DNA, 412 bp, Oryza sativa
  Clone ID: PAT_MRT4530_10511C.1
cgtcttttcttttagtgtcgactaatagcgcgaatggcagttcctttgagcgcgaggctgtagcattagaccgtgaggtcccctttcgtccacgagatgggcagttactccggcagcgactcgtactcgttcaccgttagttgttccggcggtacggagcaccacttcgtaccctgtgacgtgctgctttttctcgtctgtgggaccgggaaccgggggttcccccgccccctccgtcgtcctcgggagcccccggccatcgtcgggaggagaggcgggaggaggaggaggcgctcgtggaggggtggaggagggttagcggtgtatttttaagagtttcctttaaagcatgctcttttgcatatggggtccaagctcttaaaccatggctgttttccgttgacgtgttttc

SEQ ID NO: 3548 - DNA, 475 bp, Oryza sativa
  Clone ID: PAT_MRT4530_10512C.1
gaaccgcaatgttctagccccattgctttatccacatgctctagccccattgcattatccccttggggtgaacatggctactatcaaggagattctgttggttcttctttatggggtgtccaggacgatgatccagaaacaaatgatgcatcggtatcaatgatagacaagaactcaggattagtagattctcaaccatcagcaaatgatggctcagatgtgggtactgcacggaacactaaccataatactaacttgtccctcaaccatgaaacagcggtacccttgagtagaagttctggagaagcatcaagaaaacacggatttattactgacttgaatgttgctacttcagaggaggcgttagggaacaccaagaactggaatccatatgctggtaatgctaatcggggcagccagcggaatcatcaccgggacaggtactctcaaataagcgaatcttggcttcttagct

SEQ ID NO: 3549 - DNA, 562 bp, Oryza sativa
  Clone ID: PAT_MRT4530_10513C.1
ccggccggggcctccaccgttcgcggccgtcgcagtgcctttgacttccgttgtggtgcctccgcggctccgccgtccaccgggtgtcatggcgctgccgtacgccgaagggccaccgtcgtctgcctcccgtcgtggtgccgccatctgacgcagccccttcaccggcagccgggcgccagagctccgcaaccaggcaagcgcagccgcacatccctcactacctagtacttttcgttcttctactccgctccactctctttccaatccaggcttatctaaaatttgttcccctttgttattttcttggtacaagactactagtgccatatcttgttagatgcgatgtattttgatggatgcttgagtggtaatgcatctagatatccagcaactagcagtcctaatggttgtatggctgctaatgcggctgggcattggaggagatagctttgagttgtttcatggttatgttggacgactgattttcttaagcaaactgaccttgagagagtccagaataaaaaaaaaatccaaaaaaaaaaaaaaaaaacccgcggcc

SEQ ID NO: 3550 - DNA, 6021 bp, Oryza sativa
  Clone ID: PAT_MRT4530_10514C.1
atggagggagcagccgccgccgccggcggcggggagatgctatccccaggtgaggcggactggcctcccgagctgcggctcccaccgccgcccccgccctccgccgcatcggagggggagccgccgcccgcgcgggccgcggtggggatggatgactcgcagttcctcggatcgatcatcggcttgcccgcccagccgccgcaggccacggccgaggcgctcgcggtggtcggggtcaagaggaggagagggaggccgccgaagaagagggacggggcggcggcggcgacggcggttgttcccgcggcgaggcctgcgaggaggagggaggacgaggaggaggtcgtctgcttcatctgcttcgacgggggcaacctcgtcgtgtgcgatcggaggggatgccctaaggtctaccatccggcctgcatcaagcgcgatgaggcattcttccaatctcgcagcaagtggaattgcggttggcacatatgcagcagctgtgaaaaggcagtgcactacatgtgctatacgtgtacatactccctttgcaaagtatgcatcaagcaaggtaaatttttcagtgtcagggggaccaagggcttctgcgatacctgttattcaactatactgttgatagaatccaaagatgaaggtgatacaaagattgttgttgattttgatgatcaaaatagttgggaatacctgttcaagctatattgggtggatctgaaagggaagctttcattaacattggaagaactaactagcgccaaggctcgatggaatgcacctactacttacactaggaaagaaaaggatgagtcatctgatgacctttatgatgctaataatgacgatgatgctggttctgactgctcctcaggaaagcgaaagagaaattcttcgagaaaaaagggtcgaaaacgtcggaaaccaaattctgattgtagcattgccacaaaaaaggttgagactgttactagagatgatggaaccctgcccaacaaggtaccaactgaagaggcgtccttgccggtagacaccaaatgggcttcgccagagctactggagtttgtagggcacatgagagatggcgatcaatcttttatttcccagtttgatgttcaggctcttttgcttgactatataaaacagaacaacctccgtgaccctcaaagaaagagtcaaattatctgtgactcaaggcttcaccgtttattcaggaaaacacgcgtcgctcattttgagatgttgaagcttttggagatgcactttattgtaagtgagccttctgcagtaaatgatggtagccaagggattatcaatcctgattcagctcaaatagatcatgccagtggatataatgacatggcagcaaagttctctcctgataggagacgaaggatgcatagaaagatggaaagagaaccacaggctaatcctgaagattacgcagcaattgatatgcataatattaacctaatttacctgcgccgtagcttgatggaggatcttattgatgatcccacattgtcagacaaaatttctggtgcttttgtcaggataagaatttcgggacttggtcagaagcaagatatgtatcgtctggtgaaagttgtcgggacacataaggtttcagaaaaatacagcatcgggaagaagatgacaaattttgcacttgagataatgaacttaaacaaaaaggagattatcacgatggacacagtatcaaatcaggattttacagaggaggaatgcaagcgcctaaggcagagcatgaagtatgatctaattagccgactgaaagtgggtgatatccaagagaaagccaagatcttccaatttgtaagagtgaatgatcttctcaacactcctgaggaaagagcacgcagaattaatgaagttcttgacgtgcatgttgactcgcatatggatcctgattatgaatctgatgatgaatttggcaacaagaaagctgttgaacgtagtgtaaattgggcaagatcagatccgttcgtttcacccgttaaagttaaatattcgaacagttcacaaaagaatggtgatgctacccgccatctcaaaaacctgtctaaacaaaatacagagcgtaaatcaggagcagcaagaaactttgagaattcccattcaccagttggtatggatattccaaaatctggcactaatgtaaagagtaccaggtgtgaaactacgtcaccttcatctcatggggttgtatcaagtgacatggaaccagaaaaagtctggcactacaaggatccttctggaaatgttcagggcccatttactcttgtgcagctatccaaatggacaagttacttcccacgtgatatgagagtatggcttacatttgagagtgaagagagatcattgctgttgactgaagtgctctcaaagcaaccaaaagattttggtcaacctgcatctgttactacaagtagtaagtcgacagtagcagacactggacaaaacagaaacactgaaattgttgatctcaacaaagctccttctcctgttggttatagtatgcttaattcttttgaaaccactgttcagtctactaagcattctgctccagaaagggaaagcgtgaactctttagatgacaggttatcacactcgactgactcagttccaccaaaggacgctaacgcttcaaatagtcaagcaatgtgtcagatcaagcattcaggctctcttccatctcctggaagtccacatcaacgatcagacttgcaccatgatgaagtacagggaggacgctctggtgaatggaacaatcaacacaacagtgaactgtggagtccatccatgccgcagacaagttctagtgcacacagtaacgtggaatctcatcacgatcattatccttcgtggtcacaggttcaacatgatcctaaaaatagtttacaagcaggttctgggaaggatctgaattcgaggtatgatattgcgcagaaacttcctagtcaacggatcacgagagatgttcccagccctgtatttgcctggagtccatctgagtccaggactgcttccagtcaacatgaaggttcttgcttgagttcaacaaccaatctatgcactcatgatgaacttcattcttcaattgcttctgcaaaggctaaaagctttgctccagcaactcctgttgaagacagaggttcaagctcaccctctggtatgctgagtctctcggaaagagcaccaatctgcagtccacagtcagctccttctgcgtctgcttctgatacatgcaagatggaggagaacatgaatcaacaaaaaacacttgaagctgatatatcaaacacgtcagttaatcagtctccacagtctaagattctccctgaatcttctcctgataaccaagatgctgaacatgaatatcgtagtccacctccaatatctgagagtaaagagttatccccacagtcaaggactacccctggatcttctcctgataaccaagatactgaacgtgaatatcctagcccgcctccaatatctgggagtaaagagatatccccacagtcaaggactatccttgaatcttctcctgataaccaagataatggacatgaatatcctagtccacctccgataccggagagtatagagctatctccgcattctaaggctctccctgaatcttctcctgataaccaagatattgaacctgaatgccctagtccacctcaaatacccgagagtaaagagctatctcggcagtctaagattctccctgaatcatctcctggtaaccaagatattgaacctgaatgccctagtccaccgcaaatacctgagagtaaagagctatctcagcagtctaagattctccctgaatcctctcctgataaccacgatattaaatgtgaatattccagtccaactccgatacccgagagtaaagagctatctctgcagtctaagattctccctgaatcttcttctgataaccaagatattaagtgtgaagatcctagcccaactccgatatctaagagtaaagaggtgtctccgcaatctaagattctctctgaatcttatcttgataaccaagatgttgaacgtgagtgtcctagttccattctgataactgagagtaaagagcttgctgtggacctccctggatcaatatcattagcacctgaaaaaacagcttctactgatgtaggtgaaaactcttcacttgcttttatttttccaaaatctactctggctggggatgatgctttgaaatcagtatttgatatggcaaaggcgcatttagaatgtgaagattcaaaggttaaagaagaactgtatgttgaatcaactgttgttataagagatgacatggttgttaatcctgcctctggagttgagtccatagacatgtctgaaaatctcttggaatctttgatggagcaaagttgtggaactttttacatggatggtacaacagccttagaaggttttctgtctggttcaacgaaggaagaaccgcaatgttctagccccattgctttatccacatgctctagccccattgcattatccccttggggtgaacatggctactatcaaggagattctgttggttcttctttatggggtgtccaggacgatgatccaatcggtaatatttggccattatcctcacaagcaccggctctccagtattcatctggtagcactgctcattttattgatgaagcaactgtcacccatggaaataatggagttgttctaagtagcacgccaggggaggaggtgggtttaccaaactcaggtgtttgcacagattggggattggttgagcaggtgaatccagaaacaaatgatgcatcggtatcaatgatagacaagaactcaggattagtagattctcaaccatcagcaaatgatggctcagatgtgggtactgcacggaacactaaccataatactaacttgtccctcaaccatgaaacagcggtacccttgagtagaagttctggagaagcatcaagaaaacacggatttattactgacttgaatgttgctacttcagaggaggcgttagggaacaccaagaactggaatccatatgctggtaatgctaatcggggcagccagcggaatcatcaccgtgacaggtactctcaaataagcgaatcttggcttcttagctcaaactactctaggagtaggtctgatggatttggcactggtggatcgtcgagatcaaccccaaggggacaaactcagagggggatatgtaaatttcatgagaatggctactgcaggaagggtgcatcttgtaactacctgcacccctgatctctgcaatagataacgagggtttgcattctttgcccatatcttttgacttttttgtatagcctaattacagtggtagtcaacatagagcctacacaaccttttcttggtttcattcaaccgtagcaaggacggagtatatgtctagctctagcataggaggatgactgaatgtactgcccaagcagattccactcttttggggacacggcctattttcgttttgcttggttcaattgaactgcatctgtgtatccctataactaaagttccccgcttttgtttcttcgaggcctgaggcctgacccgcatccgccagatgtatcggaaaatagcgatatgtaacccatcggtttagtttctgatttgccttatgttgacagaatgtattcggtattagtacactgggttaggatagttatttagcattttgactagttataaatgatactactacttaacagtatacatgatgtgattgtgatattaacatgctgatactgtgcaccgaaatttggtagaggatggcttgtcgaaggtcagatatacaacagtacaagttaggcagctgattactgaatttgtattaagggacttgtggaatagtttatcggttgtcgtcattactcctgtatccagtgtccatttcgtggctctcttgtagccagatacaaaaaaaaaaaaaaaaaagcggcc

SEQ ID NO: 3551 - DNA, 349 bp, Oryza sativa
  Clone ID: PAT_MRT4530_10515C.1
ggcggtgcccccccccggaacttcgcgcccgcccccttagggcttccccttttttctttttggggggtgggtgggaggccgggctttcctgggtgttttttttttgtcctggggaaaaggttattccctaacaattacccaaaaaattaaaaggggggagtaaaataaaaaaaaccagggggccttaatgggggtgtttcccaaacaaaaatggccaaccctatattccattttaaaatacaaaaagggggggggaggggtttttagtagagcgcccaccgctggttgaaagggggctaattttattggaccaagggggtttttttttttccacttggtaatagaaaaa

SEQ ID NO: 3552 - DNA, 191 bp, Oryza sativa
  Clone ID: PAT_MRT4530_10516C.1
atgatcggtcaagggcggcgagactcggcgactccttcgctcggagcggagggcggcgagtccttcacttcgccggcggcaacccgcctctgcggtgtgaggttcaagtgttcgatgaaatgcctcaccgagtctgggcatggagatagctttgccggtgaggtcactgatatgacgacatgccgatgcag

SEQ ID NO: 3553 - DNA, 396 bp, Oryza sativa
  Clone ID: PAT_MRT4530_10517C.1
aaaaaaaaaataattttttttttttttaaagggacataaatttttaaaaaaaaggagtcccttttgaaaacttttttgggggaccccccttttttaaaggaccctttcccaaataagctgcaatttacccaaatgggtgggaatggattatttccccccttttaaactttaaacatttaaaaaaaaaattttttacccttttaaaaccccaatctttttttttttgcccacaaggcccccccaaaaaaggaccccccgggggtttatcaccccttaaggggggcccccccccccccctcggtttaaaaaaaaaattttacggctttctttaagtccccggaggcggcgccccaagggtcaatggaaaaaaaaccttttttttgccccttaaactcc

SEQ ID NO: 3554 - DNA, 228 bp, Oryza sativa
  unsure (1)..(228): unsure at all n locations
  Clone ID: PAT_MRT4530_10518C.1
tgcctgnttacatcaataacaccaccacctagggggggcactttatggcggccagccaggataagccggaatacggtctagccttactgcaaaagtataggaaagaggaaactgctacggtagacctatatggcgaaagggccgcgaaccagggccagcactttgaggcccttaatatatcagatatttggaagctaccagctctataggccttcaaatacatccttt

SEQ ID NO: 3555 - DNA, 283 bp, Oryza sativa
  Clone ID: PAT_MRT4530_10519C.1
tttttggtttttttaatttttttggttggatccacaaaacagtattacaaaaaaatacactttgccaaaaacaagtaaatactccaacatctggggcaagtacagaggtcaaaaggacaagccacgtgagccgattcttttaaaaaccaaacttacacacgcacttttttataacaccctacaaaaaacaatctgatacctaacagctttggtggcggaaccaaaaaagtttgaatttcccaaaacatccacaggatcttctggaaagactatttagtttccc

SEQ ID NO: 3556 - DNA, 237 bp, Oryza sativa
  Clone ID: PAT_MRT4530_1051C.1
cggacccagggccggctaaccagactggaggcactagtaatgggaagaaacacgagagccacgggctcgctctaggagatcctcaacaagcgctctacgagggaaggagcgttcacagtcaagcaggcgagcgtcaccaccgggcgtcgacacagggctgactacagatatctgccttggaaccgtgggaacgcatggtagagaaattgagttccggtggtgcgccttgagcatgca

SEQ ID NO: 3557 - DNA, 328 bp, Oryza sativa
  Clone ID: PAT_MRT4530_10520C.1
aatcacgggggggggcatgcatgcagtaaactaaattgggcacaaaaaaaaggcaccgggtttaaacacgatcacaccgacaaactgtaccatggaatggggctacaaaagggctcctcgatcaaaaaggaaggaaggcgagcagaggagctgccacggggggggcgacgactagcacggccgtcaaacccatgggagacctccctgggggggccccattcggcggtgcccctgccgaacccccattgacgaacaaagtccccggggccacggacggggacgggcccggcgcaaggtacttgttgaagggggagggccttggccccca

SEQ ID NO: 3558 - DNA, 221 bp, Oryza sativa
  unsure (1)..(221): unsure at all n locations
  Clone ID: PAT_MRT4530_10521C.1
tcgcagttcgcgtcgcgcacacactntccntttgcctcgcgcagaggcggccncgccttctccgccgcnagnaatggccggcgccgcgnacgncgtggaggacgccgggatggacgaggtccagaagcggctcannttngacgacgaatgcattntngtggatgaacaagacaatgtttttggccatgaatcaaaatataactnccatcngatngaaaaaa

SEQ ID NO: 3559 - DNA, 121 bp, Oryza sativa
  Clone ID: PAT_MRT4530_10522C.1
atggcgagctgcccccaagggcacattttccaggccaagccagctcacatcaccagagcaacaagaacaatctatcctccatctttatccagctaccagctctcgatgaagccatcccgcg

SEQ ID NO: 3560 - DNA, 1915 bp, Oryza sativa
  Clone ID: PAT_MRT4530_10523C.1
ctgggggagcagggcacgggggggggggggacttgttctgggattttttttttcttgttttcacttgcattatgtttctcggtagataccgtgatgatttgcacttgataatgccaatctaggtataacatatgtgattttacatcagcacaagacatcaaaaattgcaagattatacaatgtccatgttctaacatccccagtgcttatctatacacataagtgaagcggcatacgcagtctgcagtctataataatctcatcatctttgtaaggttagcgatcttaaatcaccgaaacagctgccattggcaggcatagcggtctagtttttaactccggaatcccactcagcttcacgatagagcagtttcgacggtttgatgaaggaaaccgggaggcgacattggtggcatcgcttcttcctgggcatcaaccatttctaggatctttcttactgtggcttgcaaatgatcaccttgggttatatttggatgaatagactccttgtttttgagatccgtatttgatgacttaaattttgcatgcgcttttgctgaagttaccgcggtggtgaatacgccggattccttgagaccacgaatgatagccattggggcatatatgcgtgtcaacacacccttcctcaaaagcttcaaattggtatcggccgggccaatctgtcaaattccaagataaaacatcgcttcacatcttcctttgtgggcttgcagccacacctatccctccttgaagttaagtctgagaactttgtgtaagtgtaatgcagaatagcagcttcctccaacttgatttcatttggggttttcatgtaattatgccatctatgagcaccatttggacgcagatgctcctgaacccttgctgctgatttcccattaccgtaagtgagaaaatagtttggattaccacgcgttgcttctttgtataggccaaaatatgtatcctttggaagatgatcataatttttcttaaacatggaaacctctgtgaaaggatctttgatgtcatctcgctcaatgctgctctcatagttggggaagataaccatgtcaacattatcaggaacatctaaaagcaatcgcctcagagagtactcccgggcaccagctggatgaattagctcatcggtatcaagatgaatgatccagtccatgccagcatcccttgccataatgatagccatttccatgttcagcgactgtttgacaaatagttcataattgcacggtttgtaaaagaaacctgccagccaagtctcattccaaatgcgacttctgtcctgtttctctttcaattctttagttctgtaaatgatttttacaccccgaatggattcaagaactgaggtaacagctggtttcgcagcctctccttcaacaaaaaggaaaaagtgtgaaacaccgatgaccttgtggtagtacaaccatggaagaatttggtgtaaccctgcagatgtgcttcccgtgatacagatcttgggggttagtcccgcgtcggagtcgaagccccacccgcggtagagcgagatgccgccgtgcgaggaggacgccgcgctccggccgaggatctcggcgcagtctgcggccgcggaggaggactgcgacgaggtgacggcgaagtaggacccgcctcccccgcccccgcccgaggaggaggaggaggatccgagcgggctgttctccatgccggggaacctctgcgtctccgcgggccacgccgcgcccgccgggtcgcgcatcccgccgcgccactgcagcgcgaaggcgaacgcggccagcgccatcggcagcagcgtgaggagcagcagcacccgcgtcgcgaacgccgacgccgacgacgcccccccgccgccgccgcccgaggcggaacccccgccgcggtatcccgccat

SEQ ID NO: 3561 - DNA, 301 bp, Oryza sativa
  Clone ID: PAT_MRT4530_10524C.1
gctgtcgacgccacgacatgggcagcagagggtatggcagcacagcactccactgcgagaccgactgcaatagcatgtgctctgcggcgccctgctcaacatgaaccaggaggtggcccatgttgtgctcccctcaagtgcggtgtgtggcggagcatcggcgccggcatggcccacgcgctgcagaggcgacgagtgctggaacaatgcggaaccatgggcctaggcgcacgggccctcctcgataccccgcccccagagagccacctcaccggctgcgggtgcggtggcggcgttggag

SEQ ID NO: 3562 - DNA, 2040 bp, Oryza sativa
  Clone ID: PAT_MRT4530_10525C.1
atggcacaaggagtgatgctgtggtatgatgatctcctagcagttttagtactttccgtgctggtgggtacgtcgacggcggcgaactgcggtaggaagtgcggcgacgtgcgcatccccttccctttcggcatcggcgtcgactgcgcctggccgggcttcgacctctcatgcaaccatagctttacccctcccaggccgtacacgggcaacgtagagatcaaggacatctcgctggagaagggggagatgcgcgtgtacactcccgtcgtgtccgactgcttcacttcggacaataccaccgagtacgaaggaaacgcctcctcgtgggcctacctcggtacgccgttcctgtttgcgcggagcaggaacgagttcacggccatcggctgtggtacgattgcgtttctattgggcagggacgatgcgagctacttgaccggctgcatcacgacgtgcgcgagcttggatgaggccgcccacgacggtgagccctgcacggggctgggttgctgccacgtgccttccatcccgcccaaccttggcatcttaaatatttccttgggcgaaagcatcgttaacccagcttggaaagacagcccctgtagctacgccttcgtggccgagcaaggctggtacaatttcagccggcaagattttagtcgttccggcagcaagagcttcgtcaacagtactggagaaagacgtgtctcaacagtgcttgactgggccatcagaagaaatggatcgtgctcatcagcaacaggggctcctgcttgtgtcagcgcccacagctactgcgtaaacgctaccaacggggatggctacctatgcaactgctccacgggatacgccggcaatccctatgtcaccggcggatgcataaatattaatgagtgcgagcttaggagagaagagcctaccaagtatccctgttacggtggtagcagatgctatgacacagagggtggttacaagtgcaagtgccgatttccacatagaggggatgcaactgctgtcgccggaggtattctggcattcgtggtgctgtacattctcaaggagcataggaggcggcagcgaaatagatcatttgacaaaaatggtggcaacatactgaacaagatgatggacatcaaaatcttcagcgaagaggagctgaagaagatgacaaaaaactactgtgagaaaagaatgattgggaaaggctactttggtaaggtttacaaggggatcacccaggacaaccagcaggttgctgtgaagcgctttgtcagaaacggccatgagcttaacaaacaggatttcgcggatgagataacgagccaggctcggatccagcatgagaatctggtccgtctagtcgggtgctgcctgcatacggatgtgcccatgctggttctggagctcatccccaagggtagcctctacgaaaagctccatggcgatggtcggcatacgcatctcccgctaccaactcgcctcgacatcgccgttggctgcgccgaagctttagcatgcatgcactctaacattggccacaaaagcgtcgtccatggggacgtcaagtccggcaatattcttcttggcaacaatctagagcccaaggtctctgactttggatcgtccaagctcatgtcagtcgccaagtctgataactggtccgtgatggctgacatgagctacatcgatcctgcctacatcaagacaggccgtttcacggagaagagcgacgtgtacagttttggagtggtgctcctggaactcatcacccggaagaaagccttggacgacgacagagaaagcctcccgttaaactttgccaagtattacaaggacgactacgcgagaaggaacatgtacgaccagaacatgttgtcatcaaccgatgatgctctgcggcctcgctacatggaatgcctcgacaggatggccaacattgcgattcggtgccttatggaggatattgacgagaggccgaccatggcggaggcgctggaggagctcaagcagttgagtgcaagcctgaacgtgacctag

SEQ ID NO: 3563 - DNA, 1888 bp, Oryza sativa
  Clone ID: PAT_MRT4530_10526C.1
aaaaaaaaaaaccattggttcacattcaagagataccagtaactcgggacatttcagtacctagctcaatatcttctgagctgcaaggaggaagagggagttccgtagccttttacaactgactccctgaaataaaaattgtacccaggaagatggctagatctcaaattctccttatttcatagtaccggagataaatttgagttattgctactgaattataatacaagcggacaccaaacagttccccttctctattaggcttttttatgttccttttaaatagttcagctcaatagacttggatcagcactagaatttcagccaatatagatggaaccatttttcttttaccaagtacatgggcagaacagctataatctgaatgcactctacattcagatgagttaactgtcaagattcatgcactctacgacgcttctcttgggggagctccgatccatcagttgcaattactggggaatcaggggactcggttgctgcagttttcaggttggcacctacattggtagaatttttagggtggttgtctcctattctgtttgggtccaaggcagcctcactgtccttgtctacagaattgcttggctcagatggagttgctgtatctccagacgatggatcctgcacactctgtgtgctggatttacattgcttttcaaacatcttctgcagatatttcccttgttcttcaattcgaagctgcaatttcctctgaatctcgagttgttcatgaaggcgcttctgaacttccatctgaaggcgcagtgcttcagtaagatccatgctctgatccaacagaaaaatgaacatgaaataccaccattccctcaataatgcataatggtaactcgctttcaggtccaaagacaactcatcggtagttttcccttcttgtgttttaccttctgataggtctggcttgtagcgagctgtgcggtacttctttgactgagaatcagtagctgttgcatctagaatatctttccagtcatcattcattatatctgcccaccattcattttgtttagcagcatcagatgtaacagtagaggagccgctctgggtgtgattatcagggacagttatagtatccatgtaatctggcgcgccacaggcaggagctgggaaaaaggttggcacagtgtgtcccccatgggtattattattacataaatactggagcatttcagcattcgacgactgagaaataaagggagcagccataaaatgcccctcatggctagacacagaatcaattgggttagcagcatatcctaacattgctgaatatgatgatctgacaacactggctcttgggtgcgaaatagaagattgagttgcactctggtgcaaaggcatagaatcatttggcagttgccctggcatcagaatattctgggtattatgggatcttgggatatctttcaaagatttcggtagaataggcaaggaggatgacatctctccagaaatacttgttttgcaactgcctcagatcaaacttccctcactgcaattctgcaaatagtgcataagatttgcttctttcccataaaatcgtctgaatgcctttctacagatcaaactcgcccaaaatgttagtccatcactctggggctgcggcggcgcgatcggcgcggcggggagcggcttggcttttcggaggcgacgagggaagtggggaggaggggggggggggaatctgattggggcgatcgcttttttttttcccctcggtgtcgcgacgatgaggtgagggtgaggaggccgcgtgcgagaggatgcgggaatggaggagagattgatcgagatttcgtttcgttgaggggaggggagggatggggagggggggagagagaacctg

SEQ ID NO: 3564 - DNA, 735 bp, Oryza sativa
  unsure (1)..(735): unsure at all n locations
  Clone ID: PAT_MRT4530_10527C.1
tttttttttttttttgatttttgctaattaagcagttccctgccgttcgttgatccatgactttagtcttcaattatattgctgccaagtgtcaaacaatactgatacagaagatacaacgtagtagttccttgtgttcatcaccaacatagtttttgctggatcgtggataaataccaacgtagtagttccttgtgttcatcaccaacatagtttttgctggatcgtggataaataccaagtatctattgggttctgtagtatttgggcgtgtaatgcggcttgacaacgaacccggttttcatctaaaatacaagacatgacatactgaagaattgctagcgagcataaagctgaaattacaagttcaacggattccgtgtgataagttctaagtttcgtcagaactgctgtacatcataatccaacgtaacagcaatctttgtgcttctcaccagcttggtataaaatttccgttacaagtagctgcatagtaccttcgggaagtgatattgccaagcaagaacttcaaagctacctttgacagcattcaacacggagtcacattacaaggctaaccagaaacaaaacttgtcatatcttgcatgagaactaacgaaaacccattgctcatttcattgatttttgcggcttntgtantttcttggggttatgaccantttgccaaaatctttccaaatccctncttagattccnacatcttctcatgaattt

SEQ ID NO: 3565 - DNA, 2215 bp, Oryza sativa
  Clone ID: PAT_MRT4530_10528C.1
acaacattacctttcagaaccgagagcagagtgcctgccagatgccagcgttgtgtgccttccagcgtagcagaggcgatatgtgttcgaagcaagctgccaaactcgcgatgttaatacaactggtattgctgctgcttttctatggacttggcaacgcccctggctcaactgtccacgagaaccgcatagatctacagtcattgttagatttcaagaacggcgtcactgacgatccaagtggagccctagactcttggaacactagcacccacttctgtcggtggaatggtgtcacatgcaccactatgcggccattgcgcgtctcaaagctgaatctcaccgcccaaaacttggcaggcaaaatcagctcatatcttacaaatctcacgtttcttagtttccttgacttgtcctcaaaccacttctctggccagattcctctccttaacaatctacagcagctgaacacccttaacttgagtatcaacacactagagggaactattcctgacgaactcatgaattgttccaatctaagggaactagacatctctggtaattcgctgcatggtacaattcctcctaaaataggctccttaatcaacctagaaattttggaccttacagataataatctcactgggatcatcccggaatctgttcaaaacctcacccaaataaacttcatcagacttaaacacaatcgattagagggaagcattcccaataggatttggcaattaccaaatctgtctagtctttatctaggtgataatacgctatcaggtgaaattccatcgaccctaaatttttcccatatcaggaaactaagtttggaaatgaacaagctaggcaatgtattgccacctaactttggcgatgccttccttcaactccaagaggtaagcttgggtcaaaacaattttgaaggtcagattccaccttcgctagccaatgcttcagaactatggtatatagatttctcattgaataatttcactgggcaaattcctagctctgttggaaggctttcaaagttgtctcgactaaaccttgagcaaaacaagcttgaagcaaatgaaaacaaaggatgggaattcctatatgctctgacaaactgtacttctctaacaattctctcagtagctaagaataatctgcagggatccttaccgcattcagttggtaatctatctatcaatcttcaaattttagcattgaatggaaataacatatcagggaatatacccccaagtataggaaattttcctaacttaacgaaattatcgctaggcacaaacagttttagtggtgaaattggagaatggattggaaatctgaaaaatctggttggtctatctctccatgataacaatttgatcggtccaattaatccctcaattggaaatcttactcggttgtcagtgctcctactacaacacaataaattcgaaggtctcattccccccagcatcggacgtctttcgcaactctcagtattggaaatgagctataataacctccaaggtagcatacctgtagaggttggtaatcttcaacaactggtcgaactgcacctatcgtccaacaaactcactggagaaattcctgatgctttgagtcaatgtcaaatcttacaaatcatcgaaatggaccaaaattttcttacgggaagcattccaatttcattgagcaacattaagagcttgacctcactgaatctttctcacaataacttgtctggtaacatccctacagacatggaagatatgccggtactttctgtgctggacctttcatacaatgatctgcagggagaaataccaagaaatggagtatttaagaattccacggctgtttcacttagaggcaatcgtggattctgcggcggagtgatgaatttccatatgcccccctgcacaactatttcccagagaagagagagacgatccaatttgattaaaatattaattccaatatttggtttcatgtcactggcattgctgctctactttttattccttctgaagaagacgtcaagaagaacgcatctacccttgacatatgttggcgaaaattttccaaaagtttcttataccgatttagctcaagcgacaaaaaatttctcagcatctgagctgattgggagaggaagctatggttcagtttacagaggaaagttaaaagaatccaaaacggatgtggccgtgaa

SEQ ID NO: 3566 - DNA, 615 bp, Oryza sativa
  Clone ID: PAT_MRT4530_10529C.1
ctgcaggacaagcagttcttatgtttcatcaaggaaccatggcacgagggattcatataaggacttaagaaatggaagtcatcaacgccagtaccagaaagtatctgatcatgagaatagaagtattaaagattcagaaagcacagtagatcaaaggtattctcaccatcatgagaacagcggacaccaaagaaattctgatgatcataggaaatatggttataagtacaacaaaaatgggtcagactattattctgaatcaagcagttgtacaagatggtcctcagagagaatatgaccgcatgtcaagagtcagaagcaatgatgtaagtacaactagtcatacccggcatagatcagtgtctgtgactcaagataagttcagtgatagatctgatccccaaagcgcatattctgatgttgatcctgcaacaagcatgattgatgaggcgtctacggggcagcgtgagatataccatgatggggcacatcatagaagaaaacatgatcgccattactgaagaaaacaattgccctttttttggtcagtatactaatacaagcatcttggtatagccttcagctgtatccttttctgtatccttatgcagaaaa

SEQ ID NO: 3567 - DNA, 603 bp, Oryza sativa
  Clone ID: PAT_MRT4530_1052C.1
gccgaggccaaagcccaccaccttctccatcccctccgcttcttctccccctcaaaccacccgagacctggacgacggttggagcagccagcagggggggctaaaaccctagccatgaagtcgctgtgccccaagccaggcaagggcggcaagatccacccctccccactcggcggcggcgacggcgaccccgtccgcgcggcgctgcgcctcctccccgccgccatcctcgcgctcgccaccgccctccgccccgaggaccagcaggtgctcgcgtacctggtcacccgctgcctccagggcgccggcgctgcgcaccacccggagcgggagcacccgcccgcacgcggcggaggcggggggcgccgccgccgcggcgcgcacccgccggccatcgggtgcggctgcttcgactgctacaccagcttctggtcgcgctgggactgctccccgagccgcgagctcatccacgacgccatcgaggcgttcgaggaccacctcgccgccgccgagtcgtccgcccctccgtcctcctcctctaccaagcgccgcgacaagggcaagcgcaggccacctccgccgccgtcgccgatgtcccccaag

SEQ ID NO: 3568 - DNA, 132 bp, Oryza sativa
  Clone ID: PAT_MRT4530_10530C.1
atggtgtcaaaggtggagctgcaggatagactgctgaagaggggtaagcgccgatgcagattgttcgccggaaagcggacaatggtgtggatggtgttctctggtcgacgggagttccattacaaggggtaa

SEQ ID NO: 3569 - DNA, 593 bp, Oryza sativa
  unsure (1)..(593): unsure at all n locations
  Clone ID: PAT_MRT4530_10531C.1
aaacaatcaccatgattgtttttaaaaaccttttttccccttggttacctaaaaaataatgaggggaaaaaaaaatgtagtaatttttttactaatcgacaaatcagttgggaaactgcaaaaaccctaaaaaatttgctcactttaaatgccattaactggacctgttcagctcctttttggactggatgcaattggactttgtagttccctttaattttatttctgaacatcatcctcaaaatagccctcaacccgtaacagtaacccttcccgggcaagcttgagcacccaccttgggcccaaaccctggagtactgaccccttcattttccctataactttggtgcaaaagggggttttgttgttgctgggacaaaaccaaattttgcaataacaaaacccgcgggggggggtttttaattgggattcacctttggcagggctgcccttatgaaccgcaaaaaaaacccccctgaacaccaagggggattttctgtgggggtaatgagaggggagggggggaccccnaaacgttcaaagcctttttccctttgccaaccgaagtattttttgaaaaattttatcccccc

SEQ ID NO: 3570 - DNA, 517 bp, Oryza sativa
  Clone ID: PAT_MRT4530_10532C.1
gttgtggtggtgaggacatcaaactggaacacgggggcgatggcggcggcggctcgatcctgagggatgcgagagttctctatctgttcctgtaactaaatctatattgttgagagaagaagatagcgatcctaacaaagagcccgggtgcgacggcgccgcgggcgcgctccgccacgcgtggcggcttgcggcgatggagcccgcggaggcggcgttgttcgtgctggcgatgccggccgtcgccggcgcggcctcgccgttcttcgtggtggccgccgccgcgagcgcgccggcgagcgtggcgtggcgcgctctgctggggttggtgtacgtgaccgtgtccggcgcggcgcaggtggtgtccatgtgcgcggtgaccgtgttctactacaagtgcaagctgcggtgcaaggaggcggattcgctgcgcaacgatgaacccgatgtttagtgaagaaatggagtacgttataaacatataattagatgaagcatagaggagaaagaggaggag

SEQ ID NO: 3571 - DNA, 3480 bp, Oryza sativa
  Clone ID: PAT_MRT4530_10533C.1
atggacggcggaggcgagacagagcacgggagcggcggcaatggcgaggaggcgaatgggagaggaaggaagggaggggggggggcttgggtttattggaggcgggaaggctattacagaaaatttgttcagggttatagtatcatagcacgaccattgacactcttgttgaagaagaaggcctttctttggactgatgctgctcagcttgcttttgatcagttgaagacagctatgagtaacactccagtgttagctttgcccaattttcagcttccttttactttggagaatgatgcatgtgcttatggtcttggtgctgttttaagtcagcagagtcaccctattgcttattatagcaaaactttgggtcctgttaatcagaaattgtccatttacgaaaaagagtttctagctattatgatggctgtggataagtggagatgttatctgcagagaggtccatttatcattaaaacagatcacaaaagcttgtgtcatttggatgatcaaatattggggactgaattacagcaaaaggcaatgactaaattgatgggtttgcaatattctttccaatacaagagaggggttgataatattgttgctgatgctttatctagaatgccttcctcctctcaattttgtgctctttctgtggtccaaccgatctggattcaggaggtgatcaattcttatacagtggatcctcaagctcagcagctactagctgagttggctgtgcattctcctaattctcaagggtattcattgacacaagggattattagattccagaataagatttggattggatccaatgcaggactgcatactaagttgattcaagcttttcatgcttctgcacttggtggccattctgggattgctgctacttatcatcggtttaagaaattatttgcttggcctggtctcaagttggatgttgaaaattttgtgaagcaatgtcaggtttgccaacaggccaaacatgaacactgtcggcttcctggactgttagctcctctcccaattccaaaagaggcctggcaggacatctccatggattttattgaaggtttaccgcgctctgatggttataatgcaattttggtggtggtggatcgttttactaagtatgcggatttcattcctttgcgtcatccattcactgcatcacaagtggctcatctggtggacaaaactgtatttaaaactcagggcatccctcgttctattgtgtctgatcgtgatcgtctctttactagcaagttctggacaactctttttgctacttgggacactcaattacagatgagcacagcatatcacccgcaaacagatggccaaacagagcgtgctctttttggggtggatcctcattattctcaagttcctgatctgacattggctactctgcctgatgtggtggatgttcagactgaaaggcagcacttgtctgaatttttacagcagcagttaactcgagcccagctgcgtatgaagaacaaggctgataaaggtcgttctgaccgtgtttttgctatgggtgatgctgttttcttgaagttacagccttatgctcagtcctcagtagttaatagaccatatcctaagttggcttataagttctttggctcttttactgttttggagcgcattggagtggcggcttatcgtttggatctacctgccagcagcactgtgcatccggtgtttcatgtttctcaactcaaagctcaggtgttgctgaaatggtctttattaccagcagatcatgctacttgggaggactatcatgttgtgaagactcgctttccagatgctccagcttggggacaagctgaaactcctgcgggcggcactgtcatgaccggcaatggtgacactgagaaagaggtgcgtctgagtaaggagcgcaatactaacgaggacaggctcagcagcttacctgatgagatactcatcctgattctcgacaagctagatgcacgcacaacaataaccaccactatcctttcaaagcgatggcttaatcttcctcggcgctcccacacatgttacgacttcgccgttgatgacctcctccctccacgctaccacaggttgaagcgactgtggatggaagccaaggcagcgtatgaggcagagaagtcaccatatgtgacaacaaacagggatgctgtgaacctgagcgacttttatgccatgaaggacaagatggatcagtggacgaggaggatccgtccactcacggctgccctggaacgctatgaacgctgggccatgcggcactatgtcaagcgggtggatgcattccttctgccccccgatggtgtgcaccgaactatccaaaagctaaggcttcaaacctttggcaggaagtggaaccaattcattcagcgatgggttactgcagcgattgccaggtggggagttgaggattttgagcttaacgttgaaggccgttgcatcgcctatgacttcaagatacttgatggatgtcagaatttgcagctgaagcggctcgttctgttcaactgccctcccttgggttcatttaattccttgacgtttcagaggctcacgagactctccttgtgtaaaacttcgtactttggattggctaatcggattttgacacattgtgtgcatctattggactttagtatcagatattgtccgggttactgtgctggtggtctccgtatcaatgtcccaacatcaaggttaaagaatctgctggtggacaactgcaaatttgggaaaatctatctgcattcactgccctgtcttgaaacttttgcttgccggggcctactgccttccaagatatactatggcgaggtgcctggacttaggcatgtaggtttggactatctaaaaaccgaaggcgacagcaaagtcgatccaagtgttagcaacagaacatatccactgagcaaattcttgaagaggatcccgccaattgagagccttgttctgcagttcaaaggacctgaggtgtggattgagccaatagctgtacccgacccgttgcttcatctcaagaagctattcattgcaaacgtaccaattaattgggatatattctggattgtcaccctgcttgatgctgcgccggttttggagtcatgccatgttcatattgacaacaggtcggaaaatatggcttcttggctagacgtgcaagctcaagatcgtcagtaccattgcctgaaggagctcgttgtcgtcggcttcaatgcagtagggtggcaaatcggctttgtcaggcatgtcatgaaggcgtcgccgaggatgagacgggtgcacttgctcgatgggcatgtcgttgaagacaaggagcgggtgctcgagggattggaggtagtcccacatacgcgggagtggcacgagtttgagagatcagaggtcctcgatgatctctgggatgggaatgggatctgctcgccgcaactggaaataattctggaatga

SEQ ID NO: 3572 - DNA, 248 bp, Oryza sativa
  Clone ID: PAT_MRT4530_10534C.1
tgccctttgcctcgccaccagccgagcggtgccgtgggaaagccgacccggcacaaagactgcggtggcggggccctgctccctcctcgaggaagccagcggcggagacacccgggctgctcgggagcggcggtccccggcgcgggaggcggcgcccgggggttggcgtggccgatcccggcacgccggaagcggatccctctcccccggaagcggatctgggccctgcgtgggcagggcccaacaac

SEQ ID NO: 3573 - DNA, 3402 bp, Oryza sativa
  Clone ID: PAT_MRT4530_10535C.1
atggagtccaaactcttggagaagttggaaggcatcacaaagtggatgcacgagattgatcagcggctggattcccaaggtggcagtctcgagaaggtgactaccaaggtggatctcgccatggattccgtcggcaagtttagaatggcagtcgaaacagaatttgagggtgttgtggaacgtgagaaaatgtctgcactagatactctgactcaaactggtacaatgactgagtataaacaacaatttgattctcttgtctatcagatcagagtgtttgatccatctgtgggggaaattcgagctgctgttgttgttcaattgcctgacactgtacagcaagcatctgctattgctcttatgcaggaatctgtcttggctagtagagctaccaaagctctcaaagggaaatttgtgaaacttcctcagtacaagagtgatatcagttctgatactgctccaggtcgagtagataaagaggatctatggaaggctaagcagttgaaagactatcgacgtgctcagggtctttgttttaagtgtggtgacaaatatactcctgaacatcgttgtgctgttggaggccaaatcaaagctatgcagttggaagaggtgctcactgatgacatattggatgttgttattgctgcagaacaatctgatgatgaggaggactgtcatatttctctgaatgcattgacaggagctcaccttcctactgctattcatttgagagcattggttcacagtaaagtcttgttacttttggtggattctggcagctctcacagctttattgattacaactttgcacagatgctgggtttacctctaaaaccaattccttctactctggtgaaagttgctaatggtgattgcttaccttgtcagtatgtggttcctggtttttcttggtggattcaggggcacacatttacttatgacatgagggtggtcactttggggggtcacgatgccatcttaggtagggactggcttgagcaatggggggaaatgtcttgtcattgggctaataaaacactcaagtttcagtatcaagggtcttggatttctcttcaaggagtacaagatgctgcagtcccttctgaaattgctgctgtcactctgccacaacttttgaaatggcataagggttgtgaaatatggactgctgctttgttggaacattcccaggatgatgtccagcatgtgattccttcttcagtgcaacaattgttaactgactttgacgatgtctttcacgatcctaagtgtcttcccccacacagggtttttgatcatgctatttctctagtacctgatgctattcctgtcaactgcagaccttatcgctattatccattacaaaaagacgagattgagaaacaggtgaacgaaatgattgatgctggtttaattacacctagtatgagtccctatgcatcacctgttttacttgtcaagaaaaaggatggttgttggcgtttttgtgtggattacagaagattaaatgctctcaccattaaaagtaagtttcctatgctggttgttgatgaattattggatgagctctcaggcactaaattcttctctaaactggacttgaaagctgggtatcatcaaattcgaatggtggaaactgatgaagccaagacagcctttaagacacatcatgggcaatttcagtttaggcaccagttgtttgctaagaggtctaaatgctcttttgcttgcactcaactagaatacttaggacatatcatttctgacaaaggagttagtactgatcctgagaagacagcagcaatgctggcttggcctgtgcctacttctgttactgaattgaggggatttttgggactgacaggctattacagaaaatttgttcagggttatagtatcataacacgaccattgacactcttgttgaagaagaatgcctttctttggactgatgctgctcagcttgcttttgatcagttgaagacaactatgagtaacactccagtgttagctttgcccaattttcagcttccttttactttggagactgatgcatgtgcttatggtcttggtgttgttttaagtcagcagggtcaccctattgcttattatagcaaaactttgggtcctgttaatcagaaattgtccatttacgaaaaagagtttctagctattatgatggctgtggataagtggagatgttatctgcagagaggtccatttatcattaaaacagatcacaaaagcttgtgtcatttggatgatcaaatattggggactgaattacagcaaaaggcaatgactaaattgatgggtttgcaatattcttttcaatacaagagaggggttgataatattgttgctgatgctttatctagaatgccttcctcctctcaattttgtgctctttctgtggtccaaccgatctggattcaggaggtgatcaattcttatacagtggatcctcaagctcagcagctactagctgagttggctgtgcattctcctaattctcaagggtattcattgacacaagggattattagattccagaataagatttggattggatccaatgcaggactgcatactaagttgattcaagcttttcatgcttctgcacttggtggccattctgggattgctgctacttatcatcgaattaagaaattatttgcttggcctggtctcaagttggatgttgaaaattttgtgaagcaatgtcaggctctttttggggtggatcctcattattctcaagttcctgatctgacattggctactctgcctgatgtggtggatgttcagactgaaaggcagcacttgtctgaatttttacagcagcagttaactcgagcccagctgcgtatgaagaacaaggctgataaaggtcgttctgaccgtgtttttgctatgggtgatgctgttttcttgaagttacagccttatgctcagtcctcagtagttaatagaccatatcctaagttggcttataagttctttggcccttttactgttttggagcgcattggagtggcggcttatcgtttggatctacctgccagcagcactgtgcatccagtgtttcatgtttctcaactcaaagctcaggtgccagatcatactcctgtttatacttctttgccatccccagtggttcttaatgctgctgacattgttcctgaggcgattttggagcgtcgactagtgaagcgctgcaatgcagctcatgtccaggtgttgctgaaatggtcttcattaccagcagatcatgctacttgggaggactatcatgttgtgaagactcgctttccagatgctccagcttggggacaagctgaaactcctgcgggcggcactgtcatgaccggcaatggtgacactgagaaagaggtttaa

SEQ ID NO: 3574 - DNA, 4446 bp, Oryza sativa
  Clone ID: PAT_MRT4530_10536C.1
atggcgtacagggcgcctactctccggccgcagctcgcggcgtctccggcgagccgagttccgctatctgattctcgtcggccgccagtatattccggaagtaacggcttctggagcggcagaggcagatcgggtcgcgcttcgaccagctcgagtagggttgaggacaaggtactccgacgacgaggtttggatggtgaccaaacttcagtccgcgctttctcgagcccaagagaaggggcgaattggatgggcagtagtcccgcttcctctagcagcagcagtagtagccatgcttcctcctcgagcgaaagttggattagagataagctgtccggtgtccgtccgtcatcgctcgccgggcgggcaccgaccaccggcaccaagaggcagtgcagcagtcctccgccatcagctgatcgttcagagaagaaggcgaaagaagatctggcgatggaggagcctccggaggctctggcaatggaggagcagcaggatgcacttgcaactaaggagcaagctctggcaatggaggaggagcagggtgcccctgcaactaagggggagcaggaggtgttgcccgagatggaggaggagcaactggtgatggaggaggagcaggagtcgttggcgatggataagatggagtcggggatggaggagcagccagggatagaggaggaggtgttgccggagatggaggagcaactgatgatagaggaggagcaggagttgtcggcgatggataagatggagtcggggatggaggagcagccagggatagaggaggaggtgttgccggagatggaggagcaactgatgatagaggaggagcaggagttgtcggcgatggataagatggagtcggggatggaggagcagccagggatagaggaggaggtgttgccggagatggaggagcaactgatgatagaggaggagcaggagttgtcggcgatggataagatggagtcggggatggaggagcagcctgggatagaggaggagcaaccggcgacggaggagttgggcgccgatgatgcgctccctagtgcgaatactcatctggatctggtctcctcccatctccgcgatgatggcaactggctcactgtgatgtcctctttatgccatcccagcaggggttggtgcctctgggctatctttgggtcgcacgcttttgccattgacaccaccgcggacgcagacattttgacattggatttggctggactgaaagaaactacttcttgccctagagcaaaaggtaataatgtaaagcactgtggcactgagagctgcgcatcatcatggatcaagccaggaattctgcaagcccctttgaagcaagctatggactccatggagtccaaactcttggagaagttggaaggcatcacaaagtggatgcacgagattgatcagcggctggattcccaaagtggcagtctcgagaaggtgactaccaaggtggatctcgccatggattccgtcggcaaggtgcagcaagagtgtgctgagttggcccgttcgatgaagcgggtggccagctgctctgatcaggccgggattttgggttcgcctttcgggatctcgcaggttagtgcaagtggttccgcgactcctccgccgttgaatccacttgttcctcctgtgttggatggggttgatttgggtcatggttttggtgatgggatttatcggcgtcatcagccacttcctaaaatggattttcctcgtttcgatggttctgatgtgcggatttggttggatatgtgtgagacttattttgacatgtaccaaatcactcaaaatttcaaagtctctgctgctgtgttgcatatgtcgggaaatgcggctcaatggtatcattcttataagttagtgaatgaggttaactcttgggatcagtttagaatggcagtcgcaacagaatttgagtgtgttgtggaacgtgagaaaatgtctgcactagatactctgactcaaactggtacaatgactgagtataaacaacaatttgattctcttgtctatcagatcagagtgtttgatccatctatggggggtaaaatgttagtgactcattttatgaatggtcttactgaagaaattcgagctgctgttgttattcaattgcctgacactgtacagcaagcatctgctattgctcttatgcaggaatctgtcttggctagtagagctaccaaagctctcaaagggaaatttgtgaaacttcctcagtacaagagtgatgtcagttctgatactactctaggtcgagtagataaaggggatctatggaaggctaagcagttgaaagactatcgacgtgctcagggtctttgttttaagtgtggtgacaaatatactcctgaacatcgttgtgctgttggaggccaaatcaaagctatgaagttggaagaggtgctcactgatgacatattggatgctgttattgctgcagaacaatctgatgatgaggaggactgtcatatttctctgaatgcatttacaggagctcaccttcctactgctattcatttgagagcattggttcacagtaaagtcttgttacttttggtggattctggcagctctcacagctttattgattacaactttgcacatatgctgggtttacctctaaaaccaattccttctactctggtgaaagttgctaatggtgattgcttaccttgtcaaccttatcgctattctccgttacaaaaagacgagattgagaaacaggtgaaagaaatgattgatgctggtttaattacacctagtatgagtccctatacatcacctgttttacttgtcaagaaaaaggatggtagttggcgtttttgtgtggattacagaagattaaatgctctcaccattaaaagtactaaattcttctctaaactggacttgaaagctgggtatcatcaaattcgaatggtggaaactgatgaagccaagacagcctttaagacacatcatgggcaatttcagtttagggaggtgatcaattcttatacagtggatcctcaagctcagcagctactagctgagttggctgtgcattctcctaattctcaagggtattcattgacacaagggattattagattccagaataagatttggattggatccaatgcaggactgcatactaagttgattcaagcttttcatgcttctgcacttggtggccattctgggattgctgctacttatcatcggattaagaaattatttgcttggcctggtctcaagttggatgttgaaaattttgtgaagcaatgtcaggtttgccaacaggccaaacatgaacactgtcagcttcctggactgttagctcctctcccaattccaaaagaggcctggcaggacatctccatggattttattgaaggtttaccgcgctctgatggttataatgcaattttggtggtggtggatcgttttactaagtatgcgaatttcattcctttgcgtcatccattcactgcatcacaagtggctcatttggtggacaaaactgtatttaaaactcatggcatccctcgttctattgtgtctgatcgtgatcatctctttactagcaagttctggacaactctttttgctacttgggacactcaattacagatgagcacagcatatcacccgcaaacagatagccaaacagagcgtgtcaatcaatgtttggaaatgtatttacgatgcatgactcaggctaaccctaagaagtggagccattggattcatttggcagaattttggtgcaatacaaattatcatacatctcttggctgttctcctcataaggctctttttggggtggatcctcattattctcaagttcctgatctgacattggctactctgcctgatgtgcagcagttaactcgagcccagctgcgtatgaagaacaaggctgataaaggtcgttctgaccgtgtttttgctgtgggtgatgctgttttcttgaagttacagccttatgctcagtcctcagtagttaatagaccatatcctaagttggcttataagttctttggcccttttactgttttggagcgcattggagtggcggcttatcgtttggatctacctgccagcagcactgtgcatccggtgtttcatgtttctcaactcaaagctcaggtgccagatcatactcctgtttatacttctttgccatccccagtggttcttgatgctgctgacgttgttcctgaggcgattttggagcgtcgactagtgaagcgcggcaatgcagctcatgtccaggtgttgctgaaatggtctttattaccagcagatcatgctacttgggaggactatcatgttgtgaagactcgctttccagatgctccagcttggggacaagctaaaactcctgcgggcggcactgtcatgaccggcaatggtgacactgagaaagaggtttaa

SEQ ID NO: 3575 - DNA, 1875 bp, Oryza sativa
  Clone ID: PAT_MRT4530_10537C.1
atggagtccaaactcttggagaagttggaaggcatcacaaagtggatgcacgagattgatcagcggctggattcccaaggtggcagtcttgagaaggtgactaccaaggtggatctcgccatggattccgtcggcaaggtgcagcaagagtgtgctgagttggcccgttcgatgaagcgggtggccagctgctctgatcaggccgggattttgggttcgccttccgggatctcgcaggaatctgtcttggctagtagagctaccaaagctctcaaagggaaatttgtgaaacttcctcagtacaagagtgatgtcagttctgatactactccaggtcgagtagataaaggggatctatggaaggctaagcagttgaaagactatcgacgtgctcagggtctttgttttaagtgtggtgacaaatatactcctgaacatcgttgtgctgttggaggccaaatcaaagctatgcagttggaagaggtgctcactgatgacatattggatgttgttattgctgcagaacaatctgatgatgaggaggactgtcatatttctctgaatgcattgacaggagcttaccttcttactgctattcgtttgagagcattggttcatagtaaagtcttgttacttttggtggattctggcagctctcacaactttattgattacaactttgcacagatgctgggtttacctctaaaaccaattccttctactctggtgaaagttgctaatggtgattgcttaccttgtcagtatgtggttcctggttttttttggtggattcaggggcacacatttacttatgacatgagggtggtcactttggggggtcacgatgccatcttgggtatggactggcttgagcaatggggggaaatgtcttgtcattgggctaataaaacactcaagtttcagtatcaagggtcttggatttctcttcaaggagtacaagatgctgcagtcccttctgaaattgctgctgtcactctgccacaacttttgaaatggcataagggttgtgaaatatgggctgctgctttgttggaacattcccaggatgatgtccagcatgtgattccttcttcggtgcaacaattgttaactgactttgacgatgtctttcacgatcctaagtgtcttcccccacatagggtttttgatcatgctatttctctagtacctgatgctactcctgtcaactacagaccttatcgctattctccgttacaaaaagacgagattgagaaacaggtgaaagaaatgattgatgctggtttaattacacctagtatgagtccctatgcatcacctgttttacttgtcaagaaaaaggatggtagttggcgtttttgtgtggattacagaagattaaatgctctcaccattaaaagtaagtttcctatgccggttgttgatgaattattggatgagctctcaggcactaaattcttctctaaactggacttgaaagctgggtatcatcaaattcgaatggtggaaactgatgaagccaagacaacctttaagacacatcatgggcaatttcagtttagggttatgccatttggtctcacgaatgcaccctccacctttcagtgccttatgaactcagtctttgcaccatttatcaggaagtttgtgttggtgtttatggatgatatcttagtttatagccctgaccttgatagtcatttgcatcatcttcagcaagtttttgctattttgaggcaacaccagttatttgctaagaggtctaaatgctcttttgcttgcactcaactggaatacttaggacatatcatttctgacaaaggagttagtactgtgtcacgccccgaactagtaccgaccggaactagcccgtga

SEQ ID NO: 3576 - DNA, 4101 bp, Oryza sativa
  Clone ID: PAT_MRT4530_10538C.1
atggagtccaaactcttggagaagttggaaggcatcataaagtggatgcacgagattgatcagtggctggattcccaaggtggcagtctcgagaaggtgactaccaaggtggatctcgccatggatttcgttggcaaggtgcagcaagagtgtgctgagttggcccgttcgatgaagcgggtggccaactgctctgatcaggccgggattttgggttcgccttccgggatctcgcaggttagtgcaagtggttccgcgactcctccgccgttgaatccacctgttcctcctgtgttggatggggttgatttgggtcgtggttttggtgatgggatttatcggcgtcatcagccacttcctaaaatggattttcctcgtttcgatggttctgatgtgcggatttggttgaatatgtgtgagacttattttgacatgtaccaaatcactcaaaatttcaaagtctctgctgttgtgttgcatatgtcgggaaatgcggctcaatggtatcattcttataagttagtgaatgaggttaactcttgggatcaatttagaatggcagtcgcaacagaatttgagggtgttgtggaacgtgagaaaatgtctgcactagatactctgactcaaactggtacagtgactgagtataaacaacaatttgattatcttgtctatcagatcagagtgtttgatccatctgtggggggtaaaatgttagtgactcgttttatgaatggtcttactgaagaaattcgagctgctgttgttgttcaattgcctgacactgtacagcaatcatctgctattgctcttatgcaggaatctgtcttggctagtagagctaccaaagctctcaaagggaaatttgtgaaacttcctcagtacaagagtgatgtcagttctgatactactccaggtcaagtagataaaggggatctatggaaggctaagcagttgaaagactatcgacgtgctcagggtctttgttttaagtgtggtgacaaatatactcctgaacatcgttgtgctgttggaggccaaatcaaagctatgcagttggaagaggtgctcactgatgacatattggatgctgttattgctgcagaacaatctgatgatgaggaggactgtcatatttctctaaatgcattgacaggagctcaccttcctactgctattcttttgagagcattggttcacagtaaagtcttgttacttttggtggattatggcagctctcacagctttattgattacaactttgcacagatgctgggtttacctctaaaaccaattccttctactctggtgaaagttgctaatggtgattgcttaccttgtcaaccttatcgctattctccgttacaaaaagacgagattgagaaacaggtgaaagaaatgattgatgctggtttaattacacctagtatgagtccctatgcatcacctgttttacttgtcaagaaaaaggatggtagttggcgtttttgtgtggattacagaagattaaatgctctcaccattaaaagtaagtttcctatgccggttgttgatgaattattggatgagctctcaggcactaaattcttctctaaactggacttgaaagctgggtatcatcaaattcgaatggtggaaactgatgaagccaagacagcctttaagacacatcatgggcaatttcagtttagggttatgccatttggtctcacgaatgcaccctccacctttcagtgccttatgaactcagtctttgcaccatttatcaggaagtttgtgttggtgtttatggacaatatcttagtttatagccctgaccttgatagtcatttgcatcatcttcagcaagtttttgttattttgaggcagcaccagttatttgctaagaggtctaaatgcacttttgcttgcactcaactggaatacttaggatatatcatttctgacaaaggagttagtactgatcctgagaagacagcagcaatgctggcttggcctgtgcctacttctgttactgaattgaggggatttttgggactgacaggctattacagaaaatttgttcagggttatagtatcatagcacgaccattgatactcttgttgaagaagaaggcctttctttggactgatgctgctcagcttgcttttgatcagttgaagacagctatgagtaacactccaatgttagctttgcccaattttcagcttccttttactttggagactgatgcatgtgcttatggtcttggtgctgttttaagtcagcagggtcaccctattgcttattatagcaaaactttgggccctgttaatcagaaattgtccatttacgaaaaagagtttctagctattatgatggctgtggataagtggagatgttatctgcagagaggtccatttatcattaaaacatatcacaaaatcttgtgtcatttggatgatcaaatattggggactgaattacagcaaaaggcaatgactaaattgatgggtttgcaatattcttttcaatacaagagaggggttaataatattgttgctgatgctttatctagaatgccttcctcctctcaattttgtgctttttctgtggtccaaccgatctggattcaggagatgatcaattcttatacagtggatcctcaagctcagcagctactagctgagttggctgtgcattctcctaattctcaagggtattcattgacacaagggattattagattccagaataagatttggattggatccaatgcaggactgcatactaagttgattcaagcttttcatgcttctgcacttggtggccattctgggattgctgctacttatcatcggattaagaaattatttgcttggcctggtctcaagttggatgttgaaaattttgtgaagcaatgtcaggtttgccaacaggccaaacatgaacactgtcggcttcctggactgttagctcctctcccaattccaaaagaggcctggcaggacatctccatggattttattgaaggtttaccgcgctctgatggctataatgcaattttggtggtggtggatcgttttactaagtatgcgaatttcattcctttgcgtcatccattcactgcatcacaagtggctcatctggtggacaaaactgtatttaaaactcatggcatccctcgttctattgtgtctgatcgtgatcgtctctttactagcaagttctggacaactctttttgctacttgggacactcaattacagatgagcacagcatatcacccgcaaacagatggccaaatagagcgtgtcaatcagtgtttggaaatgtatttacgatgcatgactcaggctaaccctaagaagtggagccattggattcatttggcagaattttggtacaatacaaattatcatacatatcttggctgttctcctcataaggctctttttggggtggatcctcattattctcaagttcctgatctgacattggctactctgcctgatgtggtggatgttcagactgaaaggcagcacttgtctgaatttttacagcagcagttaactcgagcccagctgcgcatgaagaacaaggttgataaaggtcgttctgaccgtgtttttgctgtgggtgatgctgttttcttgaagttacagccttatgctcagtcctcagtagttaatagaccatatcctaagttggcttataagttctttggcccttttactgttttggagcgcattggagtggcggcttatcgtttggatctacctgccagcagcactgtgcatccggtgtttcatgtttctcaactcaaagctcaggtgccagatcatactcctgtttatacttctttgccatcccaagtggttcttgatgctgctgacgttgttcctgaggcgattttggagcgtcgactagtgaagcgcagcaatgcagctcatgtccaggtgttgctgaaatggtcttcattaccagcagatcatgctacttgggaggactatcatgttgtgaagactcgctttccagatgctccagcttggggacaagctgaaactcctgcgggcggcactgtcatgaccggcaatggtgacactgagaaagaggtttaa

SEQ ID NO: 3577 - DNA, 164 bp, Oryza sativa
  Clone ID: PAT_MRT4530_10539C.1
ccggccgggatctgcacatctagcagaaacaaactcctctcactcccagagacctgctgttgtcacctagcccactagcatgtatccttgcctctcccggccgtctagaacgttcgacatgcagaggatgacgaccataggcatgagctccgccagtggaacga

SEQ ID NO: 3578 - DNA, 675 bp, Oryza sativa
  Clone ID: PAT_MRT4530_1053C.1
atggcggcagcggcggcggctcgggtgcagcgtgcgaaccctcctcctcgccgaagcgatcgcgcacaggggaagactcggtgtaggatgaatctagcgaggcgcataagaccagtggtgggggagtgggcggtggcggcgccggccagtcatcctccgcggtttcgtacgaggaagaaggggatgacgccgccgacctggggtagaactcgaccgatggctcggcgggaggatggggcgaaggggagtcgggctgcctcgtcgctgcgggtgcagatggtgccgccgagctacccagctctagaagcgaggggaagaacgaaggctgcgtcggtgggcctgccgcacagggagtcccatcgatcggaggttgcggttcttccaccctgggtcgctccttggtggcctgacctggagacggtggcaagatgggggtggcgtggtggggctgcggggatggctcaggtggagcgccggttggtagggagtggtctccttggagaggaggaggaggagaaggggaatgggatggcggaggtgaacccatgtgtgtgctttccggtggtacggttgtctctagcgagctcgccatgggtgagggggtggcgccgcgcgacggcggcggtatacgcgagtggatatgaggagataaggccgaggggtatttgcgtctga

SEQ ID NO: 3579 - DNA, 441 bp, Oryza sativa
  unsure (1)..(441): unsure at all n locations
  Clone ID: PAT_MRT4530_10540C.1
caacatgtttactgtatgcactcggagggatcttgtgaaccagtttgggtcacacaagaaaagtaaaacctcttcttactcagaccaattcagagtcatctgccatgtgaagcctttttctggtttatctgctgacaatcaactaaccgttgatttatattgttctgatctgccacacccttcggtccacagttttgttgtaaattattcattcattattcctcaaaaatcgtcacggtctctatgtacaaggacttgcaccattcaccagatagatacacgttaagaggcaaantatcctaccttgatggtacctgtaaagttctctttcatttggtgcaaaggaacaatattgaccctttatatttgctatatacgaatgtgtaacatatgaatttgtgatgcacccggtgctgcaatcttatcaaaaaaaaaaaaaaa

SEQ ID NO: 3580 - DNA, 306 bp, Oryza sativa
  Clone ID: PAT_MRT4530_10541C.1
atgggcgacggcctcatcgaacccgccgccacgaagctgccgccggggaggagagggtttttggcgataagagcctcccgcgagtggaaggcgaggattcaacggtgcatcgagaggtccgaattgagttttataccacagtacagagacaaatgcaaaccattggatcctcagggctccatcggtcctgaacctgaactgtggattaactttcatgtttcagctctcgagctccttgggttccttctaatggcacatgtccccaatagcctcatcggttattcggttaatataatcaagagctga

SEQ ID NO: 3581 - DNA, 540 bp, Oryza sativa
  Clone ID: PAT_MRT4530_10542C.1
gaggatgccacagcctcccctcccctcccgctggatctagacgccgggccaccaccatctcaccgccacctcccctcccactggatccagcggaggggagggcgccgccccaccaccaccgtctcccctcccgtccctccaggaaaccgggccgccgccgcctcccctcccactggatccggcggaggggagggcaccgctaccaccacacaggagacggagaggaagagggtgctgctggccatggggaaggagccatggagggggaggggacggaggaagagggtgctgggaaggagccatgggaggggaagggggacggcatgcgtagagggtgaggggagggggaaggagtcgccggatgagaaggagataggggcgggcggagaagagaaaaaagaggcgggcagaagtaacgagataagggcgggcggaagtaacgaggcgcgccgctctctcgctctccgcttgtgtgccaccatcacgctcgtatgggcatttttttttaaaaaaaagtcagagcaagcaattaatacatga

SEQ ID NO: 3582 - DNA, 427 bp, Oryza sativa
  Clone ID: PAT_MRT4530_10543C.1
ttgaaaatgacaaggactactcggattgtatccatattggtttccctagttctatttggacaagggatacctatgggtataaatacaaggccccctaggaggagaggggacacgaaacaatagatcaatatacaagccaacatacgccaagacaagccgccggatatcaacatcggagataagcctagtagtccccatacggtagctacgactaccgtcaagagggatctaacgctgtctctgatctcgctggacacggattcgaggaggaagactactttattgtcgactacgtgtcagcacttcagaccgccatatcgacaacagatagaaaggctaccccaaatattctactgtctcgcatatatcctagtaccaacattccccatactatgcaaataccggaatcgcgacatcaaacgtcgac

SEQ ID NO: 3583 - DNA, 311 bp, Oryza sativa
  Clone ID: PAT_MRT4530_10544C.1
atttgaagtcgtatttgggagaagaagatgagcttgagtcgaggacgattaaaatgcaagaaggggaggatgatgaggacatcaacaccattgatacatccacgtccccacaagtacaacttcatggaacaatggagaggatacaaaggggagaggattcacgcgggttggattcggactgcaggacagcgccaacttctgatggccgccacgacttcatgcgaactccgatttgggcgtgcaaaggcttgaggcagacgcaatcgcccacgtggcctggcaccttcggggacgtcgggcccgagggtgag

SEQ ID NO: 3584 - DNA, 1108 bp, Oryza sativa
  Clone ID: PAT_MRT4530_10545C.1
atggcgctccgacgcctcgcggcacttctctccttggcagtagtactactgtccgccggcctcgccgccgcgtcgccgacgtcccagaacaccggcgacaccgtgatcttctggggccggaacaaggacgagggctccctcagggaggcctgcgacgccggccgctacaccaccgtcatcatctccttcctcagcgccttcggctacatccccggctcctacaagctcgacatctccggccacccggtctccgccgtcggccccgacatcaagtactgccagtccaagggcatactcatcctcctcgccatcggcggccagggcggcgagtactccctcccgtccccccaggcggccgtcgagctgcacgaccacctctggtactcctacctcggcggccgccgcaacggcgtctaccgcccgttcggcgacgccatcgtcaacggcatcgacttcttcatcgaccagggcgccagggagcactacaacgagctggccaagctgctctacgcccacaacaaggactaccgcgccacggtcggcgtgatgctgacggcgacgacgcggtgcggctacccggaccaccggctggacgaggcgctggcgacggggctcttccaccgcatccacgtcaagatgttcagcgacggccggtgcccggcatcgtcctggaggcagtcgttccagaagtgggcgaagacgtacccgcagagccgtgtcctggtcggcgtcgtggcctcgccggacgtggacagggacgcctacatcccgccggaggccctcaacaacctgctgcagtacgtcttcagcaagctgcccaacttcggaggcgtcatggtctgggacaggttctacgacgagaagaccggcttcacggctcgcctgccagcgggaggcggcggcggccgccgcggcagcgacgacaggcggacctagcgacggcgctcgggcgcggcggggcggcggctctcgggcgcggtgggcggtggcgctcaggcgcggcagggcgatggctctcgggccgggccacgacgacgacggcgaccaccaccaccaccacgacgatgggctgggccatgacgacgacgacaaccacggcgactggtga

SEQ ID NO: 3585 - DNA, 145 bp, Oryza sativa
  Clone ID: PAT_MRT4530_10546C.1
ctggcgcgttacacgcggactggaaacctgcgaccaataatgctgagaatcccttcgcagtgggtatacaaaggccgaccgacgccttcaacattgccagctgatggcaaggaccgcctgtgcgggcattaacgcgcgggtgtgt

SEQ ID NO: 3586 - DNA, 475 bp, Oryza sativa
  unsure (1)..(475): unsure at all n locations
  Clone ID: PAT_MRT4530_10547C.1
acnatcgggggggtgtttanaaccaaaatattgtttnaattatcacctccccccccgaaaggggtgcttgatcntcgggaggtccaatggtggtaagtggggatggcagcgtcaaacttactcggtctgttgtttccgttgaattgctggggggattgaagctgactgcagaggctttgggtgatgaaaaaactgttgttgatagcggcacggtcatcttcaaaccacaaagagctggtagagcggatggatttcttaatcttaaaggttgtaagatggctgttagaattgcttggtctcgtctttcctttttttgagtgtacactcagaagcctatgctatctacggaatgtagaatctcatgctatccttttgtcatggtttatgttagctactcctttaactagtgtatgtgcaatatttctttgtttatgtaatttatctactattgttactaaaaaaaaaaaaaaaaaaa

SEQ ID NO: 3587 - DNA, 849 bp, Oryza sativa
  Clone ID: PAT_MRT4530_10548C.1
atgtccagaagcattgcatcatctgcatcaagttcatctctcacggctctttttgacccatcttctgattcgccgcttccctcgcccccaggttcacctccacgtgatgtttcgactactccaagcttcgtactttccacacagtacagcggtgactatcgagcagattggcaccaacgtgatgtacaagttcaaggattagacaagagttggatggatcccacccctacaccgtccatttttggtgtggatgatctgtgtacaatttttgctgctaaccttgattgccagatggttaaatcccggtctagagtgcctcctcgtgaagagcttcgtagaatcagtgatgagcgggactacaatagtcttcgtattgcattgaaggcatacatcagtcgaagcagtgaaaagactccagaactacgggttgttagtgtacttgagcggaaccttatcgtggagcatggtcaaggatttctgcacttcaatttcttggtgcaaccggttgatttagaatcttcaacactcaagatgttctttgcagaagttcacctggactgcaaaggagacgaagatgtgtatgtttgctgccctttgcatgtccacgacaatggccactgtttcggatgcagtgttcgagctaagtttcttaggcaccccagtagtcatgtttttcttggtggccacaaagatgtagatttcccatttaccgactcatcctcaaatgaccattccaatggaactgaagatagccttcgggatgaagaaagtgagaattcaaagatcgaaacagatgataaagattcaaacagtgatacagaagaggagacagaaagcaaggatgattga

SEQ ID NO: 3588 - DNA, 475 bp, Oryza sativa
  unsure (1)..(475): unsure at all n locations
  Clone ID: PAT_MRT4530_10549C.1
cacaaaggttgctactaccaccatctagtcctccagtactctgtgcattgcaaggagagcagagtaaggcaggatccatggtgaacttggtggaagcgccgaagccgctggtgtacttcctcctgaggagggcagggctccggcagcacaccgtcgacgtcgacggcgccggcacggtgatcagcttctggatgcccgagggcaaggtccccaaggacaggggcaccgtgcgggacgtcgcgcccgaagcgcagcagccgctgacagcggcaagcagcagaaggtggcggcgaaccgcgggcaaacggcaaaggagaggcccgccgtcgtgctcgtgcaggctttcgcccccgagggcgtcgtcacgtggcagtttcaggctngtgttcttgcgagacttacgacgtgtacnttccggactgtttactttggcgggttgacgtcgccttgacggaccgtcgccgggttcaggcga

SEQ ID NO: 3589 - DNA, 495 bp, Oryza sativa
  Clone ID: PAT_MRT4530_1054C.1
atgggccggtgtagcgccttgactgtggcggcgctgcgcggtcatgcgggagatggtgccagagctagagggcaggttgtgccggcgcagttgggcggcatcggcgcgcaggcaagggcggccgggctcggcggagcgaccacgccaggagctcggctgctccaggccgacttccggaggctggaccggatggcgccggcgccggcgcggcgaggctcaagccgtcgttgcgggcgctcttctcatcagcgggcagcggcttcgatgatggtcaacgagcccgacggctgtggtgatggaggcagcggcaagcagcgctgggaagtgggcaacggtgatagtttcgatgacgatcagcgagccggcggcagcggcttcgattgcgacggttggcgagtggcgctgggaagcggctgccagcaatggggggaagtactggaagctgaatgtaagaatcttacaagtcagttgaatctagattcagatctgggataa

SEQ ID NO: 3590 - DNA, 373 bp, Oryza sativa
  Clone ID: PAT_MRT4530_10550C.1
ttctccccctcctcccctccacctcgctgaagctcggcctcctctcgcaggtgcggtggcctgggaggaggcgcggcgcccaacgagaagtgcggaggtggccgacgtgggtagtaggaaaggaggccggcggtgtgcaaggccacgacaggtggcgcacgaggaggttgggcggcatgcaggtggcgcgaggccatggggaacgcggaggcgacaacgcgcagaggggggcacgatgccgccccacacggcgacttgtgggacgactgccctcccacgcgacgacgatggcgcagcggggcgagcctgcctgagctgtgtgtggtgggctaggcttggcggctagagggacgacgtggttgtccgacgacat

SEQ ID NO: 3591 - DNA, 252 bp, Oryza sativa
  Clone ID: PAT_MRT4530_10551C.1
atggatgtcgaggttgctgagacactagtctccacggatacattgataccgataccggcccgtcgaccgaacgcgatggataacgctctctccagtcctcttgtcggcttcaagtacaatgcccgtaggtacagcctgtggaccgccacaaactctaaaagaccatcaccggtgaggagctccacctctgtcaccatcttctttgcaagccgggagggtcagggtgcgccaaggaagctgaagcgccgctag

SEQ ID NO: 3592 - DNA, 195 bp, Oryza sativa
  Clone ID: PAT_MRT4530_10552C.1
atactgtggaacatgggaatggtgccagtcaacaacgaaagttcctcaaaccttcagtaccaggtgaagcaagtgtgaaaaccattgtcgcttggccaggagtctctagtgaagccaggctatgtcgaggtcttcatctataacctactctaggcttcctaaagggtttttatggtttggttttggtggggtaaa

SEQ ID NO: 3593 - DNA, 507 bp, Oryza sativa
  Clone ID: PAT_MRT4530_10553C.1
cccacgcgtccgaaaggagatgagtaaaaacgactttgagcgtgtgctgatgaggctaaggaaattgcgggtggtgtacttggacttgcaagatatgaggacggtcccagcatgtattggtgaactaaaacatcttcgttatcttgttttcctccccggcgaaaatggggaaccttgtcaatttgcggtatatgcacacgtggaaaggcttggacattcccaacatagggagactgaaatcgctccgaaatctgtttcgcttcactgtgaggaaagagaagggatatgagatacaccagctggaatacctgaacaaccttcgtggcaggatgttcattgactgtcttgataatataagaagcaaagaggaggctgttcgagccaggctagctgacaagaggcatataactgatctgacgcttaagttggggtggtgacgaacgctccgcatcaagaactgcacctgtaacggagatgagcagcgggccagagcttcaaatgcaagct

SEQ ID NO: 3594 - DNA, 1084 bp, Oryza sativa
  Clone ID: PAT_MRT4530_10554C.1
tttgtttttttttgcacctgaagtaatgccagagagcttcaaagtcgttcttctcatgcattgactacatattccctgtctcctaaaaatgccaactcctgactataaatctgaacatatgctgtgcttagattcatagatagtacttagcttttctaggtggatggagtatcaagtttgtattaatgtaaaataacagggtgtaacatatgtttgttccaatatgttgcatctgaacgaagttgtcctttcgatgcgttgttattgcatatcaagcatgtgttagtgtaacataatacactgtttcgatggtatactttgtggtacagtttcaggttacaaatcaaatttcttgtgcctttatcttagtatggaaaactctatcgcgtcagttaatttcgcccacgctgcatgactgctggtattgattcagctctccccaaaccaagtgttcaacatcttcccatgacgtcgcggtgcccagatccttccacaggctaaatatggctcccaggacgttgtcctcgtgaagtatgcagtagcacatcgcacgatacgatgccctgctgaatttagaattttgtattgacttgtatatatctttatttgattctgctctcagaaaaggaagctgatagcttcgtaaaaactgcctgagaagatcaatatcaccacggaatacatccaagtgcagtggaattaagtcacatagaggatccccaatggacagatcactgaaatcaatgatatgaattgcatccattttgttcagatcttcaacggcaatgcaatcagtggaagttcctggttctgtggtcccctcaatgagaatgttatcatccattatatctgaatgtatccaagaaggtaccacatagactgaatcaccatcatcgtccttaacaaacttgataagaaagcggatgtcgtcagggagatattcttcagccttctcaattagaacctgtggaattgaaccacccctacacagatacgtaaagaatgttatagtatcattatgaactgcatctagtgattgcctgtcaggatataacaagtcaactccaaataaatgcatagtcat

SEQ ID NO: 3595 - DNA, 3813 bp, Oryza sativa
  Clone ID: PAT_MRT4530_10555C.1
atggcaaatccatggaggattgcagctgtgggttggggcgtaaccgtggtaggatggttgatagcgcccattatgaacttgctcgtgaacaaattcgtttcctacatcggctttaacgcgtcgcggaagctccgggaactggagattcataccctcccaaaactggaggatatgctgagagaactagaggagcagaggatgcagaaagaagctgaagatgatagatctgctgtgaagaaactggaacaaccgtgcgaggagctaaggtctgccttgtacgaagcggaggacatcttggatctcatcgattatcaccaaatcaagaacaaggtcaatgattgcgatgacgacatcaactggctgcactacctccaggacgccgtcggcgcttgcatcaagctttgcaccagcaaatctgccgcgctgttcccaatttctcgcccaccaccggattctacggatcccaactgtagcagcaaatctgccgcgctgctaccaatttctcgctcaccactggatactccggctccggatcccaactgtagcagcagcaaatctgcatctgccgcgccgctaccaatttctcggcctccaccggatactacggatccgttccctctagaaggagtagacattgtaccctcgctgcaacgggtccgttccttctaccagcttgcatgtttttaccggaactggtcctacgaagtgatgggcatcacaaactacaaggggagtgattctttcctgactatttgtgccaaaaggaagttgaggaaaagaatagaagcgatagaagaaattttgaacgactggaaacatctttgcaccgaatcgcatcaatcacatctctcgaaccaggaaagaagcagtagatggaatacaatttccagcaattacaggcagagcattaaacctgttactaaaccaacggtattcggtcgagatgaggagcgtgaggtcattcataggattctccgtgagggaccagatgatcatgcagcaagctccagtaacagatctggcaagactaccctggcacaatatgtttgtgactacgaaaaagaggataaagacaaatatttcgaccctatcattctcattcatgtttctgagacattgagagcagactacatatttcatgatatgcttgaggagatcacagaaaaccggcattccagtattactgatcgtagagaactacaaaataagctgaagaaggaattaagaggcaaacgtttcttgttggtattggatgatgtcaatgataagaatgaccaggagcagcgagatttactttctccacttgatgttgggaagagaggaagcagaatcctagtgacagctagaagaacagatgtagctctacgagctaatagatatattcaaatatctgatttggacaaggagatatacttttcaatgttcatgcattacgcactagaaggcacaagctttgatgatcgagattttataccacttgggagaaaaattgcagaaaagctacaaaggtcacctattgcagcagtaatagtgggtgtccggcttaagcaaaacccagatatcacttattggagagcaacatcaaacctcgacgtgttgaattctaccacaggagctctgctctggagctatcaacagcttgatatggatgtcaggagatgctttgaattctatagcatatttcctagaagatatgagttggaacgagagagacttattagcatgtggatagcacagggtttggtgaagacaaccaatgcaagagaggaggatatggaagatgtcggcgagctctactttcatgaactgcaggtgtgctcatttcttcagctaaaaaggaaggttaattctgacactagttctggggagtacttcacggctcatgattcgttgtatgacgtagcaaagatggttgctggcagcgaccgtgttgaaatcaagaaaggcattgtacaacatatttcgaaatatgttcgccatgtttgtataatgttctacgatgaagtattccccgagcagattttggagctggcaaacttgcgcacactaatcatgtgctattccataaaggagatgagtaaaaacgactttgagcgtgtgctgatgaggctaaggaaattgcgggtggtgtacttggacttgcaagatatgaggacggtcccagcatgtattggtgaactaaaacatcttcgttatcttggtatttcgccatcccttaattacaacgacatcactttgccagccgaatttgccaagctttaccatctccacgagttttcggtcacacctttcgttaatttgcagttttcctccccggcgaaaatggggaaccttgtcaatttgcggtatatgcacacgtggaaaggcttggacattcccaacatagggagactgaaatcgctccgaaatctgtttcgcttcactgtgaggaaagagaagggatatgagatacaccagctggaatacctgaacaaccttcgtggcaggatgttcattgactgtcttgataatataagaagcaaagaggaggctgttcgagccaggctagctgacaagaggcatataactgatctgacgctaagttggggtggtgacgaacgctccgcatcaagaactgcacctgtaacggagatgagcagcggtccagagcttcaaatgcaagctgaggtccttgaggagctccatccaccagcctggattacatccctttgcatcagggaatataatggtacgacatacccaagttggttgtcagtaaaaggggtcgtgcagcagggagaattcccggccgcattgcaaatccttatgttctggagttgtaaaggctcgaataacccacccatgattggtgtttgcaagctgaaaactggttccgaaggtctaggaatcctaaaccttgagaagtttgcaagagctttgcgcctccgatggctttggcaggaatggaagtcaccggagaaagcatgggtgggttctggtacgccgtgcgatgacaccgataagctccttttcgcagcagcgacatccataacaatcggaaatggggcgactgtgagtttttgggagtcagcctggtggcaggagagaaggatgaaagatgtggcaccgctagtctacgcggtctccaagaaaaagaatagtaccctccaacatgccttgcaatcagatcaatggctgctcgatctgggatttccagcggacgtgggctggacaacagagctgattgaccaacttgtcacggtttggaccgccatccagacaatagagctgacagaacatgaggacgaccaaatatcttggaagctcactagccacggtcaatatacggcaacatcggcctataatgcacaactacttggaacaacggccaacaacctaatttggaagccctgggctcttcgcaaatgcaaaaccttcgcctggctggtcattcagaatagagtctggacctctgatagactatctacccgcggatggccaaatggatccatatgtcccttatgtcgtcgggtccaggagacggctctacacctcctcgcaggctgccgctacacaaagagaatatgggcgaccctagcggaatggacggcgtgcaacaatatccaccccaaccattggtggcaggtttcgtcggtgttagaatggtgggatcaaaccacaagtgtaaaagaggcacccaaaaaggctctacgctccctaacgttcctagtcgtctgggagatctggaatgaaagaaatcgcagaacattccagcataaggagctcccaccgagtggtcttctgacaaaaatcaaggacgaggccaagatatag

SEQ ID NO: 3596 - DNA, 315 bp, Oryza sativa
  Clone ID: PAT_MRT4530_10556C.1
atggaagtgaagaaaccagtcggcaacagacgtagacagcttgtgttgaaggtgatgacgcctatttgtggtggcggcggcgtggccagccgtgaagacgatagcaccagttggcgtcatacgaggcggccggtcgatgaagatgtagacgtccaacaacggcgacataataaaccagccgtgcaggcggagacaccagtcggcggtggcgaaggcgagccagcggcagagacaccagtcggcggcggtgatggcaagcccgcggcggagacaccagtcggcggcagcgaaggcaagccggcagtgaagacgtag

SEQ ID NO: 3597 - DNA, 181 bp, Oryza sativa
  Clone ID: PAT_MRT4530_10557C.1
ctgaccgaaaaaaaccactaaattgatactatttgatatcattgccataacttagccacacaatgcattaacatcaagagtgcactgtaaagcaaggcttataatcttaaaccacagatggcttgagggatacacaccgaatttaaaatgcctttacaacatatattatgttgcctcgata

SEQ ID NO: 3598 - DNA, 3068 bp, Oryza sativa
  Clone ID: PAT_MRT4530_10558C.1
atggcgatggcttaccaccagcatcagccggcgagctccttcggcgtagtcgacggccctgagttaaacgtcgggtacgacgactccaaccgcctcatccgcgccaccgcccttggccactgcgccgactggaaacttgagcgcgccgacacctccctctcctttgcgaccgccgcccagtcaccttatctcgccgtctccggcatcgccaccttcgcctcggccggctccgccgccgcctcctagattgcgagaagacacgaagaacacagcgttgagctatgggatatggagaccagctcctgtggtgcttttcttcatggccgccgccctgcggcttctgcccgcgttttcggtccctctggagcaatcctcgccactggcggtaagcaaggtgaaaaggtccggagggatcttgcgagactgatttaagtttatgcaatccatgacaaccatgatcaggtcacgggtttggtgtttctggattcagggaagaaactagtgagctgctccaaggataagttaatccgggtttgggaccttgacacgcagcactgccttcacaatgttggagtccaccgcagtgaactatggtcaattgaagaagatcatagcgagggatttttattgtctgcgtcggccgatctagagctgcgggtgtttacggtccggaaatctgctgaggagggtgaggattggagcaagtgggatgtgctgaagccatctggtcattgccattctcagatgcacttaagatcatgtcttacttaaaggagtggtctatggttcctttgaaggttgagcttgtttgtagggtttgcctagtgctgcttcaaacataccacagccaattaactacgacaccatctgcaagatcgatacttacagaactgaaaggcattctttacagtagagtaaaggaatgcaaggatgctataggtttcaaccttgctgcaatggatcatataaaagaattgttggccatgagatcagatgctcccttccgagatgcaagagcgaagctgatggagatcaggcaggaacaatcaagacgatcggataggtcagatggggctgaaaaaaacaaaaacaaaatctctgaataataacatgcttgagacatactcagtggataatgagaatgtgtcgaatatgtattccattgagatgcatggacaccgttctgatattaggagtcttgcacttaactcagaggacaacctcctgatgtcaacaagtcacaatgctgttaagatatggaatcctagtactggcgactgtctccggacaattgattctgattatggattgtgcagtgcatttgttcctggaaatcggtatgcccttgtaggcacaaagagtggtactttggagattatagatattaatagtggaagctctattgaggttatagaagctcatgctggttccatacgatcaattgtactcattccaaacgaggatggaactgctggtgcatggggttttgtcactggaagtgctgatcatgatgtcaagttctgggaataccaattgatgcagaaatctgataatgactctaagcagctgagcgtaacaaatgtcaaaactttgaaaatgaatgacgatgtccttgcagtaaccatcagtccaactgggaatcatattgctgttgctctcttggatggcgcagtcaagttttctaatttagaacaggacaagcataagcaaatatctattttccgccagtcagtttatatgggcaaagctattattgttaatattttcttggcatcctgcaaacttggtaacgcagtcttcactatggactcactgaagtttgcccttaccctttatggccacaaacttccagttctctgcatggatatatcatccgatggagttctaatagttactggttctgcagacaaaaatttgaaaatttggggtatggattttggtgactgccataagtctatatttgcccacacggacagtgttgggaaagaccgcactgtaaagtactgggatgctgataaattcgagttgttgttaacactggaaggacaccatgctgaagtttggtgtcttgccatcagcagtcgtggtgattttattgtaacaggttctcatgaccgctctattcggcgttgggatcgtactgaagaacaactcttcattgaggaagagcaagagaaaaggttggaggaaactttcgaggctgatttagatagtgctatggaccacaagtatgggcaaaaagatggtgctcctgatgagggttctgtaggtgttcctggtaggaaaaccaaagagacagtaactgctgctgatgcaattattgatgcacttgacactgccgaggaagaagtaaaacgccttgatcagcaccaggaaggacaaaataatgggaatggaactacatttcaacccaatgttataatgcaagggcagtcaccatcggattatgttttgaatgtagtttcaaatgttcgtccaaatgacttggaacaggctctcctttcattgccattctcagatgcacttaagatcatgtcttacttaaaggagtggtctatggttcctttgaaggttgagcttgtttgtagggtttgcctagtgctgcttcaaacacaccacagccaattaactacgacaccatctgcaagatcgatacttacagaactgaaaggcattctttacagtagagtaaaggaatgcaaggatgctataggtttcaaccttgctgcaatggatcatataaaagaattgttggccatgagatcagatgctcccttccgagatgcaagagcgaagctgatggagatcaggcaggaacaatcaagacgatcggataggtcagatggggctgaaaaaaggaaaaagaaaaagcgaagaacatccggtgagagctgagctttgtgggcgaggcaaagtagtttttttttttgtcgtagcatacaaacgatatatcggcgtgctcatattgtgtctacatgagcacgacagaattttggcatatcgagtgtaaaatcaaaacgcgcgttgcgccaatcttttagatgtaatagcagaatgtgcatttgctc

SEQ ID NO: 3599 - DNA, 286 bp, Oryza sativa
  Clone ID: PAT_MRT4530_10559C.1
aaagggaaaaaccgtggggggaaacaaaacccccaagccattgaggtttacccccctcgggaaaaaacaacaaaacgtggggggaggggttccctcaaaatcttccttcccaaagggggggggccaaaaaaaccccaattttaaaggggaacccccctggggggggggaaaaaaccaaaaaagtccccaaggggggaaaaatcattaaacccgccccgggtggggggttccccccccctaattcctccccccatgggcgggaggcctttggggagccccggggttg

SEQ ID NO: 3600 - DNA, 260 bp, Oryza sativa
  Clone ID: PAT_MRT4530_1055C.1
tctgtttaaaagaaaatacgccccaaaaaggaagacgcgaggttcgtaccgcgcgccggcatttatccaccttgcaccgagcaccggcttctgcgacaaatgcaccgacgcgtgctgcgggcttctccttctgcaaggggtgtctacaacttgattctttttgcccatacaccgtgctgtctgaggcgacctggtgccctgccaggaagaggggcgcgtctggcaaaggcagaagatcaaccgaaggcatgaaacttgtt

SEQ ID NO: 3601 - DNA, 670 bp, Oryza sativa
  Clone ID: PAT_MRT4530_10560C.1
attaaaatctcctttttttttgcatctctttttcacaagccagttggatggtatatctgcatggcaatggacagttaactaatgcaagttaaaaacaactgaatgagaatataaggaaatttcactagcttattatgtctcctacttttctttactcccggaacacctagaacctacaatcagtctcagctaactaaaaccttcagaatagctcacataaataattgttgcagtacgcatcttgaacatagcctccagactaatgacttgatctgtgcgtcgccatgtcctagttcagttggaaaagaaattcatttacatgttaagagagtcattagcggcaaaaaaaacatatccagaacctctgcaccgatgactttccagcatggcagatatgcttccataccaaatgcatatattttactatcaaaaggggaaacttgttactctttgtcagtagaaaatgtgaaaagaagtcaaattaattaaagaaactcatattactgattgtcagtggaaaatatagagagcaatccaaattaaaacaaaagttagtacgttccacaggggacgattcatatcatctcaacaatacctgagaagcaagcactaactctggctgccttctgcacgagcaaactggcaaacaacttaagcaaagcgtaagatg

SEQ ID NO: 3602 - DNA, 246 bp, Oryza sativa
  Clone ID: PAT_MRT4530_10561C.1
atgctcgactcgcggaaatcacaatcccaaagaggatacctggctaatcccaaaaatacatctccagcggaacgacgtgtatattacgagatctcatcatcaagagcgtctagactacgacaccaagaagctatacagagctttgtgaaggagaaatcatttgtgatctccgagaaaggcgccctcggcatcgtgaaatccctcgtcagccttacaggtcaccaggtcaccaggattagagtatga

SEQ ID NO: 3603 - DNA, 415 bp, Oryza sativa
  unsure (1)..(415): unsure at all n locations
  Clone ID: PAT_MRT4530_10562C.1
gaccaggccgccggcgcccgagtaagagctccagcctccagctgttacgtcgccggtgagctagagctagctgcagagacgggacagacgagcgcgtgcaatatcgcgctcgcgcgcgacggccggccggccggcgaggggacggagtgctcgnccggtagctcctccggtgacctacccggtggtgtgcattgcatgcatggatggcgggatccatgtgaagacagagagagatcaagcttgaagaatgaagagcctgaagggcggtggttcttgttcgagttttgtttctttggctgttttttttttcatttttgagattgtaaacgtatgcatcctgacatcttgaattgttgatgtggtgcagtaagtaataaaaaactgaggcatttattcaaaaaaaaaaaaaaaaaaa

SEQ ID NO: 3604 - DNA, 497 bp, Oryza sativa
  Clone ID: PAT_MRT4530_10563C.1
agctgagcgagtcggagatgaggataacgcacaggcagtgccatcgggaggtgcaagacagctctttggacgcgtgccgataggagctcgactcgtaggtcaccgtccgtaagaggttgcaggcgatgttccgacggccgggcgcgctctagctgtgagatgcagcgctgtcagcatatgcatgacctgagccgaaagtgccgctgtgccggcattcaaccgatggcgaggagctacgatgagagcatgcctatgcccctgtagcaaggctgatcgtggtcatcctcggattactacggtggtgaggggtcgacccctgatcaggcgtactacggccagaggtcctctgatgagggctactaccgtgagcagcataatgctccgacgatgaccaccatgaggctgactacagcgaggtagtactgctctcatctgacgtccatatgatccgttgaatcgcagcacagcagcattttcggctcaggtcatgactatgc

SEQ ID NO: 3605 - DNA, 925 bp, Oryza sativa
  Clone ID: PAT_MRT4530_10564C.1
gccgccaatgggccgccgccacatcggcaccgtcgcccacctcgccgccgggggcttcgccggcgccgtcagcaagacctgcaccccacgcgtccgccgcctcaccatcctcttccaggtggcaggtatgcattcagatgtggcagctctaaagaagtacagcatatggcatgaagcttcacgaatagttcgagaagaaggatttggagcattttggaaaggcaatctggtgacaattgtgcatcgtttaccttattctgccatcagcttttattcatatgagcgctacaaaaaatttctccaaagggttcctggccttgatgaagactcaaattatgttggtgttgctcgtttacttagtggcggtttggcaggaattactgctgcatctgtaacttatcccttggatgttgtccgtactcgtttggcaacacagaaaacaaccaggtattacaaaggcatctttcatgcagtgtctaccatttgtagagatgagggtgtcaaaggattgtacaagggccttggggccacattattgggagtcggacctagcatagcaatcagctttactgtatatgaatcattgaggtctcattggcaaatggaaaggccccaagattcccctgcagttgttagtttgttttctgggagtctatctggtattgcatcatctactgccacatttccccttgatcttgtaaagagacgaatgcaactgcaaggggcagctgggacatcgtcagtctgtaaatcaagcataactggaaccatccgccaaatctttcagaaggaaggccttcgtggcttctacagagggatagtccctgagtacctgaaggttgttcctagtgtagggattgccttcatgacctatgagaccctgaagagcttgctctccagcatagacgaagacgacgagagctga

SEQ ID NO: 3606 - DNA, 237 bp, Oryza sativa
  Clone ID: PAT_MRT4530_10565C.1
atggcaggcacatgtgtgggagcaaagaagctgacaagcttcggatccgccactgtcgccgaaggagtggggagaggcggggcagagggtgaccatgacgacggactagattcgtcgaacgcgggcttgcccgaggtggatccagaagtggcaagagacattggatctgtcagccgtacgtggatccagccggggcggatccaacagtggcggcaatgggtggcggtggatcagtag

SEQ ID NO: 3607 - DNA, 245 bp, Oryza sativa
  Clone ID: PAT_MRT4530_10566C.1
tctgatccatatgcgactcacatcgaaatgtgaggaatcttatggaatcggctttagcggggtagctaactgtacatgtaaaatgactaggtgtgttgctgcaaggctcatctcagtgcttagctaccctttttatatgcaagcaaagcagatcctcgcacaaaaaaaaaaaaaacaaacaaaaaaaaaaataaaaaaacaaacaaataaaaaagaaaactataaaaaaaaaaataaaaaaacat

SEQ ID NO: 3608 - DNA, 667 bp, Oryza sativa
  Clone ID: PAT_MRT4530_10567C.1
atggagtggggcaacggtaggcggagaaggcaggtggaatggggagacagtggacggggcgaagtggggcgacagtgggcaaagcggcagcgcgcgaagccggcggcgcggagcggggcggtcgcgggcggagcaggcaggcctacgaggcgatggcgcgcgaagccaacggcgcgaagcagagcggtggcgaacgacaacgacgatggcgatgggttcgaggaggaggaggaggaggaggtcgcgcaccacctcttcctcttccccgtctcctccatcttcgtgctgtcgtccctcgctacatccgctgccaccgcgccatccctccaacctgctcgccgtcctttgcaccccgtctccgctgtcctccgtgccaccctccgacctcaacggcgtcctcaccataggcaacagctcgccgcgctatccccttgcccaattgctcccctgccgcccgcatgccgctcctcccctgccgcccgccgcccgccgcccgcgcaattccttcctctgccgcctgcccgatgccgtacctcccgctccttgggcgtcgacaccttggggctctcggcgatggcgctgcctcggcgcgggcgtcgcgccaccacctggccatgtaccccttgacagcggcaacgccgccggccaccacctccttgggcggcat

SEQ ID NO: 3609 - DNA, 369 bp, Oryza sativa
  Clone ID: PAT_MRT4530_10568C.1
atggagcccgagaacgccgcgccgcttcgccgcatccttgccgacctcgtccacccctccgtttcgctcgccgaccaccggagcaccaccgaccccgtcgacccgagccgcgccaccgcctccctccgctccggccgcctcctccgccgccgccgtcgccccggggtgagccgtggaccgtcgcctcctttcccccttccctcccctctctcggccgccgctccgccgcgccagtggtcgccggcggcgaccatcggggcgcgggcgccgcctcccgccggccgcgtcgacgtggccaccttcgggcgcgccgcgcggttgccgcgtggggcccagccgtcagccgcccgcgccctcggctgcggctga

SEQ ID NO: 3610 - DNA, 447 bp, Oryza sativa
  Clone ID: PAT_MRT4530_10569C.1
atggagcccgagaacgccgcgccgcttcgccgcatcctcgccgacctcgtccacctctccgtttcggtcgccgaccgccggaacaccgtcgaccccgtcgacccgagccgcgccgccgcctccctccgctctggccgccccctccgtcgccgctgtcgccccggggtgagccgtggaccgtcgcctcctttcccccttccctcccctctctcggccgccgctccgccgcgctggtggtcgccggcggcgaccatcggggcgcgggcgcgccgcctcccgccgaccgggccggcgtggccgccctcgtgcgcgccgagtggctgccgcgtggggcccggccgtcagccgcccgcgccctcggacgctgcagcttcggaagatccgctctccgtggaggttgaagccgacgtttgggaaagcgagcaaggcaagtcacatcatccttga

SEQ ID NO: 3611 - DNA, 1380 bp, Oryza sativa
  Clone ID: PAT_MRT4530_1056C.1
ttttttttaaaattattatttttttttttttttttttcagttgggtaaggtaccaattactccccctcccctttttttttttttttttttggtgtgtaaagtgcatgaataattatcatgacgaaagcaggtgaaacaaacatgttataatataaggtatcagcaacacacgtagggtactagtttaaacactgacggcaaatcaggtggtggccagaaaagaaccagggcaaccaaacatccaatatgatagctggaaggagttctatacaacagggcaaacgacagctctcatgctcatcatatggaacatggagcctccagaatgcaaaggaggcaaccatattaagcatgaaacgagctttacaacaaaacttaggttagatcatcctcgtcatcctcctttttcttcagctcattctttgccctgaggaggagggttgttttccaggggtccagacgtgtcatgctgtcaaattccttaatggcatcagtgaacttggcaacatctccttcctccatagctgcagcaagatcagataaaagcttgtattctcgtgtccccgagaatgttgggtcaatatcctgatatcgctccattgaatttgtgatagcaacaacatcacctctgcatagctgacaaatgcctgcgttgaggagaatacctctgacactgtacttaagaagattattgttgatttgttggcgagcaattgcttcaaatatctcatttgccttctggtattgttccaactgagcagcaatttctgcaactttctgcttgatactgtttgattgagatgattgcccctcactgtcaaaaagatcagccgatttttccaggtaatctgaagccttctctaaatcttgttcttgatgatatatctcaccaatgtccttacaatatcttgcagccatgttcaatctaccaatttccaagaaaagatcaacagcctggtttagcgcttgtgcagcctcttgaggagagaactttttatagcaatttgccgcctcgacataagctgaggcagcttcatgcttactgtcacccttcaaatggcagttagcaatcttgatgtacacttgtgcagctctgctccagttcttggcgagcttgaaggagttggcccccttgtcgaagaggtcggcggcgtcctcgtacttggagccgaagatcccccacccggagagcttcttctccgccttcttctcgaagtcatccccgcgggcctcgtggtcccccatcgcctccgcctccgcgctccgccctgcgcttctcccggcggcgaggagacgacgacgacgacgacgacgacgaggagattcgcgagcagcagatgggaagggagaagcggagaaggcgagaagcgggcgcgtggg

SEQ ID NO: 3612 - DNA, 1443 bp, Oryza sativa
  Clone ID: PAT_MRT4530_10570C.1
cagggaactctgctttcttgggctcctcggcgaaccacctgtgctccagcgcctccaccgccgtcatcctcttctctgggtcgaaagccagcagcccggacaggacctcgcgcgccgccggcgacagctccggcaggacatcatagaagagctcgttgagctggtcaccggttgccggccagctgctccggcgaggtgtacggcagcgtgccggggcggcacaggtcgtacggcttcccggcgggcttcatcagcgtggcggccccgaaatcacagatcttgagctgcccggagaagctgacaaggatgttctccggcttgatgtcccgatggatgacgcgcgaggcgtgcatcttcttggcggcgtcgacgagcggccgcatcatggcgcggacgatgtcctccgggtgggccctggggaactcatcccggaggctgcttccgacgaactcgaggacgaggaagaggtcacctgtcttggcgtcggcgacgacgtccttgatctggacgatgttggggtggccgcggcaggcgtgctggcaggcggcctccaccctgagcgcgtcgaagtcgggggcgaagcggccgccctcgtccgccccgatgaggcgcttgagcgcgacgaccttgccggtgcggcgatcccgcgccctgagcaccacgccgaacgcgccctggccgaccacgtcgaggcgctcgtagtcatcggcgctcccgaaaatcttctatatgccgaagtttcgccccaaccttacggagaagtatgatggcagcatcaatccctccgagtttctccagatctataccacgatcatcgtggcggagcggggggggggggggggaccaccgagtcatggcgaattatttccccatggctcttaagggtcaggcgcgcggctggctgatgacccagcccctcaactccatccactcctgggaggacctgtgccagcagttcattacgaacttccaaggcacgtacccccgcccaggagaggaggcggacctgcatgctttgcagcggaaggacgatgagtccctctgctcgtatatacagcgcttctgccaggtccgcaacactattccgtgcattctggcacgcggtcgtttatacgttttggaatggcgtgcggcacaaccacatgctggagaaaattgccttcaaggagcccaagaccaccgccgagcacttcgagctggcagacaaggtggctcggaaggaggcgtgggcctggaactcccccggcactggcgcggcgggtgcggctgtccccgagcccgctccccgctctaagcggcaagataggagggggaaaaggaagccggcccgctccgatgacgagggccacgtccttgcggccgatgggccctcacgggccccgcgcaaggaaaaagccaccggcggcaggccgagctccaccgctccatccgggaaggtcggtc

SEQ ID NO: 3613 - DNA, 978 bp, Oryza sativa
  Clone ID: PAT_MRT4530_10571C.1
ctatccaaacagaggcacgaagccagggaactctgctttcttgggctcctcggcgaaccacctgtgctccagcgcctccaccgccgtcatcctcttctctgggtcgaaagccagcagcccggacaggacctcgcgcgccgccggcgacagctccggcaggacatcatagaagagctcgttgagctggtcacctaggttggtggacaggtcggcgagcagctctttctccgtcatgtcgcctccgaacagtggcgcgccggtgaggagctcgcccatgatgcaccccaacgcccacatgtccaccgcggggccgtagcatcggttgccggcgagctgctctggcgaggtgtacggcagcgtgccggggcggcacaggtcgtacggcttcccggcgggcttcatcagcgtggcggcgccgaagtcacagatcttgagctccccggagaagctgacaaggatgttctccggcttgatgtctcgatggatgacgcgcgaggcatgcatcttcttggcggcgtcgacgagcggccgcatcatggcgcggacgatgtcctccgggcgggccctggggaactcatcccggaggctgcctccgacgaactcgaggacgaggaagaggtcacctgtcttggcgtcggcgacgacgtccttgatctggacgatgttggggtgaccgcggcaggcgtgctggcaggcggcctccaccctgagcgcgtcgaagtcgcgggagaagcggccgccctcgtccgccccgatgaggcgcttgagcgcgacgaccttgccggtgcggcgatcccgcgccctgagcaccacgccgaaggcgccctggccgaccacgtcgaggcgctcgtagtcgtcggcgctcccgaagttgtaccgccgccgcttcgccccgtccgccggggaggatccgcagcaggcgcggggctctggatcctcgggcgccgcgcgcttgcggctcgccaccgcgggcgccat

SEQ ID NO: 3614 - DNA, 981 bp, Oryza sativa
  Clone ID: PAT_MRT4530_10572C.1
ctaaccgaagagaggcacgaagccagggaactctgctttcttgggctcctcggcgaaccaccggtgctccagcgcctccgacgccgtcagcctcttctctgggtcgaacgccagcagcccggacaggacctcgcgcgccgccggcgacagctccggcaggacatcatagaagagctcgttgagctggtcgtccaggttggcggacaggtcggcgagcagctcctcctcagtcatgtcgcctccgaagagcggcgcgccggtgaggagctcgcccatgatgcatcctaacgcccacatgtccaccgcggggccgtagcaccggttgccggccagctgctccggcgaggtgtacggcagcgtgccggggcggcacaggtcgtacggcttcccggcgggcttcatcagcgtggcggccccgaaatcacagatcttgagctgcccggagaagctgacaaggatgttctccggcttgatgtcccgatggatgacgcgcgaggcgtgcatcttcttggcggcgtcgacgagcggccgcatcatggcgcggacgatgtcctccgggtgggccctggggaactcatcccggaggctgcttccgacgaactcgaggacgaggaagaggtcacctgtcttggcgtcggcgacgacgtccttgatctggacgatgttggggtggccgcggcaggcgtgctggcaggcggcctccaccctgagcgcgtcgaagtcgggggcgaagcggccgccctcgtccgccccgatgaggcgcttgagcgcgacgaccttgccggtgcggcgatcccgcgccctgagcaccacgccgaacgcgccctggccgaccacgtcgaggcgctcgtagtcatcggcgctcccgaagttgtaccgccgccgcttcggcccgctcgccggggaggatccgcagcaggcacggggctccagatcgtagggcgccgcgcgcttgcggctcgccaccgccgaggacgccat

SEQ ID NO: 3615 - DNA, 978 bp, Oryza sativa
  Clone ID: PAT_MRT4530_10573C.1
atggcgcccgcggtggcgagccgcaagcgcgttgcggccgacgatccggagccccgctcctgctgcggatcctcccaggcgagcgggccgaagcggcggcggtacaacttcgggagcgccgacgactacgagcgcctcgacgtggtcggccagggcgcgttcggcgtggtggtcagggcgcgggatcgccgcaccggcaaggtcgtcgcgctcaagcggctcatcggggcggacgagggcggccgcttcgcccccaacttcgacgcgctcagggtggaggccgcctgtcagcacgcctgccgcggccaccccaacatcgtccagatcaaggacgtcgtcgccgacgccaagacaggtgacctcttcctcgtcctcgagttcgtcggaggcagcctccgggatgagttccccagggcccgcccggaggacatcgtccgcgccatgatgcggccgctcgtcgacgccgccaagaagatgcatgcctcgcgcgtcatccatcgagacatcaagccggagaacatccttgtcagcttctccggggagctcaagatctgtgacttcggggccgccacgctgatgaagcccgccgggaagccgtacgacctgtgccgccccggcacgctgccgtacacctcgccagagcagctcgccggcaaccgatgctacggccccgcggtggacatgtgggcgttggggtgcatcatgggcgagctcctcaccggcgcgccactgttcggaggcgacatgacggagaaagagctgctcgccgacctgtccgccaacctgggtgaccagctcaacgagctcttctatgacgtcctgccagagctgtcgccggcggcgcgcgaggtcctgtccgggctgctggcgttcgacccagagaagaggatgacggcggtggaggcgctggagcaccggtggttcgccgatgagcccaagaaagcagagttccctggcttcgtgcctctcttcggttag

SEQ ID NO: 3616 - DNA, 713 bp, Oryza sativa
  Clone ID: PAT_MRT4530_10574C.1
cacgagggagagaactagtctcgagttttttttttttttttttaaaccaaacattaaatatattttgataatatatttgttttgtattaaaaatacgactatgttttttctataaacttagttaaaacgagttgtaatatgaaaccgagagactagttgcttactagtgcatgcaactgctggcatggcaactaaactggagtactatatactccgtatatacaaggcctctctaactctctcaagtcagagaggttaccatctaaacggcctgaaaaaaataaaagaagaggccaaagctataccaactcaattacaactagctgtcacacttggagacagcaaattgagctagatagctaccaagctatagctgagaactcgccgacgacggccatgggaggcggcgacggcggcgccggcaaggcgaaggcgaggccggtgttctcgtcgttcatgacagtgttcatgcacgcggacgcggcggacgtggcgctgatggtgcttgggcttctgggcgccatgggcgacggcatctcgacgccggtgatgctgctcatcaccagccgcatcttcaacgacctcggcagtggcgccgacatcgtcaaggagttcagctccaaggtcaacgtggtacgtaccttgtagctcctcgccgcccagctcgatcctgaactgttgcatgccaatgctgcggcgacggcgagctgacg

SEQ ID NO: 3617 - DNA, 513 bp, Oryza sativa
  Clone ID: PAT_MRT4530_10575C.1
ctgaatgtgagagcaaggccgagctggacaggttctgggacgctcttatctccatcagggaagagattgcagagatagaaaacggcaaagcagatgtgcttaacaatgtcctgaagggcgctcctcacccaccgcaactcttgatgggtgacacatggagcaagccgtattccagggagtacgctgcgttccccgcggcatggctccggggcgccaagttctggccaacaactggtcgtgtggacaacgtctacggggaccgcaacctcatctgcacgctgcagcaggcgacccaggtggccgaggaagccgcggtcgcaactgcaaccgcgtaatctcgtccgagaaccacgataattgatcgcggcgtgcgaaacatccttaagaaaatataatgcatgcttcctgtaggagggaagcatcgtcatcttcctcgtcatcctttttgcagtgtatatactagctcatggcagcgcctgatcccccaccaccaccagtccaccacacacacac

SEQ ID NO: 3618 - DNA, 511 bp, Oryza sativa
  Clone ID: PAT_MRT4530_10576C.1
atgaaatttaccaaacttatagcattttctgcggtgatcttcagtggcagtctatttgctcaaaaaccacttttaacggtttatacctatgattcttttgtttccgattggggggccgcgcccaaattagaggaaaaatttgaaaaagtatgcgattgcgatgtgaaatttataccgtttgaagatggtattactatgttgaaccgcattcgtttagaaggcaaaaaaacaaaagcggatataatgttaggcattgataatttcacaatgcctgaggcggttaaatcaggcttatttgctgcgcataatttgccaatagatcaaattaaatggcaagacaatacattttttccatatgattacagtgaatatgcttttatttataataaagaaaagataactaatccgcctaaatcgcttaaagagctagtcgaacgtcaagatttaaaagtgatttatcaagatccacggacaagtactgtcggcagaggcttgttattttggttaaata

SEQ ID NO: 3619 - DNA, 431 bp, Oryza sativa
  Clone ID: PAT_MRT4530_10577C.1
aaaaaaacgcctgtcatcttttttattttttttttttttataccaacgaacgggatgttttctagaaacaaccccaggacccgggggtcaatttcggggggaaccccaaaaaaaacgtagagattttttttttggggggcccaggcccgggaaaaagaaaaaaaagatggagggggccaaaagggcccccgggagaccaaaccacccgggaaaagggtctcccccaaagggccgggggtaaaaaaaaaccaacgggtgagggcccccaaggggactattcccaaataccccccctggggagcaccaaaacggggcctaaaaaaaaaaaaaaggggggaaaccccctcccgcccccggggggggccaaggaaccaaagatagggctcaccccgggaatcgggaaaaccagggagagggacaccggggcccac

SEQ ID NO: 3620 - DNA, 389 bp, Oryza sativa
  Clone ID: PAT_MRT4530_10578C.1
aaagacagcaaaacagacggcgaccgacagccaagccgggacaaacgacggccaagcagcgggcggccgccacctggcgaacgaaaaggccgcgaaaacgtcgcccccccaccgcgaccacgggcgggacgggcacaatgagccggaaaaaaccacaaagacgacaacgaggccaccggcccgcacggcggagcgcgaacccacgtggcggcggcggcgcgggggcccgcgcgacggcacccgtgcgcgaccggcgcggcggcgccgggggccgtgcggaggcggcagctgcggtgggcggccgctcagcggcgaccggcacggcgccggccggccggcgcggaggggaggcggcagtggccgccggccggattttttttctttttttt

SEQ ID NO: 3621 - DNA, 237 bp, Oryza sativa
  Clone ID: PAT_MRT4530_10579C.1
ccacctaacctggtcctcgtggtagccacgtggggcccgtggggagggaggatggccctagcaggtggggacatcgagatggatagtttcctcgctgtcgtcatcgaggttccgcatatgcgcttcgtcgtcatcggcaggaagctgccccttgtcatcgctcaacccgtgcgcctccgcctcgtcgtcgttcaacttggggttgttgccagggttttgaaatttcgaaatttctga

SEQ ID NO: 3622 - DNA, 609 bp, Oryza sativa
  Clone ID: PAT_MRT4530_1057C.1
gtcttaagcttcaggatttatgttttgtgaagaaatggttgcaaataattttacagtaatatgacattctatataaatgctaaaacaacaggagacttttcttatttacataaaaaattatgattttgcatttcattaagcggtttgcaaactaggtgcaccagtgcctgaacctatgctagctgtctcggcctcaacctcagcctctgaggcttgatcgtctgaggacaactcgaattggctcaggttccggacaaagactgtgaaagcatggaaatgctctggagagaagaaaagtgctcccattctctggtaagtgaacagatcaattcctacattctcatccttcagattctcaacgatcctctcaaacccaccaggaaccggggtggatgagttttgccctgagacaacgactccttgtttcttgcaggaagttttgatgtggccaagtaatgactcggggctcgagagagattcaggtgattggtgctcgtcggataggtccattcctggtattatcattctacaagagttctttgcaaagatctctgcgatagcctcgtacctgtcctgaccattagagctgtagaatccagctgttaactc

SEQ ID NO: 3623 - DNA, 651 bp, Oryza sativa
  Clone ID: PAT_MRT4530_10580C.1
atgcagctacggagcacatccatgcagaaaagacaacaacaacgatcacgcattcacgtcaaactccagattagtacctcgcagtgtggcagcggtggtgtggcaagtggatgtcggagatcgatccctcagccgcggaaacgctcctgcaagtggctcggcaccttggccatcgccgaggaccccgtctggaccttcgaccgcgccgctcatggccccgccaccgcgcgcacctcaaacccaccgtgccgcccgccagttcgccaccgccacctcctccgccggttgatccccctctctcctcagggacggtcgcacctggaggactccaaattggtggggggaatacgccgcaccacagtctccccaaccaacagggttaacgggccaaatagaatccacccgttaccagaaaaaacagatcgaacccgacaacatatccatgccatgcgcggcgtgggcgcgcgttggcacgccatggcgcgccgcggccgcgcgctggagtgccttcgcagctcctgtggcgcgcgggcgtggctcggcgcggcgcggacggggcgcgcgcgcccaccggccgaacaagcgcggccggcgaggtgcgcgcgcggcacgcagccgcggccagagaagatcatagtgcaggttccatga

SEQ ID NO: 3624 - DNA, 600 bp, Oryza sativa
  Clone ID: PAT_MRT4530_10581C.1
aactagtggatccccgggctgcaggcctcttcctcttccccactccaaatccttcaaatccatccagcctcttcctcttctccactccaaatcattcaaatccacccatgtaggtttctcccctcgaatccccttcatattgctgctctcctgtggctagggtttgctcaaatggtggactagaagatgttgccacgtcgatctgtggctgcagcgcctgtggatttgctccaagtccagagctgaagctgcagtcaatccttgcctcatctccatccagatcaggacctaatcccgggactccgtcgactccttttgctgcacttgttaagctattgcgtcgaactcatctgaagtgctgacaagttattgcttaccatcgtctcattgtcaataccaaatccgaggaaatgaacggcattcatcggaagcggcttgcaagacagtaacaaggcaggaacatctccacaaggagcaatgctagtgctactaatgcaaaaaacagagtcccggaaatgatcaatggaggtggcagtagtaactccggtgctaactcctcccagagactttgtgctggtaatagtagcaatactgataatg

SEQ ID NO: 3625 - DNA, 372 bp, Oryza sativa
  Clone ID: PAT_MRT4530_10582C.1
atggctcccattgtcatagcctccttggccacctccgtggctccattccaggggctcaagtccaccgccggcctcccagtgagccgccgctccaccaactcaggcttcggcgacatcaccaacggcggaaggatcaagtgcatgcaggtgccgcccgtcctcggcttcttcttcttcgtgaccgtgtcgtctcctgggtactatgatggcaggtactggaccatatggaaactgcccatgttcggctgcagcgacaacagccaggtgatcaaggagctcgaggaggccaagaaggcatacccagatgcattcattcacatcgtcggctttgacaacgtcaggcatgtgcagtgcattagcttcatcgcctaa

SEQ ID NO: 3626 - DNA, 228 bp, Oryza sativa
  Clone ID: PAT_MRT4530_10583C.1
atggcggtggcgccgctatgccggcggcccacgggggtggtgtggcaggggaggcccagggcggcgtcgcagagaggaggcccagggcggcggcgcggcgaggaggcccgcggcagcagcgcaacaggacgcgtcgatgtggttcacagcggtcgcaggctgcagcgcgggggctgtaggcgccggcgagtagagtcccacatgcgccggcgaggagggtacccatga

SEQ ID NO: 3627 - DNA, 304 bp, Oryza sativa
  Clone ID: PAT_MRT4530_10584C.1
cccacgcgtccgcccacgcgtccgcagagttctggatcacgttgagaaactatcaagtgttcaaatgtatcgttttccttttctttgacgatatatgaagaggaatatcagtggtggaaacgagcaggaagacttttctgcattggatcatatgccagaaaatctaggacttgtttggttgggttctagctctagattcttgttatgtggagcaggagccaaaccaaacactcctagatcctcctaagagtggaggggatggatctgcttcacaaaatatatatgaagggtggagctaccattt

SEQ ID NO: 3628 - DNA, 1164 bp, Oryza sativa
  Clone ID: PAT_MRT4530_10585C.1
ctagggggcgacggcgaggtgggcggtggcggcgacggggatggggatgagaacagcgggggaaggggaggggagcgagtcaagggcggtgagggagaccttgtcggcggcgaggcaatggaggggcgaggtgggagaggaggacgtcggcggccccacacacccgcaaccacccagcacgcgctgcagatgcctggcggtccctcgcgtgccgccgttgcggacgacgacgacgaactctcgcgtcttctctcccgccgcccgccgcatgctctgtgaggtgggccgtgacggcgtcgtcgtcgtcgccggccgcgccgtctccgcccagttcgccacggctggcgcggacccatcctctggcgccgcgaccaccgccatcgccaccatggacgcctccgccggcggcgggggaactccctgccgacgaccggcgccgacggggtgaagcggcgggtgtgctacttctagcgcgcgaccacgacctctgccgcttccacgccgacgacccagcaggaccagatccgggcgctcaagcacttcaacgtcggcgaggactaccccgtcttcgacggcctctacagcttctgccagagctacgccggcggctgcgtcaagctcaaccacagccacgacatcgccatcaacgccctcgagctcgcccgcacggcgacgccgccgcccagctcctcccccggcggctgccgcccgcgccaagctccatcccgccggccgcgcacttctccgcccccgacggccgcgcactgctccgccccccacggtcgctgcccagctcctccccggcagctgccgccggcgccaagttccacccctcgccgccgccggcttcctctgggccctcttcccctcatgcctccctcctgccctccccggcggcggcgcggtatggcggagctcaaggatggcgaggacggcgcggcgtcgtgggcgggcgctgggtggcgcaactcgagaacggcgagggcggcgcggagatggggcgggggtcgttggcggcgaccccgacgcggcggcctgatcacgcgtcgcggctgccatcgctgcctcgtcggccgccgctctcaaccctgtcacgccgctcgtggccgaccccttcaaccagtcaccggcgtcggcatcaccggaggaggagaccgcggccat

SEQ ID NO: 3629 - DNA, 204 bp, Oryza sativa
  Clone ID: PAT_MRT4530_10586C.1
atgtcccgtcaaatgttgccattatacacctctacggccagtccactgtctcttctctttattatcattgagattttaaaaatcgaaaataattatcgtttggtttattttttactttctaaaagtcctgccaaaccatctcccgataaccgtcttactcgtttgcttcacggcctgcctgacatccctccttttaatcgtcat

SEQ ID NO: 3630 - DNA, 1405 bp, Oryza sativa
  Clone ID: PAT_MRT4530_10587C.1
aactagtggatccccgggctgcaggccggccggggtccatcccttcacactgctccacagccatccatccctccgccgccgccgccgccgccgccgccgaaaccctaccggcgtcgatcgaatcccctcgcctccgcctcgcgcgcacgcggggggttgggcccgaatcggaggcagaccggccaggagcggcgggatccctcgctccgtcggcgcgaatcttggtccggccatggcggtggtgggggtgctggattctttggccgccgaggagcggtggctgtacccggggttcctggccatgtacgccgccatctactgcgtcggccaactcgccctgctccggcggtgggcgtggccgctccgcctcgacggcgccagctgcctcatctccctcgcgcacggcacgcccgccgcgctcgccgcggcgggcgccatcctcgcgctgccgccggaggcgagggggttcgccgcgcccaacacccgcctccaggaccacgtcctcgactacagcgtcgcctacttcaccatggacctgctccactacctcgccttcctccccggggacaccctcttcatcgcccaccacgtcgccacgctcttcgtgttcgtcacctgccgctacctcgtccgccacggcgcctacgcgctcctcgtcctcctcgtcctcgccgaggtcaccagcctcctccagaacgtctggacgctcgccgggatctggcgcgccgagaagcccgccgcggcgagggtgtacagggcgctgtcgccgcccttctacttcatctacaccgtcgtcaggggcgtcgccggcccgctcttcttcctcaagatgagcctcttctacctgtccggccaggccgtcgacgtcatcccgtggtgggtgcgcatttcttggatcgtcgtcgtcggcaccgccatcacggtcagcaacctgtggatttggaacctctggaaggagctcttcagagaacggaagcagagcatgacgaagaaaagcacgtaggtgtatcaagcaaccatgctgtagcataatctatcgaaattgcactgatgatcagatgattcagatgacgatggtggatattttggatggcatttgtggagaattctctatatgacataattctttcattcaggtcagaaatctcaagtctaattaattagtacttagtagggaatagtccaatgggcattctgtcgcatgcattgggattttacttgttgatcattcagctaagaacactaatcactccttgatggcgagttctttggagtgatggttccctttagcatttagataaaaaaaaaatactgtactgctacatatacctcacttgatgattaccaatagatggttctttggagtgatggttcccttcagtattaaaaaaaaaaaaaaaaaaaa

SEQ ID NO: 3631 - DNA, 894 bp, Oryza sativa
  Clone ID: PAT_MRT4530_10589C.1
atgaagaacaagaagaagggtagtcgttgcaaccgcaacaaatcagatcccgtgatgctggatgggttcaccaagctacctgaagatgtcctgctcaacatcctggaccgcctcaacacccccgacgctgtcagaacctgcctcctttctaagaggacactccatctccgccatatgctctcaaacttacatattcggatcaattcctttgtgccccgttgtggctatgccaccttgaaggatacaattcccatgaacgctgctgtggctggtgcaactgacaacattctcagtttcagaagacaagatattccccttcgcaagctcagcataggtttctacttgagatactatgattgtctcaccattggcaaggctgttgcccgagccatggccacccacaacatccacagcgctgagttcaacattctgacagagaagccgccggactattcaactattgatgatcgccgccgcgatgggaagcagctgatgacatttttttgttccttttgggaccattggtgtgagattgagacagacaaggtgaaacgggaaaaacagggttactgtgacaaaacaaacgtggaatgggagtcatccgcacctgatggttttaggcattacaacctgactaagctcaccatctatggtttccaaccaaatgagaactttatgggatacatcaggcacgtcatggaagctgcggttaacctagagaacatatccctgcatgacaggaaggtgctcaagtgctgtgaagagttggatcccaagatcaaggttgctccgtcaaggtatccgcagaccatcgaggagcaggagctgctgaggaagcaaattacagagggattggtgatggcgtcgcctcatgcagttcacttccggtcttaa

SEQ ID NO: 3632 - DNA, 844 bp, Oryza sativa
  Clone ID: PAT_MRT4530_1058C.1
agccgagccggtccaattcggaccatagcccagccgcctctctcctcctccttccaggtgtgcgtgttgtacacgcgcacggcgcacgccgcctcaaactcccttccgtcgtcacgaagtaatcggcgccgtcttttcttccttcacgccagcgtcgccgtggtcaagccgtcgaccgcctccagaaccgcctctccccaccgcccctctcccaaacagagctccatctttctctctcttgccatgtccggccgtcgccgtcgtcggccgatctccctcaccggagcttcgaaagccaaacccttgcgccaccaactccgcctcgccgaggtgattccattttttcctatttcccctctcctttagccactgccacaagcactaccggcaccaccatagccggccagagctgagctcttgctgccgccgttccggccattctatttactccctatgccttccaccgacctccccggatgcatagcgagcgggaacacgcttgtccgccgccgtcgaggccattaaaccaccgaagcaccggtgccctgtgccctgcgtaccgcggtcggagcctcggagcagccacgacctccacgagagaagaacgggaggaagaagaagagacatatgaaagtgggccccgctgcacagtaaacttcctcttttatttgatttcaatctttagacaaccatatctttccaaccacaaattcaattccagtgaacctttgatctaaattcatctaatttcaaaccctcccttttgataccaaatttcctatttaaaattttgtttaaatacccttttaatttaaacctatttgatttatcttaaatcccttta

SEQ ID NO: 3633 - DNA, 1907 bp, Oryza sativa
  Clone ID: PAT_MRT4530_10590C.1
atgggcagcggccacggccatgtcgacccgccgccgtgcgcgccgacctcccgacagcccgagagagagggtgagagagacagagagactgacgaacccaggttgaagacgatgacgacgagctcgggcgcggtggcggtggccaccgggggctcggagcggaagggcgaaaacgacctccgcctccaccctcgccacttcaccgccctccgtcgcgacagggggggggggcacggcaatacggttgcatcgtggcggcgcgacagcagggggacacgggcaccgtcactcccgctggccacaggccaccgcccacctctccaccacgccctccgcgcccccgccacgcctgccgcttgccctgcccccaccacggagaaggcgagaacgcccgacacaacggacgcgatgagggtggcggcaaggtggtgcgccagctgcctgacgaaatgcgtgagcgggaggcccgacgccaccgccgcgaggagtagattcggcgcgaacgggcgcgctgcttttccctggagcagtgttctaccaagtttggggctcccccttctgaggcatgaccaacggtacgggcgttaccgacttagaaaaatgcggggccactttgagaaagcgcacaactgatttcttggtggccgtcggggttttctgcctgaacactcctaccacttctcctctgtgcccctcccgcttgtctcctggttgggagtacccgtagtcaccatgctgcgttcatgtctggattggtcgattcccaatatctctgatcgggatcgctcccctcggacccccggccgccaacaccggatcaggcgccttgctaggagtgagctgtggtctctgtctctagatctaacctagagcacaccctgtgtgacccaacggcaaagaggctcgctgccacgcaatgtcggacacctcagcgccccataaacgtttccgaccgaccccattccccgtatcgcccttgtcgacgtgtccgagcatcctcgaccgcacgatacaggaaccacggaccatcactcctctctcgtttgtacttctcgaatctctctcgactctgggaacttacgccccgtcgacgaagcatacacaatttctctattattatttttctcctccctagacttcgattttctaaagtcccccgaacacggcacggacgagaaggagtcgaggaggcttcgaatccgccgccgccgccaccgccgccgccgccaccgccgccgccgacgagatgtcctccccggcagaatatggaggctatttacaagcttctttttcctgggcaagttttctatcaactttgggattcgccttctgatgatagcaagatacggcgtgcagttagaaaagggtgcatttgaaaagcgcacagctgatttcttgtggatgatgatatttggtgccatatcactgctggcattgtcagctattcccttcctggatatttatttcttgggagtacccatggtcagcatgcttctttatgtctggagcagagaatatccgaattctcagatcagcatgtatggccttgtccaactgagggcgaacgctccggtccgacccgcggccgccaacaccggatcaggcgccttcagaggaaggagctacagactcagtcaatagatctaacctagaggacaccctgtgctgcaagcctgcaacgcctatctgggagatgcaatgtagaatgaagcaaggtacatcaatgggtcaacctggacgctactagacatagactgttcagcagcttcaggaatttgggtttgcccatctaacaggaatgctgaatctgaaatgctctatgggtacaaacgatgtgaaacatttgcattgtacgcatgaaatgtttgtaggcgagaaatgtatactcccttttgttttcggatacc

SEQ ID NO: 3634 - DNA, 401 bp, Oryza sativa
  Clone ID: PAT_MRT4530_10591C.1
gagattactaacagacggcccatactgagaatactgttattggtccacaacgtaaggttaaacgtgcaatgagcaaaaccccttatttatacgattttggagctggtatagcacatatctaccgattttagaggggtaatctaaccagttttgtcgataagaaaatatacctaagcgacactaaatatgaaaccctgcccagtcaaagtcttaaacctttggggcatgaacattacaagcaaaaacctggccataattgcccttgccattcttatccagatagtgagaccttgtattgagagctagcatgtggtaaacaagccagaatagagttgcttgaagggccaggaaggcggatccttcaaagaggccagtcttcgcagtagggcactgggtatcca

SEQ ID NO: 3635 - DNA, 1921 bp, Oryza sativa
  Clone ID: PAT_MRT4530_10592C.1
atgggcagcggccacggccatgtcgacccgccgccgtgcgcgccgacctcccgacagcccgagagagagggtgagagagacagagagactgacgaacccaggttgaagacgatgacgacgagctcgggcgcggtggcggtggccaccgggggctcggagcggaagggcgaaaacgacctccgcctccaccctcgccacttcaccgccctccgtcgcgacagggggggggggcacggcaacacgggggcagcggggcggcgcgacagcagggggacacgggcaccgtcactcccgctggccacaggccaccgcccacctctccaccacgccctccgcgcccccgccacgcctgccgcttgccctgcccccaccacggagaaggcgagaacggtgaggaggccggcacagacgacaatgtcgggcgggcttggcgccggcgaggagcggcttgcccgcgtagacgccatgaccgcgtacgcaacggcggcgcgggtggcgaggaggagcgtgaatgtcgccgagaatgacacaacggacgcgatgagggtggcggcaaggtggtgcgccagctgcctgacgaaatgcgtgagcgggagccccgacgccaccgccgcgaggagtagcttccgcgcgaacgggagcacggctgcaccctccagcgcggcggtggacagcaggaggcaccccgaccgatgccgggcagagcaggaagaagagcaccgacgatcaagcgatcccactctgatccaacggctaagaggcccgctgccacgccaccccggccacctcagcgccccatccacgtctccgaccaatcgccttccccgcatcgcccacgtcgacgtgtccgagcatcctcgaccgtccgatccaggatccacggcccatcccgcctctcccatctggccttctcgactctctctcgactctggaaccttccgccccggcgacgaagcgaacgcgacttccccattattatttttctcctccttcgacttcgatttttcgaactcccccgaacacgacgccgacgaggagtcgaggaggcttcgaatccgccgccgccgccaccgccgccgccgacgagatgtcctccccggcagagtactacaactcacttccaccaataagcaaggcatatggaacattgtgtttctttgccactgtactgtgccagctccagatactgaatccaccttttcttgccttatactatccctttgtgttcaagaaatttcagatatggaggctatttacaagcttctttttcctgggcaagttttctatcaactttgggattcgccttctgatgatagcaagatacggcgtgcagttagaaaagggtgcatttgaaaagcgcacagctgatttcttgtggatgatgatatttggtgccatatcactgctggcattgtcagctattcccttcctggatatttatttcttgggagtacccatggtcagcatgcttctttatgtctggagcagagaatatccgaattctcagatcagcatgtatggccttgtccaactgaggtccttttatctaccatgggcaatgcttgggttggatgtgatatttggctcagagatactccctggccttctgggaattctcgttggacacacgtactacttcctctcagtgttgcacccgctagccaccggaaagaactacctgaagacaccaatgtgggtacataagattgttgctcgattcagaataggtgtgcaggcgaacgctccggtccgacccgcggccgccaacaccggtaacacgccttcagccggtccaccacggcggttcccttccatggtaaccggccggcccaaccaaattcccaccctcccaattgaattcgtggtttgccccgtcaaaaaaaaaaaaaaaaaaaaaaaaaaaaaaaaaaaaaaaaaaaaa

SEQ ID NO: 3636 - DNA, 227 bp, Oryza sativa
  Clone ID: PAT_MRT4530_10593C.1
gttagctataatatacttccctttggagtttggaactaaagatttatgtccaaatttatggtttttacagaggaaactagaggattttttacgttcacctgtagctggcgcgagcaataatgccttcgatcgcatcaaagtccgaatgaagtggaaactccattgttgatgacgtgcgacgtccgcaccagatccagatatgttcatccattcgacaggaaagtttg

SEQ ID NO: 3637 - DNA, 423 bp, Oryza sativa
  Clone ID: PAT_MRT4530_10594C.1
atgggcaggctgcgggggaaggtgttcccggcgtgcttcgcgctcaacgcggcgtgcacggcggcctccgcggcggcgttcgcgtggctccaccgcccgccgtggccgccggccgagcgccggcagctcgcggtcctcctcgtcgccgctgggtacgacctcgccaacctgcttatcttcacccctaggacactcgaggcgatgcgtgaaaggcacaaagtggagagaagcctcggcatcggcggcgacggctcgttcgtcggctggcggcagaatgctcgggcagcaaggagcagcagcaccctcgccgccgagaatgcgaggttctgggtggcgcacagcttctcggcggtggccctcgtcatctcggcggctgggctcttctcgcatttctgctacctctccgggaagatagtgatatga

SEQ ID NO: 3638 - DNA, 295 bp, Oryza sativa
  Clone ID: PAT_MRT4530_10595C.1
tttatttttttacaaaataaaaaacccgatttattacatcggggtcataatacaaaaacggggcacacacaccatcaaaacctatatataattacataatatctcgacttaatcatgatcataactaatacctcactaaaattgatatccacacacaaattttacacaacatacgatcctgaaacataaattataaatcctcaacaccctaatgacaaatcatacttacattaatttcataccattaactaaacgattattaatttcaaaaccatacatatcatcatcattatat

SEQ ID NO: 3639 - DNA, 6148 bp, Oryza sativa
  Clone ID: PAT_MRT4530_10596C.1
tttaaccagaaataaaaagattctctccccgtctcgtctccctccatcgatcgatttctcgggggagttttcttctagcttcggttcttgatcgttggtgattgcttggagcctttgagccaccaggaggaaggaggaggaggaggaggaggaggagagatagaggagaggcggcggcggcgtcggactggggcactgttccaagagagagtagcctccaaagatggaagttgaacaggctgcagaagtaggagaggtgactgctcctaagttgcctgataaggcagtcgacaaggctcaggtacatgatgatgacaaggaaaatctagtgaatggtaattcaaatctgcaagtgaaggaagcacacaacgatgaggatgatggcacaggatcagacggttttgagctgatagatgtgaaggagaattttgattctgcaaaagtggtggaagaagaaaaggctagtcccatagagcaaggaaaaactgcagcgcttgaagaacaagcgctcacgagagaatctgccatgctaaaccaagaagcaaaacaactggaagaactaacgaggcgtattgaagagcttgaattggaaaaggagaaattggtaaagggcgtgacagaagcagaaaacaagcagaacctgcattacacttctctacaagaagcacagagatctttagctgataaagataaggagctggctgatgcaactcagtcactgaaggagctgggttctgagcttgagagctcaaaggagaggattcaagaaattgaagctgaattagctgcgtccgctgacaagctccacaaacttgaagagctcaaggatgaaagaagcttgcatgctgcgcaggaggcgaagagggcctcagaacttgacaagacgcttgaaacggcacagttgaacatgaaagagatggaagctcagatcagttctcttcaagaagagataaaggggcatcaagataaggccattgatcatcagcaagtggaagaatcactgagaagcacgctctcagaactcaagatgaatcgactgaaggaaaaaactcttaaattagagaatgaactttcttctgcgcatgaagagctgcaagcaaagatcctgaatttgcaggaaatggagatcaagctcgaagagcaggcaaaggaaaaacagacttgggaagctacattggagaagcaacaggagcagatactcaacctgcagactgagctcgatgaatcaaagggcggaaatgaaactctccgagggactatagctgatcttaactcaaaacttgcagagagagactctcttctgcgtcaagctgaagatgagcatgctaaagcacagctgctcctctcagaagccctgtcacataaagatgaactggaggtaaatctgaaatctatcaatgagcagcatggtgagtccagagctgctgcagaaaatgcaagccagaagattctagagcttgaagcactactccagacacttcatgctactgaagaggctttgaagttacagctagaagaggctgaggcaagggtggaagttgctgagaagaaaggttcagatcttgagcaactgctcggtgaatctgagaacaaattagtcgcttccagtggagaactaaagttgttggaagagcgtgttcaacaagaggcagcttcatcagcagaaaaggagaagctgcttgaagaagcaacgaacagtgtggaggcgtacaaagaaaagatcaatgagttgcaagcatctctggattccacgacgtctaaaaatcagctgcttgaacaagaagtcaaggacctgtctgacaagtttacagagcatcaagaacaagctcattcggttcacgaaagaagtcttgaactggagagcctgcttcatacatcgaagtctgatgctgaagttgcacacacccggacacaggatcttgaaaatgagctgaacactgcaaatgaaaagttcaaggaggttgaagcagacctagaacagtacaggagcaaggtttctcagctttccgatgaactagaagcataccagacaaaagcagctagtcttgaagctgtgatggaatctgcaagcgaaaaggagaaagagcttgtggaatctctgggtcaaattactgaagaaaagaagaaacttgaactactagtattggagtatgaagagaagaccgaagaatacttaaaggaaaaacaatctttggaagagaggttgcagagccaagaatccaaggtgctggctttagaggaatcgttggtgaaaatgggagaagaaaaagaaagtcatgagggcaccattgctgatcttaatctacaattatccaataagaatgacatgtacatgcaattggagtcccagttaagtcaggccggggatgatcatagcaaaacaagatcacttctatctgaagcacaattgcacaaagaggaactggagttaaacttgaaatctcttaatgatctgcacgtcgaatccaaaacagctgcggagtctgcattacagagaattgcagagcttgaaactcaggttcaggaattaagtgctgctgaacaaagtttgaagtcacaccttactgagtttgagtcaaagttggcatctgctgagaaaaagagtatggatcttgagcaagagcttaaagatgctacagaggaatgcaacagttcccgtttgagagtcgatgagctttctggggagcttgaagagtacaaagagaaaagaactagcctcgaggcttcattactcgaagcaaaacaaaaggaggctgagttgtcagagaagttggatcaagttaatgaagaaaaggagaaatttgaagagctgtccaagaaagctaccataaaacatttggaagcagagaaccaggtccaagccttgcaaggcgaactagaatcggcccgccataaactggaagaggtggagtctgatcttgaggcccttggtattagagaaacctcagtacttgacaagcttaaatctgccgaggagcagcttgagcacaaaggaaaggcactagaacatgccacttccaagaaaattgatctggaagcgctgtaccagtccttacttgaagacacagagatgaagcttcagcaagcaggggagaacttgacccagaaggagacagaatgccaggagttgtctgaaaaattgaaggcagctgaggaacaagcagcatcttatcaagcaaaagcaactgcagccgcagaagaggtggaatccgtgaaggtggagcttgaagcctttgagacggagatatctactcttgagaccaccattgaagaacttaagaccaaggcctccaatgccgagtcaagggccgaacaggctttggttgagagtgcaatgatgagtgagacaaaccaggccctaaaagaggaccttgatgctaagctggccatgcttcgtgaactacaggaacagtttgattctactcatgctgagaaagaagaagttttcacgaagctatctgcgcatgagaaaacgatagagcatttgactgaggtgcacagtagaggcttagaactccacgctacagctgaatcaaagaatgcagaacttgaagcgcaaatgcatgaagctcttgagacaatagggaagaaagattcagaagtaaaagacttgaatgagaggctggctgctcttgagtccgagattgaaagtttgacgcatgtgaatgaagccatgaaacaggaaatcaatgctaagctggtcaaggttgatgagctgcaggagaaattgagttccataagttctgagaaagaagaagttgcagagaaagtggttgttcatgagaaaacaatagaacatttgagagaagagcactcaaggggcttggagctccagtctgctgctgaatcgagatctgcagaaattgagaatgaactgcgtgaagttcttgaaacagtagctcagaaagaagctgaagttacagacttgaaggaaaagctagtttcacttgaaactgagaatgaaaaactggttggtataaatgaggccctgaaaggggaactggatactaaggtggcaatgttcgatgagttacaggaacagttcagctcaactcatgctgaaaaggaagaagctgcagagaagctagctgttcatgagagaacaatttcgcacctgacagaagtgcacacgagaagcttggaactccactctgcagctgagtcaaagaacgaagaaattgaaagtaagctccatgaggcccttgagatggcagcacagaaagaagctgaagttaaagacctaagcaagaagctggatgctcttgaaatagagttgggatattatgaggagcaggcaactgaagctgctgctgctgaagaaacgcataagattaagtttgatgaagctgtgcacaaaataaaaagcctagaagaacaacttgcagtaacagaaaacaaggttgagcttttccataccgagaaagaaaatttggttattgcaaatagcaaattgaatgaggagctggagttacatcagaacaagctgaatgaattgcaagtagcccttgctgcagcagtagcagaaaaggaggggtcatctgaagagattcattcattgaggaaaacactagatggcatgattcaacggaaggaagagctggaaagccagctctctctcaacagttatattgctattacatattttgtagctttaagaaagtagccgccctttcaggtatcttctactgtcgaagagcatgaagaactgaagagcaagtacaatattacgctggaggaaaagcagttgttgaatgagaagtatgaatctgcaaagaaagagcttggggaagcaatagctaaattagaggagcaaatgaatgttgacaagtcagaaaaagaattgcacatctcaaaattggagaggcagatcacattgtctgaactaaaatacatggaggagatccaaaccatgcaagtggaaacaactgaaaaggatgaggcgcttacaaccaaaatgcaagagcatgcaaacttggtccatgaaaaagatgcgttggaacaacaattactggaagttaggaaggaactaaatgatgcttaccataccatagcaaatcaggaagagcaagtttcagtgagggagataaagtgggatgcatataagaagttctcagaggatcaacttgaagctgagcagcagcatgttgcagagctggaagtacaagtatcatctcttaaacaacagctgcaagaaactgagatccattacaagcacaaggaagaacaggtttctctaagggaggttcaatgggaagcagatcaagaacattcagtgagtgagctaaaagctcagcgtcagtatgctgcagaattagagaaacaaattggagctcttacacagcagttacaattggttgaaaaacagtatgagcaaaaggttacagaagagagggagaaacttgctctcgttaacacggaagtcagcaagttgacacagaagcttagcaagagtgctgaaatggagaagaagatagaacaccttgagcagaaattgcaggcaaaagattctgtggaatcgacatcccgcgacttcagccttgactcatcaacgctgccaagcaaacaacgcgacagatcgctggctcctgaaacgacacctccaaacccaacacaacagcaagaactgcgagagccttctggtatcatggcctttaagttcatcctgggagtcgcgctgctgtccgtgctcatcggtgtatttcttgggaagagatactagcgtttatgcctttcagaatgtctactgggaaaccccattgtcaatactgctttcggtgaacctcaattgtcttagcagttgaaaactgtgcaaattctgcaaaagtttgaaagattttggtaggcttcactggaacaacagattcatgacttccagggagaagtcagaaaatcttggaagttttttctcctcttgttgagtaattccatttagtttcattttttggtttagggggctaggaatatgatttttgtttcattcctacccttttgcatgcagaaggccatctgctgcatgcaattggttttgctgtcagcttgtatttacatctgtatgtaaagagaacatcggttcggggacaagaaatatatgcctatgaaaatttgttcataattaaaaaaaaaaaaaaaactccagctccccggggtc

SEQ ID NO: 3640 - DNA, 381 bp, Oryza sativa
  Clone ID: PAT_MRT4530_10597C.1
ggcggtatcattactttcggatgcattggctgtttctgcccaggcattgattgcaagttcttttgccaagcttgactatgaaaaggtcaaggaggtcacatactatgtcttgaagataggactgcttgttggtgcagctatagcccttcttctgtttgcctcttttggtagaattgcagaactgttctccaaagatcctatggttctacatattgctgggagtggtgttctgtttgttagtgccagccaaccaattaatgccctagctgttatcttcgatggacttcacttcggtgtgtcagacttctcatattctgcttcttcaatgattactgccggggcaatatcttctatatatctgctatatgctcccaaagtttt

SEQ ID NO: 3641 - DNA, 380 bp, Oryza sativa
  Clone ID: PAT_MRT4530_10598C.1
cgttggattcggatatactactactactactactactacattttgcatgaatcgtgtgactacgtacaagcgtactactactaatttgcattacgtatgtaccttgtgtgttgtaaaattaaatcaaccctgtgttgtgcaactattatgattgcactaggttatatgggttgcgtagttgattaagtttggtccggtcggttggagtggtttttgtatgcacacgtaccaatatgctgtacgtctcactgtctcggtgattctcacaccaaataggcaaagtgcaaaattagcaaaggctgtgtttagattgaaaggttagatccaaactgtagtccttttccatcactatgaagctattatacacacacaactataca

SEQ ID NO: 3642 - DNA, 771 bp, Oryza sativa
  Clone ID: PAT_MRT4530_10599C.1
atggcgcgccatctggtggccttgtcaagaaaagcacctacttcagaagaccttagtataatagtacatgatagtctggagtatatagatggacagtctgacttggtgaactatggcagaaagattgtggagcacatcattctgcttagagccaagccaaatatctcggacgctgaagaaaaggacatgctagattacttgtatacttctcagtatcagatgagagggattctagctgtgtcattagggcgcatagaggatcccaacacagagaactttacgcatgctgttttgatgcgttttcagcagaaagacgacattgcaaagttccacagtagtccctactactacaaaattctcgatgagcacggctcggtttctgtagattttgaatctgaagttgaagatgacattatccctctcttccgtcggggagaggattttaactatggagtggagttcatgctactgatatctttcttggaaagtgcatctggagattcagtggaggatgcattagcttctcttcagaggttcatcagtcaatgcagttctttcattgttcaggcaaccttaggctgctgtctgaatcatatggacagtggttacagtcatgctgcagttatccgttttccgtcatttgatgacttcaagatattcagggaggggatggaatacaaggatatgtgggcatcaacatttcaaccgattgtggagaaatctcttgagctacacttcacagttgatcccgtgggtaaccagctgatgtag

SEQ ID NO: 3643 - DNA, 491 bp, Oryza sativa
  Clone ID: PAT_MRT4530_1059C.1
cggccgcccttttttttttttttttttttttttttttttttttttttttttttttttttttttttttttttttttttggaaaagaaaaggaattgtttttttcaaaaccatatttcttttttatccgggcaaaagaaagatcgggagtccacaacccctccttaagggactaaaacaaacccccctaaaaataactttagaaacgcacaagaatattttcctaaaataaacaccaaatgctcccgctggaagggaaatccaaaccaagtgattccggcccaaacaaattccgaaaactacccgctgcgccctttaaggggtggaattttatttctaggggggaggaaggccaggagcgaaacaaccggggccacggcccaagcccccggggggacgggccccgccgggtgggccggggggggaacgaggcccgaggccccccattataacggcctctttcttcagaacttttaacggggcgccgtggccgc

SEQ ID NO: 3644 - DNA, 359 bp, Oryza sativa
  Clone ID: PAT_MRT4530_105C.1
aaaaaaaggggctgacataaaaagcccccttcaatgggaaggaatacccacatttttaccgggttttttatgttcaaacggaaaacccgatttccccgattggcccccgccaaagggcatcacaagggcattggttttttacaacaaaaattggaggaaccttgggtgggtggttagacaaatccacattaaggaagtttgtcaggtcgtaaaaccctacattttcaaccctggccttgaatggggggcccattggttttttctgaaccgcctggtttgacaatccccttgatgtcacccccctgtttcgcaggctttaaaaaaaagccaaacaatttttcattccccccggatgggac

SEQ ID NO: 3645 - DNA, 215 bp, Oryza sativa
  unsure (1)..(215): unsure at all n locations
  Clone ID: PAT_MRT4530_10600C.1
acgtcgcgctgtgcttgcactgttggccccgtcgacggcgtcttcggtgatgaaggtggcgccctccgcctccccctaccgagcggcgactaacttgttcactaagcccaagactaacacctggttgaccgcttacagcggatacggaatcaagctcgtgatcccgtccaactggaactccgttacggagcccnatttccctgcacaggtactgc

SEQ ID NO: 3646 - DNA, 3827 bp, Oryza sativa
  Clone ID: PAT_MRT4530_10601C.1
atgtctggagtttccgccgctactggaggtggtgcgccgccaggagctggagccagtgccgcgaacgacaacatcaacggaggcaattctgcctcacaatccagcggagggccattctcggggagccctgatttgtcacagaagcagggctctgaattccaacttgctgctggaaaggtgatcagacatgagggttgtgcagagcacgatcatattagcatcggggatcatggcaattttctggctcgtcggaagcgcacaggctgcttctcgttcctacctggtggtccaaggaccctcttcttttatgaactcgatcattttgatggtgttgtgacatgcatccccttagacgatgaaccagttgatgaaggttacagtttcctatgtttttgtcttgggtgggacaaaagacgcagcggcatatttgattgcgtttgcaagacttgcggccaccatgtgcccgttccatatcctttcccaaagaaaaagacatatgcgtgtggccatggaatcggagaggaaaattcaaggtctggcatcagagggacttgggacgctactatatctaagttttacgttaccgttggtaaccgcgccgttaccggccttaccgcgggggactgggcttcagatagcgacaatgataagttcgagtgggacacagacggtgaggctgagacctcatctgccccggccctaaggaacatagatgctcctggtccgtccacgaggctgccgcaggatgcaaatgggaaggccaacgggtcaggtgctttggttgctgaatttatgggaatgggattcccaaaagaaatgatcttgaaagcgattaaggagattggggatacagatacagagcaattgcttgagttacttctgacttatcaggcaataggcggtgacgcttcagtgggtaactgctctgcttcggcctgtgccccccagactcttgaagtcgacgaggaggaggatgatactaattgggatgaatatgatactgctggcaattgtgacaggactcctcactctgatggttctggtgacgaggatttctttcaagaaatgtcagagaaggatgaaaaaatgaagtccttagtcaacatgggttttcctgaagatgaagcaaagatggctatcgatagatgtggtctcgatgcgcctgtagcagtgttggttgattcaatctatgcatcacaggaagcaggaaatggttactctgcaaacttatctgactatgaggatacagagttcagttcctttggaggaagaaagaaaacaagatttgtggatggaagcaagaagagaaagcggtatggaagtgggccatctgggaatcaagtgccgtttgatggcagccacgaagagcccatgcctcttccaaatccaatggtgggattcagcttgcccaatgagaggttaaggtcagtccacagaaatcttcctgaccaagctcttgggccaccattcttttactatgaaaacgtggccctagctccaaaaggtgtatggacaaccatctcaaggtttttatatgacattcagcctgagtttgtggactccaagtacttttgtgctgctgccaggaagaggggttatattcataacctgccgattgagaacaggtcacctgttctcccaatgcctcccaaaacaatatctgaagcctttcctaataccaagaggtggtggccttcctgggatccaaggaggcagttcaactgcttgcaaacttgtatggcaagcgcaaagcttacagagcgaattcgttgtgctttgggtagattcagtgatgtaccaactccacaagttcagaagtatgtcttggacgaatgtaggaaatggaacctagtttgggtcggaaagaataaggtcgctcctctagagcctgatgagatggagttcctgttagggtaccctagaaaccacactaggggagttagcaggacggagaggtacagggctctcgggaattcattccaagttgatacagtagcataccatctctctgtgctgagggacctgtttcccaatggaatgaatgtcttatccctgttttctggtattggaggagcagaggtagctctccacagactggggatacatatgaaaacagtgatctctgttgagaaatcagaagtgaacagaacgattctgaagagctggtgggatcagacacaaactggaacgctgattgaaatcgccgacgtgcggcatcttactactgaaagaattgaaacattcatcagaaggtttggcggttttgacctggtgattggtggcagcccgtgcaacaaccttgctggcagcaaccgccatcaccgagatggtctggagggcgagcactccgcgctcttctacgattacattagaatattagaacatagttcaaaaacaactgttggccccaacaaatatcagaatctgggaagcagaacagaaaaggacagtgctgtacgcttcagccactcccttccggtgaagagttgctcaccacattatgttcacctaacaaaaatatcccacttcaactggcagatatcccaccacagctcttccaaggctccaaccccaaatccaagccataaaacctttgcaacaaccatgagagctaagcttccaagctctgaattttcaggatgttgatgccagcttctgctcagatccctcatcacacaatacgtcctgttgcaagttacttagttctgcatcgacggcgccggcacaagtctgaccggcgttttagattgcagggtcctacgaggagggtggtcttttgcactcgcagtgtgctaggttccagcaatggcgcgccatctggtggccttgtcaagaaaagaaagattgtggagcacatcattctgcttagagccaagccaaatatctcggacgctgaagaaaaggacatgctagattacttgtatacttctcagtatcagatgagagggattctagctgtgtcattagggcgcatagaggatcccaacacagagaactttacgcatgctgttttgatgcgttttcagcagaaagacgacattgcaaagttccacagtagtccctactactacaaaattctcgatgagcacgtaaaacccgtttcatatgtacgcctcagcatggctcggtttctgtagattttgaatctgaagttgaagatgacattatccctctcttccgtcggggagaggattttaactatggagtggagttcatgctactgatatctttcttggaaagtgcatctggagattcagtggaggatgcattagcttctcttcagaggttcatcagtcaatgcagttctttcattgttcaggcaaccttaggctgctgtctgaatcatatggacagtggttacagtcatgctgcagttatccgttttccgtcatttgatgacttcaagatattcagggaggggatggaatacaaggatatgtgggcatcaacatttcaaccgattgtggagaaatctcttgagctacacttcacagttgatcccgtgggtaaccagctgatgtagattctgagcacctgacaaaatattcagtcctggattggacgtatatattgttggtaaactcctgagttgctgatgagggaaaagtattgaaatgaaatcttgaggttttacataggcgattgtgttcatcacataaacgccttccttttccttgcccggaatgcaagaacgagagataccttgaaaatgttttatcctgtcatgaatgtacctcaatcgcaagatgtacagtgtggttggaccggctggttggttaattatattggtcctgacatgttcctatcctaaaaaaaaaaaaaaaaaa

SEQ ID NO: 3647 - DNA, 720 bp, Oryza sativa
  unsure (1)..(720): unsure at all n locations
  Clone ID: PAT_MRT4530_10602C.1
ccaaacgcttttggcatcaggcnaaaatcagtggtgccatttcatccgttaaccaactgtttccgtgttttctgcaatcgatgttcctgtgccctgtagcacactgagatgcaatggccgatccaggatcaaaatcccaacctgcggagaatgtatcaaaagattatatatttcagtttcaatgcaaatatgagaaattatggggttagttgaccccgcaggtcataaacgtggctctgccactgctcctatccacaaaaattggtctttgtctgccccattctatatttgccaccattataaaacctcattgggctagaaagctctacgcactccatttgagggtaaaggtgttaacacttacttctttttaaccatgtcgtataactaacttcatttcttacttgtgtagatgttttcggaagttaaaacttcctatttttatccgttggatcctaacattacctgactatgtaccatcctctggggttagtcgagggtagtgtagtcacgtgggttgttaagaaaattacaccggcatggatatatggatacatacaagctggtttgatgtaaatgtgtataatcatttggagcactgttgattggatcattccttatgtggtgtactggtcgttggagtgataaaaacttcccatgaggggtcttttatgaaatataagcgttgaaaattttcacttcaaaaaaaaaaaaaaaaaa

SEQ ID NO: 3648 - DNA, 390 bp, Oryza sativa
  Clone ID: PAT_MRT4530_10603C.1
atgagggaagggcgtcgggccatcgcccacacaggaaaatcatttttcgtggcggcgaaggtggtggcatcggcgggcgtggaggcggcggcatcggctacggtgttggcggcggagcggatctgtctccggccgccgcgtaaaggccagatccgttgccagccgccgcgggaaggcaagatccgtggcccgccgccgctgggaggccggatccgtggcctgccaccacggggatgtcggatccgtcgcctgccaccacgaggaggctggatccgttgccggcgaccgcggggacgacggcggcaggcctcaggcaaggtggcgatgacgatgacaggcctcgggcaaggcaacgatgatggtggtggccgtggtattgacggcggctag

SEQ ID NO: 3649 - DNA, 241 bp, Oryza sativa
  Clone ID: PAT_MRT4530_10604C.1
atggatggagaccccccgggcggcgaggacggcgaatcagccgtgcagcgaggatggcgaccccctgggcggccattggcgccggcgggctcccccggacggccagcgccggcggcacgggaggccatccctaggcctgctcggccggctaatcccaggcgggcgcaggacaggcagctcatggccacggcggcacatgcaggcagctcccaggcgggcacggacagcaaccccctagatg

SEQ ID NO: 3650 - DNA, 498 bp, Oryza sativa
  Clone ID: PAT_MRT4530_10605C.1
atgacggggattgagcgccgcttcggtcaagaggtcgtcgacatgacagaatgggattatgctcaaaaggcgcgacttccacctcgtgccaagactcgtgttaggcgtggaagttcagtagtcgtaatgccactcagaataggtcatctggccagcatcgtcatgaactgtaggctcaccaacacctccttcgtgcgtgtaggaactggaatcaggagtaggaacaggatcagcatcagatctggcaaccccatggctaatagcttcgttagagcggcggtggcggaggatgtgctcaccaggatgcggcggaagcggcaggacgagcgacgaagccgtactcgctcgcgcgatgaatggggatcggagcaggcagcggtggcggaggatcacggctcggcggcgtggctgtggacggggacgacgccagctaagctggggacggggacggggacgacgccggcgtgggtggggaaggctgcccccaaacctagctga

SEQ ID NO: 3651 - DNA, 5076 bp, Oryza sativa
  Clone ID: PAT_MRT4530_10606C.1
ctattgcctaacacccgcccgcagtcgcagcgggaggctcccggacgcaaaggcaagggccaccttttcgcgaacgaagtgaatgtcgatctcgatgtgcttcgttcgcttgtggtggacggggttggtcgtcatgtagacggcgctgacattgtcgcagaagacaacggtggcggagggcagctggatgtggagctcctggagtaactgtcgaagccagcagcactcagccacaacgtgagccacagcccgatactctgcctcggcgctggagcgggacaccgtggtctggcgcttggaagaccaggaaaccagagtgtcgccgagatagacgcagaagccggaggtggatcgtcgagagtctgggcatcctgcccagtcagcatcagagtaggcagtcagtttgtcgacagacccggtgccaatgtgaagacccgaggagagagtcccctggacgaagcgtaggatgcgcttgatgagcgcacggtgaggctcgcgtggggcgtgcatgaagaggcacacttgttgaacagcgtatgccagatcaggacgagtcagcgtcaggtactggagagctcccgccaagctcctgtactcagatgcatccttttctgacagtagatcccagtcggtcgcggatagcttggcgtgagtgtcaacaggtgtcgatgtcggatgacactcagccatgcccgcgcgctggagaagctcgacggcgtactgtcgctgggagaggaagagaccatcggaggagcgcgtgacagcgatgccgaggaagtggtgaagagcgccaaggtctgtcatggcgaactcggagctcagccgagtcatgatgcgctgtaggagggccgaggacgaggcggtgagaacgatgtcgtcgacgtacagcagtaggtaggcgagactcatcccctctcgtaaaatgaaaagggacgtgtcggaggtggaggcgacgaagccaagcttccggacgaaggtggcgaagcgctggtaccaggcccgcggagcctgcttcagtccatacaaggacttctgcagtcggcagacatgctctggggcgccagggtcgatgaatcctggcggctgctggcagtagacggtctcctcgaggtggccgtgaagaaaggcgttcttcacgtccagctggtgaatgggccaggcgcgggacgcggcgatggtgagtacagaccgaatggtggccggtttgacaaccgggctgaaggtctcgtcgtagtcgacgccctcgcgctgggagaagccgcggacaacccagcgagccttgtggcgggcgagggacccatcggcatgaaacttgtgccggaagatccacttccccatcacgacgttggctccagggggccgcggaacgagctgccaggtgttgttgtcgacgagggcctggtactcatccatcatcgcggcacgccagttggcgtcggccagggcactgcggtagttcgtcggtactggcgacggtgaggatgacgttgtggccgccaaccctttatagctgacgcgaggaatgacacccgtcatggtgcgagtggcgcgcggcggtggcggcggtggcggtgccggaacggggaatgccgccggtgctggtgtgggcgtcgtaggtggcgccggggcgtcaggagccacaggggctgctggggcagttgccggctcggacgtagacgccgtacgggagcggcggacgtagactcgtgggaaggggaccacgctgggtccaggcgggggcacggggcccgcgcccgcccggtgttcaaaaaaggcgatccgtgtgaggccgcagcatctgagggcggcatccgaggacgtcatgtgcgtagaggcgccggagtcaacgacccagggcgagttgccctgcagttgcatgttctgcagggcagcgatgaggccggctgcatcccaggtgctggtggaggtgttggagccgctggaggacgcctggagtggagcaaaggcggtgtgggcctgcggggaaggcccgaggatgccctggttgcgcccagccggggcaccaggacctccaggggcgccagaacctccctggcggcgctgtccagggggggtgacgcgctctccaggggccacacgttcgccggtccagggattgaagccccagggaacgcgtttgttggtgccggggctgccggagttgttggagaagccgccggaggagtttgggaagggctgttgggcgccctttttggtgttagggcgccggccaccctgctgctgcggctgctggaaaccgccattagaggaggcagcagccaggagggcggcggcagcacgcgtcttctcgtcgttttgcagccgcagctccttgaggaggagctgatggcgtgcggtggcgagggtgaggggctgctgtccggcgatgttgtcggcgacgccggagtagacctcgttgagtccgcgcaggaggttgaggacgaggttgggctcagatacgggctgcccgacgtcgcgcagttcgtcggccttctccttcatgcgaacgcagtaggcgtcaatggacaggtccccctgagtcatcgagtgaaactcgtgattcaggaagatggcgcgaggagctttgtttgcctggaacaccccgccgatggccgtccaaagaacgctcgctgtctgcgtgtcgtcggtcatggcaaggttgaggacggcgtcggagacggtgctgtacatccatccgcggacgcagaagtcagcctgtttccaggcctcgtcggtggggcgcgaggtggaggcggtggcgagatgatgcagcagcccgaacttcccacacgtggcctggaacgctgttgaccacttggtgaagttggagggcttcaactcgagggtcatggggacgtggagcttgatgttgatggtggcgaaggggcagatcacaggggcagaattggccccaagggcgccgctagtggcagagaggaggtccgattgggttcccatggggagggagggaggaagggggcggcggttgaatcggaggcaacctgttgatgaaatgtcactgaagctcccgatcccgcaagggctctccttcctgagaagcgtcgggtggttcgaggagaggaaggccgatgccgcggcggccaggcagcggcactccccgagattgaagctccagacggacagggaggtgtacagacccggtgattcggtcaccgcgactatagagatctgcaccccagctgggttgaaggatgacgcggcgtcggcggagaccggtgaggatgccccctcgctcttggtggatgggctctcgttcgagatcaaagggattgagaagttggatagccagtggttctctgtttcaaagcccttaccagggtctaagcaaaggagaggtgcgctcttgcttccggcttcttccgcgcccgcgcccatccctaaagttataattgcttcggggcaaacaaaaacatgccctaaatgctcgattttagctcagtatcaaacccatatcttggaagctcgagtcccattgcagatatgtgtttcacagaaaagtagcaacctactaaatgaagaagctgaccatgttgtgcctgtcccagtgaactttccactcccaattgagcaaccggatatattttggagggaaaaggacgaagattcagaatggagcaaagcaaatgataatactgatttagaagaaggatatgatagttcaaaggatgaagtttcatctgtttcctcctacaacaaagcaaatccagaaagctccctcaggagctcagtgtcgatgcactccctgtcatcacgtctttccactagtgaaccattgtattctagagaacgccccagtttcccatcttatagtccaattcctcgactatcagtatcagagatttcagatgatcatggtggaggtgtggtgtcacctcaaaggaagctaaatcatttgctgtcagatcatcatccatcaaatggacagatgttttctctagatcctgaccgctcaaatgatgatgctggaccacctctcacaccaaaatatgttgaaccagctggatcagaaggctttatgagaggaagatcgtacaacataagaatagatgaccaagtgttgcttcgcttctcaccaaagaattctgactcaacttattactttggtgatatgattggtggagcactcaccttctttcatggatctggaacacgaagatgcctagaggtatctgttaccttggaaacatcagaaacggttaatcctcgtgtaatacatccttcgagaaggagctcaccctcaataaccaaggtacacagtgagcactatgaagttgttgcggatcttcaccagacaagctttctcttttcagttccaattgatggaccaatgtcattttccacttcaaaagtttctgtgcaatggtctcttcgatttgagttcttcacaactcccgaaggaattgattcatctaggtatgaacatccacttctcgtcgagaaaagagagaagggtgactgggtgcttccaataactgtttatgcacctccattgcgtaggcaagcaattcatggaagaaatgatagatctgtcttagttgggaaccttttcaactcttgaagatgtgcatacaaggttctgctgttcttttcaaaacccctaccagttttgcttccgatgagcttcgacgagtattctctgtagttcactttgcacagctggccagttccatacctctaaaatacatgggagatccggaacacataaagcgagaacaaacttgtgttagatcaagtgtgcaaatcacagagttcgtcacctgagaacaggcagctgtgccttgatgtaacatcggcactgcttgattaccttgatgtactataggcattcctttgatagagggacaaaacttttggggtgcttgattagctgttataccccttttcattcggtatgtgtatacgtgagacatctgccttgtaattcaattcttttgtggaaaccaaacatatagcagtacgctggttgtccagaatccagattacacacgtcctgtttctgagactattcttgctgcagagtttcagtaaatcttccatggtccattttgtttgccc

SEQ ID NO: 3652 - DNA, 1493 bp, Oryza sativa
  unsure (1)..(1493): unsure at all n locations
  Clone ID: PAT_MRT4530_10607C.1
cgggctgcaggttccgcacgagggtgagtttgcccttgcccaccggccaccaccgccgatccccatccatcccgcgagcgattgcggcttcgtcgctcgtcctgccgcttccgccgcatcctggtgagcacatcctccgccaccgctgcctgctccgatccccattcatcgcgcgagcgagtacggcttcgtcgctcgtcctgccgcttccgccgcatcctggtgagcacatcctccgccaccgccgcctgctccgatccccatccatcgcgcgagcgagcgagggtcgccgtcgctcatcctgctgcttccgccgcatcgacaagatgccaaatagagccacgcattggtgttatgcctgccgacgtccaattcgtgttagtggacaagatattacatgccccaactgcaatgatggttttatacaagaaatcagtgagataggtggttcattgaacacttatggtatctttgacccgagctttgatgagcgtcgagatagaagttttggaatggtggaggctatgtctgaccttatgcgacaacggatggcagaaatgggcagaaatcgtgtgttggatttccatggtacgagaggggcaagttcccatcaaggaaggcagccaactgttagaccaatgctcatatttggcagcaatgcacctgatcgtgtaagcagcagtagtgaagaagcagatatactcctcaggcaaggccgcagaattggcgcggaccgtccaaatttcagtcgtttcctagtcggtcccagtcttgaagctctattcgaacagctgctcctgcataataaccgtcaaggaccaccaccagctccacagtctgcaattgactccatgcctgtggtaaagataaacctcaggcaccttagagatgatcctcactgtccagtttgcacagacaaatttgaggttggaacagaggcacgggagatgccatgcaagcatctgtaccatgctgaatgcatcattccctggctggttcagcacaattcttgtccagtttgccgccatccactgccgtcatcttcccaccgttcaggcagcacccgttcatcgtcaacccactctaacgaagctattagccatggggttgccagatctgatgctgatcctgttcctgttgcaagaagcgacgacagcagaaaccatgaaatgcacggttctttctcgtttctctggccatttgattcacctactcctgattccagttcctacacgcacgaaggaggtgttggtgagcctacagttcatgacgatgctggccagatgacctattctgagtggcattacgactactgaacttcctgcagcaagaccccccacatatcagtgtccactcctcttggcttcnacctcttaaagaagaagtggatatttatgggtttctgttnggtgtntnaagctttcnctaaaacnaaccttgtgttgcatgtgccttctatccctntgctggggctgtgtatactgtactcaact

SEQ ID NO: 3653 - DNA, 635 bp, Oryza sativa
  Clone ID: PAT_MRT4530_10608C.1
caatgttgtcatttcagaaatatccatttaactgttcataagtaacacttttcattctgttaattactttttgaatcatattctggttgcatgctgctctactgtctggaaatattccaatgtcaacagaatgtgtatgtgcacacatgcagcataaatagctcccagaaagtttcaaataaatttttatattggatggaatttgaactgcatactataaatattatcctatgaattgtaggagttgtgtaatatatttgttatttatattttttttaatcttctgaaatcaagggtatgaataatttttttagtggaactagtgtagtctttgtaagtatttggccttatttcattgttaaaatcaatagttttgtctatatgaattagtgtagttttttacactagtagttgcatatatacaaggtggtgtttcaaaagacgactaatatggcaaaatttatgagattcactatccgtacaaatcctggatctatatattacaatcgctttgagatgaatgcaaattaggatgggcacaattttttcatagcatggtggaatggtttctcttgtcaccatcgttttgaactcatctttattatgtgcccgctaattactccctccttcccaaa

SEQ ID NO: 3654 - DNA, 1542 bp, Oryza sativa
  Clone ID: PAT_MRT4530_10609C.1
atggcgtggttggatgatgtgctgagcttgtgcaataataatactcgtatgtgcaatgcccttgtcctctctgtggtggtcgtctccttcctccagctcttgaaacatgtgctcctgacgccgtcgcgcctcccgctcccgccgggcccgcgcaacctccccgtcgtcgggagcgcgcaccggcttgtcaacacgctggcgcaccgcgtgctgagggacctggccgatgtgcacggcccgctcatgcacctccgcgtcggccaggtgccggtggtcgtcgtcacctccaaggagctcgcccgggacattctcaagacccacgacgccaacttcgccacgcggcccaagctcgtcgccggcggcatcgtcgcctacgactggacggacatcctcttctccccctccggcgactactggcgcaagctccgcaggctgtgcatccaggagatcctcagcgccaagcgcatcctctccttcgagcacatccgggaggacgaggtgcggatgctcgccgacgagatccgcgccgtcggtccatctgtggccgtcgacctcagcgccaggctgcaccggataaccaacaccatcgtgtccagggcggcgttcggcaacaagaggagtaacgccgccgacttcctcgtggccatcaagcagagcgtcatcatggcgtcggggttctacgtgccggacctcttcccgaggttcagcgtgctcctctgctggctcaccggcatgcggcgtacgctgcacggcatccgcgacaccattgatagcatcctcgaggagatcatcagtgagaaggaagaggccaagcagcagcaggataataatctggtggacgtcctgctcagcctcaaggacaagggggactttggcttccccatcacacgcgacaccatcaaggccatcgtgctggacatatttgctggtggatccggcacatccgctaatgccatggagtgggccatgtcagagctgatgatgaaccctagggtgatgaacaaggtgcaggcagagatcagggatgcgtttcatgggaagcaaagcatcggtgaggctgatcttcgggctcgtgacctcaaataccttaagctagtgatgaaggagacgctgaggctgcaccctccagctcccctgttggtgccacgagaaagtattgatgcatgcgagatcaatggatacatgatcccagcgaaggcgagagtcatagtgaactcatgggccatctcgagagacccgaggtactgggaggatgcggaggagttcaagccagagaggtttgccgagggtggcatcgacttctatggtagcaactatgagtacacgcaattcgggtcaggacggaggatgtgcccagggtacaactatgggttggccagcatggagctcacgctagcgcaactgcttcactccttcgactggagcatgccggatggagccaccgaagttgacatgactgaggctcccggactaggtgttcgtaggaagacaccgctgcttctgtgcgccgccccctatgttgccagccatatatatgcctag

SEQ ID NO: 3655 - DNA, 252 bp, Oryza sativa
  Clone ID: PAT_MRT4530_1060C.1
ggttgttggtttttttttttgtgtgagagggtttttgctcgcttgaatggtaggctcgatttaatgaggagggggccaaaaaaaaggaacccaagggagtcgagggggcaaaagagaaagaagcccgtgggcgaaaggaaggaattgggggaaagggaaccgacgattggcacacacttggggcggaaagagcaaacaaaggtaattgatccgccgggagtgaggagaacaaatccagccaagtacccgggg

SEQ ID NO: 3656 - DNA, 989 bp, Oryza sativa
  Clone ID: PAT_MRT4530_10610C.1
cctcctcaaaaaaaaaaaaaaaaggaaaaaaacctccactacgcaaatcgtcgtcgtcttcctccgccgaattccccaccccaccggcggcgcgaccgggcggagatgtaccacccgacgagaggcggcgtccgcggcggacgggatcaattcaaatgggatgatgttaaggttgacaagcaccgagagaattacctcggtcatagcattaaggctcctgttggaagatggcagaaagggaaggacctgttctggtatacaaaagataagaaatctgactcagaagatgctctcaaggaagaaatcaggagagtgaaggaagaggaggagcagtccatgcgggaggcacttggcttagttcctaagcgtagtagtcgacctaagggcaaccgattagataagcatgagtacgcagagcttattaagcgaggatcaactgcagaagacttgggtgctggacatgctgaagcagcacaagtgcagggtctaggtttatacaagggtcctcgcagagaggaagaatcgagctcctttaaccttgatcctccagaaatggtgcccgctgagcaggctgacaaccctccaccggaaaccaaaccggaacgtgaagattccgatgatgatcgtaggagcaaaagggggcgtgaggagaggggaggggagaaagagcggaagcgagaaaggcactcggaaggaaaggagaggaggcgtgacaagcaagagaagaggagtcggcatgagtcggacgacaggtcgaagcgccaccgcaaagacaagcacaagaggaggcatgactctgattccgactagttactgcggctctttcaacctgtctcactgtatcctgccatcatatttcatgccttgctacgtttgcttgatgatgatgtagttgtaaaaacagcttgtatactcttcttgaatacattgtctgtttttaacttgcacatgagaaatatgttgaacctgtaaaaaaaaaaaaaaaaaaa

SEQ ID NO: 3657 - DNA, 314 bp, Oryza sativa
  Clone ID: PAT_MRT4530_10611C.1
gacaaaaaaataattatttttcaaattacaactagacatacaaacacaccaaatactatattaaatgacataaaaaaccacatccccacaccatcaaactccaaaaaaattgatcatctatacaggactgactatatataatcccaccagacatgcccacacattattcattaactgaataaacaaagaaaggcagcatataagaactttaatatcaccatatccacaaatttcaaatcggctagactcacatacactacatccaacaatatgtatcatgatagattagtgcaaatatttaccgacgctccacc

SEQ ID NO: 3658 - DNA, 1536 bp, Oryza sativa
  Clone ID: PAT_MRT4530_10612C.1
atgaccgtcgctcctcgttccttgttcgcatctctaggagagatttgtgactgctggaccttaggaggcgacgtcttcatggctttgagaagaatcttgcagcttgagaggttcttgtgcattgagaaaaacccagcaagcctgcaaggacaagatttggccgcactaggatccttctcgggcttggatgtcgtcgacgttctgttctccacttatatgggaggatccttcgacatggaattgtccggggttgtagccacggcgttctcgcttccggtcattgatagaccagtccaaaccggcaccatgaaccttgagcaccaaagccccctacctggcgtgccactgtcgacggtggatacccgtagaccggatataaagggtattggggcaacccttgacggcagcgacgaaaccaacctctctgagacggctccaactgagaagaacttcaactctggcggggcccacgggtcagcggctcaaaggggagaggaagggggcgccggcaagcggggcccgcatgtcagcggctcaaggcggccggtccacgggaccaagggtccggatcggcccaagccgatcggacggtgcagggagcagccaccgggctcggcctcggcttcaagccggccggcaagcatggcgaacggcggcggcatgcggtcgccggcgacggcaaccggcggcgtgggaggcggcggcgggcggcgcgaaaagcggcggcagcggccgaaggcgacggcgcacgcgcgaaggacggcggcgcacacgggagagagggaaaaaggggagcagaggggagcctcaccggcgagcacggcgaccagagcggaggatgaaaggcggcggtgacccggcgacgaggaggggtggacgggcggaggcgacacctagagagctcaccggcgagcgagggaaacggggcttcggggggcacccgcgagcgcgacgacagcggcttcatggcgcggcagcggctctagcggcggtggcgcgcggccggagacggcggtaggcggcggcgcaaggggcgagcggcgcggcgacgataggaagcacgggagggcgcggcgagtgcgaaaaacgagagagggggacgtggggagtgatttataggtgcgggagggggcggacgtggccggggaggtggccgatttggctggcgacgtgggggtggagagagagagaatgggggggattcaaattcgaatcccgccccttgcgagcgcgcgcaagggtcgggagatgcgggggagagggtggcgacgtggggaggacgcgggagcggcgcggcgtgggcgcgggaggagcgaataaggcggcggcgcggacggtttcggcggcggttgccgtcgtggggcgggcggctggaggaaggggacgacctgataggtgggccccacctgtcagcgtcccggagagagggaaaggggaatgggccggcccaaaggaaggaggccgagcgcgggagggagtgggccgatggcccaaaagaggaaaaagaaggaaaagaaaaaagaaaaagaagaaagg

SEQ ID NO: 3659 - DNA, 318 bp, Oryza sativa
  unsure (1)..(318): unsure at all n locations
  Clone ID: PAT_MRT4530_10613C.1
atcaccagctattttgttttcaaaacatttcattattcattatttggtttgatcactatctcgttgcatgcaacacagcaacggggtgatcctactagctatgagggaggccaggtaagcctagtactggccgggggggaagatgctgcactggtggggcttaacccggaacatggacggcagctgcgccgtgtactgcctcgccctggaaagccttacgcgggggatccccggctggtgatggtggtngacgtagtagccttttttttgagaccctttggagtagtacggttgtttagaggaggagtttttgggggc

SEQ ID NO: 3660 - DNA, 287 bp, Oryza sativa
  unsure (1)..(287): unsure at all n locations
  Clone ID: PAT_MRT4530_10614C.1
ccgagcgtgagagaggtaatcaccatcgatattgccctgnggaagttcgagaccaccaagtactactgacggtcatcgatgcccntgggcaccgggacttcataaaaacatgatcacnggtaccttccaagctgactgggccgggcttatcattgacttcacantggggggtttgaggttgtntttcaaagatgggcanaaccgnaacaccctnttttggtttaattttgggggaaaaaaaaaactgttctgcacaaaaagntgccccaatccaaaaattcaaggcc

SEQ ID NO: 3661 - DNA, 225 bp, Oryza sativa
  Clone ID: PAT_MRT4530_10615C.1
atgtccgacaggatcacctccacctccacctccatgacgcctgcagagctccccgctccgccgcctttcaccatcaccggtgccggcgccggcggcagcagggtaaaagcagaagctctgcctatttcatataaggagaagagagagggaccaaagtttttacaaacaaggttaaaaaagatcctaagaggaccctcctctgagagtgacaggaacaacttttga

SEQ ID NO: 3662 - DNA, 114 bp, Oryza sativa
  Clone ID: PAT_MRT4530_10616C.1
gcaggaacactgaatacaagctgtgaattgactaacacaagacaggagacaaccccggctccttggacaaaagttgcaacagaaaaaataacgtgatcgagtccacaaggctaa

SEQ ID NO: 3663 - DNA, 193 bp, Oryza sativa
  Clone ID: PAT_MRT4530_10617C.1
ttggggttttttaataaattttgttttttttttttaaaaaaaattactagttgggctggtttacaaatggaacaaaaaattgaataggcactgtttaaattacactgacacaccctttgtaagtatgtttgaaatcactcgtttttcccataaaatggaaccgtataaactaacatagatttatacactaaaa

SEQ ID NO: 3664 - DNA, 239 bp, Oryza sativa
  Clone ID: PAT_MRT4530_10618C.1
ccggccgggacaaaaccccccacctcctcctcctcctcctactccactttcatatcttcctcatactgctctctctctctcacgtcgacgaccgccaccgttcgaagtaggagaggccactgcgccccaccggacgttaccatggcagagacaaaatgaaacagtacggcatccacgataccttcaagaagatagaaccctccctctccgcccgccaccaccacctccacaaccaaaac

SEQ ID NO: 3665 - DNA, 264 bp, Oryza sativa
  unsure (1)..(264): unsure at all n locations
  Clone ID: PAT_MRT4530_10619C.1
actgtggactccgaaagcctcctggcgacgatggngtcgtcgtcacggccggaggaaggtcggcgcggcggcgccgcngtggagcaggctggaggggcgggtggtgctggtgacgggcgcctcctcggggctcggccgcgagttctgcctcgacctggcgcgcgccggctgcctggtcgtcgccgccggcgccgcgcngaccgcctccgctcgctctgcgacgagatcaacgcctccgccccccgggcttncgcggcggcggcc

SEQ ID NO: 3666 - DNA, 759 bp, Oryza sativa
  unsure (1)..(759): unsure at all n locations
  Clone ID: PAT_MRT4530_1061C.1
annggagctccaccgcggtgcggccgctctagaactagtggatcccccgggctgcaggaattcggcacgagctaatgtnctnaanaanacctgtatgtggtggtaccaggaagactgggnctnnagatntggtggngaaggttttntattgtgggtatntttnngccttnnatccaccaggccaagaaccanattngtgtttncaagtaccccttcgtccctggncataaggtngtcgncangntnngnngaggtcgngccggnggtnnccangtacagngccgtnaancgtcgncgtcgtcggcgtnatcntcncctganngcgnaangtnncnatccgntgcannnnccnnttnttnggtnngtnnntncaccannttggnnttttntnnncnnnnatcnncngntttnnnnncntnngnnntgnncntcccttngnttnttttnnntntntntatnntnncnttcttnatttnntnttttntgntnatttccnnntnngngannacncctcaattntnantngannnttgnnnngntncnannnatnnatctnncctngnttttttngnntantattgnnnntttcttnntgntnttattnggnnntgnnnntnanacnnnnnnnntanttnntttntntttnggttnttttcnnntnttntcntcnttatnctncntncnnnnnanntttttnntngannntttannnagngnttngnatnntggacgatnngnnnncttnttnnnttnantaag

SEQ ID NO: 3667 - DNA, 426 bp, Oryza sativa
  Clone ID: PAT_MRT4530_10620C.1
atggtctggaagcagaccggccaacagaagggaggagcatcaaggaaggtgaggaggtttgcctcgccggaagaggaactgaaagatgaagccaggttaacagagacatcggagtcttccatgttccgacgagatcgaggcggaggcatctccacccagaatcgttgggcttcgcgggagcacctcttgcaactgcgacgatcgcttccaactttgccaccaacacagagaagagttggggcgagcagagcaacagaccatctagacaacttgcagggaggtggcaacagagccaagaatgtcgcgaacccccgtgattgtgcccaacgtgcccttgtagttgtcgtcattacctcgccttgccatgctaccaatgtcgccgacgtcaagttcggcggaggcgaggtagggcacggagatggctaa

SEQ ID NO: 3668 - DNA, 174 bp, Oryza sativa
  Clone ID: PAT_MRT4530_10621C.1
atggcggtggccggcgagcagtggccggcggcggttgaggtgaaggcactacttcaggcctcgctgctggacgctaggcagcaccataaccagcaaggagaggttaaggtggagtccaccggtgatggagattgtttgctatttttcttttgctcgtcatctgtattgacatga

SEQ ID NO: 3669 - DNA, 149 bp, Oryza sativa
  Clone ID: PAT_MRT4530_10622C.1
atctataatttgattaaagcgacaacattgtgcatttcagactagcctatcgcactagtcttaacgacaataataaggcgatagttaacagatgaaactaccaaagatcttatgcactaacatatactcatcatttattgagaatacat

SEQ ID NO: 3670 - DNA, 406 bp, Oryza sativa
  Clone ID: PAT_MRT4530_10623C.1
tcacatgcactcatacataatcttgcatccataataccccccccccttctttttttgtccttttaacccctttgtttaaaccccccccatcatttcttatatacaaaatacctaaataccttccaacacaaatccactatatccataattccacaccttaaatttcacaaaaacaaattctccacacaaccaaataacctactataacaaaactaaaaccaaaactccaaactccaaactataccctaaaacactcacaaacaacaatccaattcttttttttcacaaacccaccattcttaatctacccttcactacaatcacaatacctacaacaaccaacattccacaaccaaacaaacccactacctctaacacatctatatttccactcaaactccaaacc

SEQ ID NO: 3671 - DNA, 291 bp, Oryza sativa
  Clone ID: PAT_MRT4530_10624C.1
atgccgttccccatgaccccgtttgctagggtccggctaggagagccgtggggaacagcaatcgtggcgcggaggacgggacggcgcgcagcggcggcaccggcgtgtgggcgcgaagaaggagtgaagagcggcagttccccctgcgcatggcaagtgtcctggtccggccgtagcccggcggctcgggagtgggggagcgacttcggcgtggtggcggtggaggtgctccggcgttcattgaggcagttcttggaggagaaggtgcaacgatcggtggagaaggagtag

SEQ ID NO: 3672 - DNA, 618 bp, Oryza sativa
  Clone ID: PAT_MRT4530_10625C.1
atgcgcaggggttggggttggctcgacgcggtggaggtggcgctagaacaggatgggaggtggtaccggcgcggttgggcgtcggcggcgcgcagcgacgcgaccaccaccttggctggggctcacgaagaaggtgggagcttgctcagcccgatgttggggcagctgcagctgcgagggagctgcttcggcccggcgggaagtggtaccacgccggttgcgtcttcttgtggtgcgggatgtgccgcgctgagctgccggccagcgagggtgccacgacagctaggcatgacgcatcgtaagagctccccagcgacaccggcatcttgtctggccaggtcgccggccgccgtagggccaccacgccgcctccatagccacacatcccgcaaacgccgcgctacctccgcccagccgctggcatcgccgcgccgcactatcctagccccgccgctacgtcgcgccatcctcggtccgtcacgcctagtgccgacgcccggccgcgcccccgtcgcaccggcgctgccgccgccaggtcgcgccccgccgcacggattcctgagccatggcattgctccttgcctccttccagcttctccttcagttccaggccgatag

SEQ ID NO: 3673 - DNA, 418 bp, Oryza sativa
  Clone ID: PAT_MRT4530_10626C.1
aataataaactcatctgaattttttggccacaccagcctgcctgacataacaaaacaacactgacacgctacatagtgcggacgtgacagttttatcttgtcacactaaccaaggtgagtattatgatcattcatttaccttggctcgtatctactgagcataaccatcatcactagctcatttttggatgtggattgaactttgactacgtatttcgcttaccaaaacaccatgcatacgtactcggggtgtaacctaccccctccatcccaaaaagaggctaatcctagctaccaacctggatacatgcgtgttcaaattcgtagctagagtttgtctttttaggggacagagaagtagctcatttcagaattcctgcatcatgtatgcacttacactcattctgttgtcaaacaa

SEQ ID NO: 3674 - DNA, 483 bp, Oryza sativa
  Clone ID: PAT_MRT4530_10627C.1
atggcgcgacgtagcggcggggctaggatagtgcggcgcggcgatgccagcggctgggcggaggtagcgcggcgtttgcgggatgtgtggctatggaggcggcgtggtggccctacggcggccggcgacctggccagacaagatgccggtgtcgctggggagctcttacgatgcgtcatgcctagctgtcgtggcaccctcgctggccggcagctcagcgcggcacatcccgcaccacaagaagacgcaaccggcgtggtaccacttcccgccgggccgaagcagctccctcgcagctgcagctgccccaacatcgggctgagcaagctcccaccttcttccgccacctccaccgcgtcgagccaaccccaacccctgcgcatgaccgcgcagcgcctccccgtccgaggcgccacactggcccacgcctcgctgtgcagccgtcctcggttgaagaaagagcagggagaaagagagaaagaa

SEQ ID NO: 3675 - DNA, 402 bp, Oryza sativa
  Clone ID: PAT_MRT4530_10628C.1
atggcctctttgaccaagtcttcatcccacatgcagcggcaggcggtgggagaggagcggcgtgcggcagccggtgggcgacaggagaggagcggcacgcaacgcatctccatcctagcaccatcctctccgaccgaggagaaagagccggaggaggagggcctggcgggcaaccccaacgccgaggtggaggaggcgacgagcccttccgccgagtcatccaccgcttcccggaagaatccggcgaggggggggggagggggggtaaccgccgaggccgccgccgacatctccctgctcgaggccaccctcagcgagagcagctccccgtcgaggccgccgtcaagaattccctgcccgcggccgacgaggagaaggaggatagtagctcccaacccttag

SEQ ID NO: 3676 - DNA, 306 bp, Oryza sativa
  Clone ID: PAT_MRT4530_10629C.1
atggccatctcctcctcgtcgtcgtcgtcggtgtccatcatgcaatacctgaggaactcttgttcaaggtcgtggaagcaaatgtgtggatggacagcaccaccagcaacagtggcactaccgggagtggaaacctctgaggctgctgcctttgagagcagcacaaagaaagataccgaggaggtgccccacgtgtcggcggctgtgagcgtcctcgcgatgaaggccgaggaggaggcacgcgctggtcgttgcgagagtcctcacagcggaggccgaggccgagctgcacgcagacggctgtga

SEQ ID NO: 3677 - DNA, 1776 bp, Oryza sativa
  Clone ID: PAT_MRT4530_1062C.1
atggcggaagagagagaaagctttgaaagtcagtgggcgccctcggatgtaacggaggaaaacctgaaagagatggtggcgcacggcgttcttccggcaaaagaaatcatcgggtggcgtccagcgtacggtgaaatgtttccgactctcgacacacacgaggtggtggtattctcccatttcttttattgcgggttttctcttccgacctcaaatttcttccggggaattttggatttctatgggattagcttgcatcacctaaatcccaattccatagtccacatcgccaacttcatccatgcttgcgaagcttttctggggattaggccgcatttcgctctattccgccgcatcttcttcctcaaacctcagccaaacaaaagcaaaccatgcgtagttgggggagccggatttcaactgaggggaaccttgagccagaaatacttctccatgccttttaaaacctcgaacaagggttggcatgcaaattggttctatgtgcaaaatcccgagccagcacttcttgagtactcctgtcttcctccaacatatcaagaaacctggaactcgcttccaatgagagatgaagccgctcaagcgattactctgatggatcgcatgctgaaactcaaagagcaaggtctgcaaggggaacagatcactcggcacttcatcaagagccgactggcacctatcaaggagagatcccgcactgcctttgagtttgatggcaaaaatgaccccaatcgagaagatccagaatcccttgagttcaggattatgaaagagaggatgtacaaaagcttctcaaatgctatcatggttagctactcacaccttctacaagtagtgccatacaacgccttcaatcctcctccactggaatttgccttgatgaagtctgatcctccgattgctcaacgccgctcaccttgccgacaggctggtcaagctagtggagggccaaaaatccggtccgatgctcaaccaaacacttcgaagtcgactacccagtcagactcttgtaagaggaagttggttttgagtgacgacgaaggtgacgacgccggaaaaactggcagcaaaggggtgactgggaaacagccgagacaagccaacccgaaaaagaaaacacccagttgtcccaaaaaatcaggaagtcatccagtttgcaggaaaccatctgacatcgatccttctggaaaaaactctgagccgactggcatggagactggtactatgacaaaaactgggacggctgacaaagatcgtccgagtgatgatcaactagcaactgacaatgtagaggccagcagcgagatcccgactggaaatcagtcggccgaagctaaggccaacgctgaccaggagcccccgactggaaaccagtcgggcaccaaacaaaatgaagatatcccagaagtagaggctcaagcaaacagccctcaaaaggatactaactccgacctgaagtccagttcgcctgataaggtgcaagggcctactcgtcctcggccagagatcataacagcggaaaacaatacagcgcaagctgccaagatatccaagttagaaagacgaatcaaagctctggaaaaagacaagggtgaattgaccaaacagagggactcggctctgaaagacgtcgaagatcgcaaaatgaaatctcaggctcaattcgacgtcttattcaacaagatcaagaggcttgaaggagctagggatgaagtcgccaatgccgctacaccactcatccatgccatgtttttttaa

SEQ ID NO: 3678 - DNA, 606 bp, Oryza sativa
  Clone ID: PAT_MRT4530_10630C.1
atggcgtccaaggaccaaaccgcatcctcgtcggagacgacgacggcggtggcggatgatacctccagccaacaagacgcaccgccccacccgctgcaggtgacttcgccggattcttcgttgccgtcgccgtcgccgcggcaacgccggtgcgtggcggcgtacatggacctgacgcgggaggagtgcggccgcctcttcccgtcggggcggctccgctcgcagccgctccgcctcgccgggcggccgttctacctcacggcgcgctgcaacatggaccagcgggacaccttccgctgcttcggcctcttcctcgccatggaggtcgacgacgaggaggaggaagaggagggctcgccgtcgccggcggcgagcgtcaccgtggaatacgacttcgccgcgaggacgaggcagcagtcaggggatgagttcgtcagcatgtacaaggggcactacaccttcgccgccgggaagtcgtgtggataccggaatctgcttgggatgccatgggcgtcgttcatgggtgatggtggtggtgacagcgtgttcttcatcgatggggtgctgcacttgagggctgaattatgtgtcaaagaagatgcttaa

SEQ ID NO: 3679 - DNA, 1236 bp, Oryza sativa
  Clone ID: PAT_MRT4530_10631C.1
atggcgccggggtactcttcaggtggaagtagcaagaggacaaggagcgactccaccagggatgcactgaacaggcttgcggacctgagggtccagtccaacgaaagttgggcaaggagggaggagcagaagcaagcgaagagcgctagagcatgcatggagatgctcaaggctgatgggattactaggcaggatcccatataccacacagccctgaggatgtttcgtgatgggtacctgcgcgatttcttcattaaggactgcatcacaccggaggagcgcctcaacttcatccaccagcatggtggactaccctaccctccagcattcgctccagaccctctgctgtttgctccactgccaccaccgacctgctcaggccatatggacgactggtacaagaggtttggtcctcaagatgatgatggtggcgatggtgccaatggtggttctgatggaaacatgagcacttcgtcagaaaggtcatatggttctgacgatggctactacagtgatgaagaggactccattctggacatgttggttgcggctttgaaggcaaggctaagtgtatgcctaatggaagcacttggaatatttctgtacatcatggcggggggcaattcaaatagggcgactaataataggatggtgcgatctgggtctactatctctaagtactttcatagagtacttaatgctatttatgcaatggctgctgacaaaaataagccggtagatccaaactttgagagagttcattatcgtgttgttaatgaggaagaatttctgccatttgctggtgcggctggtgcagtggatggaacacacattccttgcattgtggtagtggatgattccattcaacataggaactgtcaccacattacttctaggaatgttctttttgttgttggatgggacgaccgtgtcatttttgcagatgctggatggccagggtctgtgcatgaccaaagagtactgacagaagcagtacggagctatccctttgctttcccaaggctaccatgggggaaatattttcttgtggactcaggatatgcaagccggtatggattcctaccatcatacccacattttttgtaccacttggatgaatttgggggtaatacagaagcagccttgccgcatggaagggaagagactttcaactacatgcacaattcactgtgtaacacagtggaaagggcatttggagtcatcaaaagccaatag

SEQ ID NO: 3680 - DNA, 364 bp, Oryza sativa
  Clone ID: PAT_MRT4530_10632C.1
gaacccatacaaatatattaataccgtatgtacaaaatatctaaacggcagacagttctgtttgcaaggcaagagtaatttgccgggggcgctatgtgataactcgaccacaggaggaccaatatacagttgaacccacacgcaccttcgcgggaaaaacaaaacgtttttaacaaatatgaaacaaattcttgaggcacaaaagtttaatgaaaaattttagaaaatattataccgggaaaattgaaaggacggctaacaattttcccatttccctagtcaagggaaaactggctactacatatccaactggccagcttccatatgtttatggcaaacccccttgttaaagaattattcaagg

SEQ ID NO: 3681 - DNA, 196 bp, Oryza sativa
  Clone ID: PAT_MRT4530_10633C.1
ccacgcgtccgaaaaaaaaaaaaaaaaaaaaaaaaaaaaaaaaaaaaagaaaaaaaaaaaaaaaaaaaaagaaaataggtacacgtgcttgaaggattaaaggcgcttctatcgtgcgtcctaaatcttggttcttgttcgtgggattccatgttcttgtcttggtataaccttggtctgactggatttagggggg

SEQ ID NO: 3682 - DNA, 254 bp, Oryza sativa
  Clone ID: PAT_MRT4530_10634C.1
atcaagcggatctacaagcaaaatgcgagaaactagcacacgttatacaacacaccaccggttggctctgcggcgacataagggcagcagcaatcaaagaccgggggcggctgggcagaaccaggcacgaggccggcaacacaaagggggcaaacggacaccaccatcaattgggggcttcctaaaaacctaggggcaatcaaaacaggcaggtaccccaagaccgagaaggggaaacaataaatggggaagaa

SEQ ID NO: 3683 - DNA, 2458 bp, Oryza sativa
  Clone ID: PAT_MRT4530_10635C.1
atcggtaatggcctcacggatccagcaatccagtacaaagcttacaccgagtatgcacggccatggagccgtagtacgtattcgctggcctcgcgcaggcgccggaggaccccatcctcggggtgacggctagcttttcctcttcgattcccgatcccccacccagcgactcgccggaaccctagccctagatcccgcgcggcttgccgccgtgctagccatggcgtccctcaaggagctcctcccgacgcccaaggcggcggcgtcgacgttctacgaccacagcagcgacccgtggttcaaggagcggtatggcggggagtcggcgcaatccgacgcggcggcggcggcggcgaagccttcgggccccgccaagcccgtgccgccgtacgggaagcgtggcgggttcgtgccgcggcggccggaggacttcggggacggcggcgccttcccggagatccacgtcgcgcagtacccgctcggcatgggccggcgcgacgagaagggcggctcgaagatcctcgcgctcaccgtcgacgccaagggcagcgtcgccttcgacgccgtcgtgaagcagggtgagaacgcctctaagatcgtttactcaaagcacagcgacctcgtgcccaagattgccacggctgattccgaggcaaccgcggacgacgaggagtaccagaaacagatcgaagaaaccactgaacgaactaaagctgccttggagaaggttgtcaatgttcggctctccgccgcacagcccaagaatgtgccgacgcatgattcagagtcaaagtttatcaagtataagccatcgcagcaatcggcagccttcaattcaggtgccaaggagaggattattaggatgtcagagatggctcaggatcctcttgagccaccgaaattcaagcataagcgagtgccccgcgcttctggatcaccgcctgtcccagtgatgcactcgccaccacggccagtgacagtgaaggaccagcaagattggaagattccaccatgcatttcaaattggaaaaatccaaagggttacaccataccactcgacaagaggttggcagctgatggaagggggctgcaggaggttcaaattaatgataactttgcaaagctctctgaagcactgtatgtggcggagcagaaggccagggaggcagtacagatgcgatccaaggtgcagagggagctgcagctgaaggagaaggagaggaaggagcaagagctaagggcacttgcacagaaggcgcgcatggagaggactggtgccccacctgcacctacaggggttcctgctggtggtggtagaggtgctgttgatgacagggaggaagatatggatttggagcagcctcgtgagcaacgaagggagagtagagaagaaagggaagcaaggattgagcgtgacaggattcgtgaggagaggagacgtgagagggagagagagaggaggctggaggccagggatgctgcaatgggcaagaagagtaagctcactagagacagggatcgtgatgtcagtgagaagattgccctgggcatggcaagcactggcggtgctaaaggtggggaagtcatgtatgaccagaggttgttcaaccaggataaaggaatggactctgggtttgctacagatgatcagtataacatctactccaagggtctcttcacagcgcagccaacgctatccacactttacaggcctaagaaggacggtgattctgatgtgtatggcgatgcagatgaacaactggagaaggttatgaagacagataggttcaaaccagacaaaggattttctggtgcttcagagaggtctggaaagagagacagacctgtggagtttgataaacaggaggagaatgatcccttcggtcttgatcagttcttgactgaagtgaagaaggggaagaaagctgttgagaagattggaagcggaggagccatgagggcaagtggtggatcctcaatgagagatgattacgagggtggaggatctgggaggtcccgcattaactttgaaagaggtcgttgaggtattagatctgcatgttttgttcagaagtttctccatgcattccaaatgttatctggagggtattctgttgagaatatcaacttcttgatgagaggacttgatgtttgagttgtcttaatgcaacgtctacttccaaggggcatcttaaggagtgtacctgtttagatcctgtgattatgcttgttgtttatctatttgtggatggatctgtaagcttaacttatcatcattccatatcccttatattttgtggtgctttatgaagtctcgatgtgtctggctgtccgtgccggtcggaggaccgggacggcggttcccggagaccacgtcgcgcccgctgccagaagggcgtcgtagtgtacaacaaggattccagccccgtgaaggtcaatattggcgttcgcgcctacc

SEQ ID NO: 3684 - DNA, 243 bp, Oryza sativa
  Clone ID: PAT_MRT4530_10636C.1
ggtatgtagtctgaagactgattcttggagaacagatcagctttttggctgagggagttgaccaagacacaacattttctgtaccgctcaagatttaagaagtcgtaaaaggtctgcggaaatctcagtgataaattaggcattgacatccactatatggatcatgatcactgagacagcagactgagactgatcatcgatcactgagagcagcagactgagatcagtcctagtcactggcag

SEQ ID NO: 3685 - DNA, 852 bp, Oryza sativa
  Clone ID: PAT_MRT4530_10637C.1
atggccaccgccaccgccacggcgaccgccgccgccgccgccgcgtcctcctcgcgcctccccttccgccgcgccgcctcctcctcctcctcctcgcagctccgcctccccgcggtgcctcctccccaccgcgcctccttcgccgtcgtcgccctccacaagcgcaaccccaagcggctcaagtacgcctcccagcgccagttcacgagaggggatgccgggatgctgcgggtgcaggtggagccatccggcgaggacgcgtggaagctggagcccgtcgtcgaactcatcaaccgcggcgccgtcggcatcatccctaccgacaccgtctactccatcgtctgtgatctcagtaacaatgactctgtcgagcgccttcgcaggatcaaaggcattggagattcaaaggcaagatatgcaaagaccatcttgtgccgctcgctacgagacattgatacctacacaaccggatttcctcgaggcactaaccaagggcaagctaacatatttcgtgctgtcaagcgtgtaatacctgggccttacacctttattttacctgcaaccaaggaattgcccaaacaatgcataaggcatggatcatctactaggtacgcgaaaaggaggcaggttggtgtccgacttccagatgaccccatatgtgaagcaatattgcaaaatcttgatgagcctttgatctgcacaagtgtcaaatctctgtcagaggatgaatggatacttgacccggttatcattgctgatatatatgagcaacagggccctaagctagattggatggtagcggaagatgaggaacaagagtcgcgaccaacatttgcgtataaagcagcttga

SEQ ID NO: 3686 - DNA, 350 bp, Oryza sativa
  Clone ID: PAT_MRT4530_10638C.1
cggacgcgtgggtgtaatctggggatgcacggactgtgcaaaggcgaaggccggttgtgcttacaccatgaacactgctagtgcgggcactgtcatgagcacaatccgtcgtatgaggaaccaaactgaagcctgattgccctaccttagtgccgtaaggagtcctgtgattcatgctcgactcaagacctatattggctgactgagcaccatcacatctgttagcatttttgttctctactttaagatctcctaagcatgatgctaaaacctgtactttgaagccattgtgaactcaaaatctgctacctgcgatcccccctatgttactggctgatgaaagaacgtcc

SEQ ID NO: 3687 - DNA, 189 bp, Oryza sativa
  Clone ID: PAT_MRT4530_10639C.1
atgcagtgcaaactgcagctaatcgccttctatcaggagagcatagacaatagagaactgcgtgtagcactgcatattggattcggaggcgtcggtaaaaacgagatgatgtgtttgagaaaagaaaaacatggaaagtctgataaccgtgtgattacctttgcatttgtcaaccttgctgaggactag

SEQ ID NO: 3688 - DNA, 402 bp, Oryza sativa
  Clone ID: PAT_MRT4530_1063C.1
atgaactcctgcatttttccctttcccccaaaatccaagaagacccaacacaaaatcaaagaaaaatatcaccccgacgccacggttctcgccatccttcttgccgatgtggtagtcccgatcttggtgccgtcggatctggtccccaccacccaccactcggcggcggtggctagcagtggccacggcggtggcaccggcatcagagacgatgatctggcgccatgcggctcggaggcatcgaggaggatggaggggcacggccgccgttgtcgcctccacccggccaccgcccttgccggtatcgtcgccgaggtgcaccacccccccttcggccagatctggtggaggggagggcgcggcccccttcgccgggccaccgctaccaccgctactgtatag

SEQ ID NO: 3689 - DNA, 1119 bp, Oryza sativa
  unsure (1)..(1119): unsure at all n locations
  Clone ID: PAT_MRT4530_10640C.1
aatctggtgaactatgtcgattcctggttacattccctggcatatttacaacatgtagtatatatactggtctagctgagagtagcagattcaggngtcaaaagaccaggatctggtgaagtaattacaagtttacaacctcctatgataggncagccgaagagtgnctcaagctgctttatacgcaaatgttggtcgcgactcttgttcctcatcttccgctaccatccaatctagcttagggccctttccctgacgaatgatggtagggtagcttcccgtcatatcaaccacagtagacgggtcagcaattctagtacctccatcgacaatgaaatcaaggccctgttgctcatatatatcagcaatgataaccgggtcaagtatccattcatcctctgacagagatttgacacttgtgcagatcaaaggctcatcaagattttgcaatattgcttcacatatggggtcatctggaagtcggacaccaacctgcctccttttcgcgtacctagtagatgatccatgccttatgcattgtttgggcaattccttggttgcaggtaaaataaaggtgtaaggcccaggtattacacgcttgacagcacgaaatatgttagcttgcccttggttagtgcctcgaggaaatccggttgtgtaggtatcaatgtctcgtagcgagcggcacaagatggtctttgcatatcttgcctttgaatctccaatgcctttgatcctgcgaaggcgctcgacagagtcattgttactgagatcacagacgatggagtagacggtgtcggtagggatgatgccgacggcgccgcggttgatgagttcgacgacgggctccagcttccacgcgtcctcgccggatggctccacctgcacccgcagcatcccggcatcccctctcgtgaactggcgctgggaggcgtacttgagccgcttggggttgcgcttgtggagggcgacgacggcgaaggaggcgcggtggggaggaggcaccgcggggaggcggagctgcgaggaggaggaggaggaggcggcgcggcggaaggggaggcgcgaggaggacgcggcggcggcggcggcggtcgccgtggcggtggcggtggccat

SEQ ID NO: 3690 - DNA, 774 bp, Oryza sativa
  Clone ID: PAT_MRT4530_10641C.1
atggcagcggaggccgactccgcgcgagaggcgcgggcggtggagatggaggccggcttggcacgagaggcatggccgatggagggaggccggattggcgcgagaggcgcgtccagtggaggaggccggcttggcgcgggaggtggtgagcggcaggtgaaaacccagtccggcctctgccagaccgacaacgatggttcattccccctcctgagggcgttgtcgttctgtctcacccctcaaagggtggttgccgggccgcaggtcacacctggagcttcttcttccaccccaactcgagcaaataaatattcgggcaacggctactccaccgtgtgcctcaagctccacgccgccgaccccggcaccgccaccgccgccggcggcggcatccgaaccaacgtccggttccgcatggtcagtctgcagccgtgcgtgcctccgacgaacgaggtgaggagctacgcgacgtcgttccacggcaccgggaaggcggagtactgctgcttcacgttcatccgccacgacgtcctggcgagccagtggtccagcaccgatgatgagttcgccatccactgcgacgtcgccgtcgtcgaggaggccgcggcggcggcgacgatgtccacggagctcgggccggatgacctgcatggcctgatgatgatctgcaaatgcagcgtcgacaatgacgatgagccatgcaagagcggcacccggcagaacctcaaggaggcgtttcgcaagcagttcttgggttgttttggaccaaagtag

SEQ ID NO: 3691 - DNA, 159 bp, Oryza sativa
  Clone ID: PAT_MRT4530_10642C.1
atggcgcagctgctgcagttgcgagttcatgcatcgttggagccggtgactgtgcagctgtggcagaggcgactgccgggagggatcaccgcctggaggaagatattgctggacgtcggcggtggagacgacgacgcttgtgatggccctgcgatgtag

SEQ ID NO: 3692 - DNA, 672 bp, Oryza sativa
  Clone ID: PAT_MRT4530_10643C.1
atgtcatcgtcgccgacgaaggacgtcgtcaccgcgtcgacggccacctctacgtcggtggccgccaccggttgcaaccttctcaagatcaaggtccgcaacgcgatcaagaaatctcaccaaggcagcaaatacgacatcgagtcgtccaagttccaggtcgccggtcacacctggagcttcttcttccacctcaacgcgagcaaatattcgggcaacggctactccaccgtgtgcctcaagctccacaccgccgactccggcaccgccgccgccgctggcggcatccgaaccaacgtccggttccgtatggtcaatctgcagccgtgcgtgcctccgacgaacgaggtgaggagctacgcgacgtcgttccacggcaccgggaaggcggagtaccgctgcttcacgttcatccgccacgacgtcctagcggggcagtggttcagcaccgacgacgagttcgccatccactgcgacgtcgccgtcgtcgaggaggccgcggcggcggcgacgatgtcgatggagctcgggccggatgacctggatggcctgatgatgatctgcaaatgcagcgtcgacaatgacgatgagccatgcaagagcggtggcacccggcagagccacaaggaggcgtttcgcaagtactttttgggttgttttggaacaaagtag

SEQ ID NO: 3693 - DNA, 507 bp, Oryza sativa
  Clone ID: PAT_MRT4530_10644C.1
atggcttcccggcaagtgctgctcttggccatcgtctccgccgtcgcgttgctcccggcgatggtctctgccacggattacaccgtcggcgatggccatggctggactctcgagtacccttccaccaactgggccgacggcaaatcattccaaatcggcgacaaactagtgttcacgtatactaagggcaagcacacggtgacggaggtggacggcgcagcgttccacgcgtgcaaccggcagggcaacacgttgatgacgtggaactccggcaacgacacggtggcgctcgacaaggccggcaagaggtggttcttctgcaacgtcgacaaccactgcgagctgggcatgaagctcgtcgtcgacgtcgccgaccccaacgcgccggcgccggcgtcgccgccgccgccgccgtcttcgtcgtcgtccgccgggcggctcaactacagggcccgcggtggcgcggtcgccggcgccgtggctgcggcggcgctcgtgtggttctag

SEQ ID NO: 3694 - DNA, 1545 bp, Oryza sativa
  Clone ID: PAT_MRT4530_10645C.1
atgaaggatatactgctgcttagctattatgaccttccatatcatctgaagacttgcttgctgtatcttagtatatttccagaggattactggattagtaaagtagatctgttattgagatggatagctgaaggattcattcctgaagtgaaggatcaggcattgtatcaagttgcagagaattactttaatgagcttataaacagaagcatgattcagccagtcaacatcgactatgatggtagcgcaaatgcatgtcgaatgcatgatgtaatgcttgagctgatcgtatccctgtctgaagatgagaacttcaatacattagtagatgggaaggtgtataaatgttcttctagcaatattcgcagactctccctccaatccagctgtgtggaaaatgatgtgatgcaggatttaatgaacaagtgctcacatattcgctctcttagcttctttcgggaaaataaagaaacacctcatctcccaaagttccgttatctgagagtattgatatttgaggattgtgatagcttaggaaaccaacatattaaatatctcagattcttttgccaattaaagtttttgagaatcaattctgaaggtatcactgagcttccggataaaattggcgacctgaaaaatttacaaacactgaacatacatggaagtaaaattggaaaacttccagcagccataggccatttacaaaatttgttgtatctacatgttaattctgatgttgaattacctgatgaggttggagatctacaagctttgcaggtgctgtcagatgctttctcttataactctattaaattcgtggaagagcttaggcggcttactaagctaaggtcgcttcacattggactacattccagtttaaaactttgttatcatgacatgagaacgtatgaggaagctttgaaatcctctctaactgtgttaggtaaacacagtcttcgatcactagtaatttcacgtgctgattgcctgggtgattacctgatggatctattatgtgacactgtccctgtctccaaaagcattaaacagaaagatctttgggtgcttgggggcttgccctcactgctgaagcttgagctacatttactctatggccctgatgaaaggctgattatcagcagtcaactattccagtgcttgaagaagttcaaattgaaatatgaattgggtggtggactaagcatggtgtgtgaaaaggaagcaatgccaaagctccaaatgctacaccttcggtttaaagcaatggaaacgaagtccaatacgggtttcgagttgaggctcgagcacctttcaagcctgcggcacctcagtgtcacagttgattgtgatgatgccactagaaggagagttgaggctgccgaagccaccattcggaacacagtgagaatccaccctcgatgccccactctagaaatcaaaaggaagtgggaaagcgatatggtaaaggatgaggatgaggatgagatggagagacgggagtgcactatagaagaggaggaggttcagcatcaggatccataa

SEQ ID NO: 3695 - DNA, 402 bp, Oryza sativa
  Clone ID: PAT_MRT4530_10646C.1
atggagaggagggctggcgggggcttacttcgccggcggtcggggccgaaggtggcggagatcgaggtgcagcggcgagctattccaccggtgcaagtgacgggtggcgctgccgttggcgagggcgctggagcagttgtgcctaagcgttcccgtcgaggggaaaccttcctggcaggggtggccattgttttgcgctgggtgtgctccagtatgcgatttgtcggggcaaccatcttcaccatcttagcttggatggttcgcccgctggtcttgctctggaaatggtggcgagatctgatcgatgatggccactctgattacttatgcgaggcagtttgtctcttcattgtgttggcaccgattgtttttgtttctactcttaaagcgctactggagtag

SEQ ID NO: 3696 - DNA, 266 bp, Oryza sativa
  unsure (1)..(266): unsure at all n locations
  Clone ID: PAT_MRT4530_10647C.1
ggaaagaacaaacaaacgttcgtaaatgncatgggagatagaacatgtcgactgtcgtagcagtttgcagatttggtttggaaatgttgcatgcaatgcagtagttgaatcgtcgtacgtgttgtcgtcatttttntgaaaaaaaaaggcattacctttttaatgtnccgcgaaggtttgatgatgatcagcgaaacatttgttgtagtaaaaaaaaaaataaaaaaaaaaaaaaaaaaaaaaaaaaaaaaaaaaaaaaaaaaaaa

SEQ ID NO: 3697 - DNA, 413 bp, Oryza sativa
  unsure (1)..(413): unsure at all n locations
  Clone ID: PAT_MRT4530_10648C.1
ttgttttttttttttttttgttttttttttttcatatttttttctttttttattttcttttttttctttttttgtttctgcaacctataagattatgcatcaatctaagaactgtgctataaactgaccacgttatataaaaactaaataaattgaaaattgcatctttcatgtacatataaataattttgcatagcttaacaattcagatatactgcagatttctcttgcttcgcggaagaacacggagatatcagtgtaatatctggagtccagatgcccaccaattcctgacaaagcataaatgtaaagataaatctatttgtttggattaattaaattcaagatgtggcaaaatcgacttaagagttaatntnacaaatcattaacactggtaatatgcaatttgagat

SEQ ID NO: 3698 - DNA, 1143 bp, Oryza sativa
  Clone ID: PAT_MRT4530_10649C.1
atggacgcacggtcgatgtcgtcttcgtcgtcgtcggagtggcgggactggtcctctctaccggaggacctactcctccttatcctcgagcggctccggtggtcaagccacccaagcgtcgccgcggtgtgctcgccatggtgctccgccgtgccgccgtcctacccggcgtggatcaccccgctgctgctcaacgccgccgacgtcggcaccaccaacatccggtactacagcccctatttccacaagaacttcgaaatcgaccgtacgctgaccgatcccggtgccaagatctgctgctccgccgcagaacacctaacgactctatgcacgccggacgacgtggtcctcgacgccgacatggtctccggcagcatccgcgagctcccgcgtctgccggatagcaagttcaacttcatcgtctatgacgacggtgcgttgcggacgacgatgtacgccatcgacacggttgggtcgctgcgtatatgtagaaccggactaaatgatgacagcgagtgggatgactgggatttggtggatagccccgatgaacaaatggttccgacattgccgatctccaacccggtcttccatggcggcatgctctacctccttgggaaagatgggaggctggcattgtatgacccgtgcaatcacgaaagagggtttgaaattcatgacaaacccgagagctttgggttcgaaaccgatgatagctacctcgtcgagtctgaacaaggcgagttgatggcaatcctcgttggccgacgagggacgccggtgcatattgtgaaacttaacgaggaggcgatgaagtgggaggaagtggagagtttacaggggagaacgttgtttaccggcacgctcacgacgatgatgagaagtgtcaagatcaagtggatgcaaaacaaggtttttcttccaaagctttatgactggcctgagactatccaagttaatcttgttcttcgtgatggtgaattagcatttgtaccaaagtcgggtggtgaaaatactattttgaaagatggtgaggactatatggagaaaatgtggtgttatgaaccaggacaaagacaggcaaagaagttttggggtaccaaaagtgtggattatggcatttgggttaattttagcacttag

SEQ ID NO: 3699 - DNA, 725 bp, Oryza sativa
  Clone ID: PAT_MRT4530_1064C.1
gcacgaggccacgggttgtccttatcctatctctcgatctctctcgctctctccgtctctctctctctcttgctcgctccctcttacctatctctctatctctctctctctcgccaagcgaagcggcagtagcggtggtagcggtggcccggcgaagggggccgcgccctcccctccaccagatctggccgaagggggggtggtgcacctcggcgacgataccggcaagggcggtggccgggtggaggcgacaacggcggccgtgcccctccatcctcctcgatgcctccgagccgcatggcgccagatactaggccacctaagaggtcgggggctagctacgatacctaactatagaggttggggctacaccggataccggtggcctagtgacctacaccatcgtctactagatagccggtgccaccgccgtggccactgctaagccaccgccgccgagtggtgggtaggtggggaccagataccgacggcaccaagatacgggactaaccacatacggcaagaaggataggcgagaaccgtggcgtacggggtgatatttttctttgatatttgtgtagggtactatctatggatatttgggggaaagggaaaaatgcaggagttcatgttctaggcaaatgcaaacgttccttgtaatgtgatgaatattcttgattcgtttttttagtgaaatgtgatggatgttccttgatttttgcttc

SEQ ID NO: 3700 - DNA, 2517 bp, Oryza sativa
  Clone ID: PAT_MRT4530_10650C.1
cggcctttctgctttcgctttcacagtttcacggcttaccatttccttcccatctctccctcccgccacccccctctttctccccctccgtgtctcgcctttgcagaaagaaaggcgccacgaacccagcaacaacacccagcacaaaggcgaaacggggaaaaagaggaggaaaacaacaagaggacgcgaggggtcggggtgggagagggaggctacactacagcagcagcagaagcagagcgggagagtgatgagggagtgagaccaggccagccaagccaggcccgggcgctcggaaagtgcggagccgtttcccctctatctccactctctccagggccaggtgctcactgcgctgcgcctcttcgcacgcaccacccgtactacgtgcccacccgcgcgcgcgccgaggagaagagacccacgaccgtacgtgcgtgcgcgccatgtcgtccgccgctgggggcggcgggtacggcggcggccagggtggaggcgcggagcaccaccaccaccaccacgggcacgccggtcacctcctgctccaccaccatccgcagcacgtggccggcgcggccgttgcggcagcggccgcggcggcgggcgggcagatgtaccacgtgccccagcacagccggcgcgagaagctccggttcccgccggacgccggggactcgccaccgcctcatggtcatggtcatggtcatgccccgcagcagcagcagcagcacgggtcgtggcctccgcccccggcgttctactcgtacgcgtcctcgtcgtcgtcgtactccccgcacagccctactctagcgcaggcgcagctggtggcgcacgggctggcgccgccgctcccgcagatcccgacgcagaacttctcgctgtcgctctcctccgcgtcgtcgaatcctccaccaccgcaggcgcagccgaggaggcagctcggcggcctcgcgcaggccacggggccgttcggtcccttcaccggctacgccgccgtgctcggccggtcccgtttcctcggcccggcagagaagctgttcgaggagatctgcgacgtcggcggcgctgcttcgcacgtcgaccgcaccatctccgacgagggcctgctcgacgcggatccgatggacggcgtcgatcatgacgtcgttgatcacgacctcggcggcgctgaccgcgcagcggccgacgctggccccatctcgggggccgagcagcagtggaagaagacgaagctcatctccatgatggaagaggtttgcaagaggtaccggcagtactaccagcaggttcaggctgtgatggcctcgttcgagaccgtcgccgggttcagcaacgccgcgccgttcgcggcattggcgctgagggcgatggcgaagcacttcaagtgcttgaagagcatgattctgaaccagctgcgcaacacgagcaacaaggtcgctgtgaaggacgggctaaacaaggagatcgccgtgttcgggctcgccgggggtagcagcggcggcgccggcctccagcgagcgaacagcgcgagcgcgttcggccagccgcacaatatttggcgcccacagagggggctccccgagcgcgctgtgtccgttctacgcgcgtggctgttcgaacacttcctgcacccgtatcctaccgatggtgataagcaaatgctagcaaaacaaacaggcttgacacgcaaccaggtatcgaactggtttatcaacgcaagggttaggttgtggaagccaatggtggaagaaattcacaacctagagatgaggcaaatgcacaagcactcggtggttgacaagggccagcatagcgtgcatcatcaggcccagcattcttcgcagtgcagcgggaatccctccgttccttcggactcccatcctggacagagcagcagcataacccggaaccacaacaccgctgcctcccagggcttcccggatgagctctcccagatgtcccagtccatccagggacaggtgagcttcgcatacaacgggctgacctcgcagcacaacattgcatcaccacatcatcagcaccagcaggtcggcggtgttggtatcggaggcggcaatggcggtgtctccctcacccttggtcttcaccagaacaacagggtctgcatcgccgagcctctcccggctgctctcccggccaacctagctcaccgtttcggactggaggaagtcagtgacgcctatgtgatgagctcatttggaggtcaggaccggcatttcgggaaggagattggtggtcacttgctgcatgattttgtcgggtgattgtggctgctgcctcaggttgctggtgatgcacttgtaatgtactgctagtatgatgttaggatggtatataagtcaatcacttggcgacatggcttgatgatcagtctgaatcaatttgttcggagggtgaaaaaacattgatcttcccttcatgtagatccaggtatgctgtcaaatatttgacaccttgcgggctatagagagattgacaataccttcccaaggc

SEQ ID NO: 3701 - DNA, 2061 bp, Oryza sativa
  Clone ID: PAT_MRT4530_10651C.1
atgggttcttcgccatccaaagccactggtgaggatgccctagttctatgcaaggagcgaatgcgccatatcaggcgagctattgattcaagagatgcactgtcggcatcacacctatcatatactcagtccctccgtagtgtgggtactgcattgcggcggtatgcagagtctgagatctcaccagaatcatcactgtccatttcagaagcagataagtcaccatcacattcttctatggcttctccatcaccttctcgagcagtagagagcactggctccccagtacatcgagaatccccggtatctacctttgtgccaccaccaccaccattgccccctgaattatgtacctcgtgggacttcttcgattccaattatacttctggtagtgccacctcaaataatgagaatggagtgacattaaattttagtagattgaagggcctgagagattcaagggaatctgaagcagtctcgctgagagaagaaacaacaaacaggtctgatcgaatgcacccagagcttcctggtgataatgcagcacctaagcaagaagcccaagcaaagaaaggtgggatgagtaagccaagtggatcggttgaggttacaactgaagctactacttctgggcaagttggagcaaaggtggaggaagatgacatggaaaaagaattgtgcacagaagcagaagacccttcagagttcatcactcatagagcaaaagattttgtgtcaagcatgaaagacattgaaactcggtttgtacgtgccgcagaagctgggaatgaggtttccagaatgcttgagacaaagaagatcagacttgatatatgtgctaagattccaggttctccaggcaagccacctactgcccgatttgtgtccgcacttcgagtctgctgcaatcgtgagaatattctcaaccaggaaactgcacagaatatctcaaaagttgtcacttggaagcgttctgtatcatctttgtcctcatcatctaagagtccacttacagcagcaatgattactgatgatgtgggtgatagtaacagtgattttgttgagcaattcgccatggtatctggaagccactcgtctaccttggataggttacatgcttgggagagaaaactacatgatgaaatcaaggctagtgaacatgttagaaagacttatgatgagaaatgtaaccttctccggcgccaatttgcacgaggtctaaatgctcaactgattgataagaccagagctgttgtgaaggatcttcattccagggtgtctgttgcgatccaggctgttgatgcaatatcaaaaagaatagagaagataagggatgaagaactgcagccacaacttgtcgagctgatccaagggttaatcagaatgtggaaagcaatgttagaatgccaccacaaacaattcatcacaatatcactggcataccatgtcaagagttcgaccatggtgcagcaaggtgagcaccaccgcagggccgcagcgcatctctggaacgagttggactgcttctcgtccagcttcaggatctgggtcactgctcacaagtcctacgtcgagtccctcaacgcgtggctccagaagtgtgtcctgcagccagcccaggacagacggaggcgcaagcgcaaggtctctttccctccccgccacgcgctctcccctccgatctttgtcctctgcagagactggcttgccatgatggagtcacagtcactccccacagatgagctctgcaagtccatcaaagaggtgatgcagctcctgcgcggttcgtttgaccacccggccgatcatcaggacaaaacgacgaccgaatcgcagtctagaaacgagtcgcaggaatgtgggatgctggagaataacgagcaggaggtgagtggaagcgtggaagcagtggaagggttgcagtcaaagctaactacggttctggatcgcctgacaaagttctcagaggcttcactgaagcactacgaggagctcaagcagaattatgagatagctcgtgatgactaccagacgggtcgatcaaatgcccatcttgtttag

SEQ ID NO: 3702 - DNA, 2856 bp, Oryza sativa
  Clone ID: PAT_MRT4530_10652C.1
atggagatgaggaggagggcgccgtcgccttctccaccaccaccaccgctgccgccgccgccgtcgcccgagggacaggaggaagggcgagactcccctcccgtcggatggagcggaggggagggtgtcaccaccaccaccgtttcccctcccaccagatctggcaaagaggagggcaccgccgcagtcactaggccgtcaccgcctcccctccaatcggatggagcggaggggagggcgtgccacggggccgctgccacctctgcttccgccagatctggtggaggggagggcgctgccgcctaccctcccaccgccaggccaccgctgcctccgcctggtggaacaaaacctttgacgttcactattgatccatctgctgctgactttgtggggcaagaatccccgggcctgagagattcaagggaatctgaagcagtctcgctgagagaagaaacaacaaacaggtctgatcgaatgcacccagagcttcctggtgataatgcagcacctaagcaagaagcccaagcaaagaaaggtgggatgagtaagccaagtggatcggttgaggttacaactgaagctactacttctgggcaagttggagcaaaggtggaggaagatgacatggaaaaagaattgtgcacagaagcagaagacccttcagagttcatcactcatagagcaaaagattttgtgtcaagcatgaaagacattgaaactcggtttgtacgtgccgcagaagctgggaatgaggtttccagaatgcttgagacaaagaagatcagacttgatatatgtgctaagattccaggttctccaggcaagccacctactgcccgatttgtgtccgcacttcgagtctgctgcaatcgtgagaatattctcaaccaggaaactgcacagaatatctcaaaagttgtcacttggaagcgttctgtatcatctttgtcctcatcatctaagagtccacttacagcagcaatgattactgatgatgtgggtgatagtaacagtgattttgttgagcaattcgccatggctagtgaacatgttagaaagacttatgatgagaaatgtaaccttctccggcgccaatttgcacgaggtctaaatgctcaactgattgataagaccagagctgttgtgaaggatcttcattccagggtgtctgttgcgatccaggctgttgatgcaatatcaaaaagaatagagaagataagggatgaagaactgcagccacaacttgtcgagctgatccaagggttaatcagaatgtggaaagcaatgttagaatgccaccacaaacaattcatcacaatatcactggcataccatgtcaagagttcgaccatggtgcagcaaggtgagcaccaccgcagggccgcagcgcatctctggaacgagttggactgcttctcgtccagcttcaggatctgggtcactgctcacaagtcctacgtcgagtccctcaacgcgtggctccagaagtgtgtcctgcagccagcccaggacagacggaggcgcaagcgcaaggtctctttccctccccgccacgcgctctcccctccgatctttgtcctctgcagagactggcttgccatgatggagtcacagtcactccccacagatgagctctgcaagtccatcaaagaggaatgtgggatgctggagaataacgagcaggaggtgagtggaagcgtggaagcagtggaagggttgcagtcaaagctaactacggttctggatcgcctgacaaagttctcagaggcttcactgaagcactacgaggagctcaagcagaattatgagatagctcgtgatgactaccagacgggtcagggtttcaggggtggggttaggggagggtggcacttggaagtggagatcgggcttacaggagtggcctgggaggcggtggaccgatccaacatctcctcctccctccagatccacagggcggtatccctcgggcacggggcgcaggcggcggagcgcgagctcgggtgtgggcggcggctctcgggcgcgggcgacggaggagacgacggcggcgagctcaggacggtccaaagtcggcgccgggcggcgagctcgggcttgggcggcggtgcttgggtgcaggcgacggaggaaagggcggcggcgcttgggcgcgagcgatggaggagagggcagcggtgctcgggcgtgggcaccggcgcgggctcgggcgcgggcggcggcgctcaggacggggaggcgcgaggcgacatctccacagccggtccagctgaaagttatggtaagtacaatagcctcatctactctgcctcaacagagatggaggatgcactagttctggggcacgagcggccgctgacgttcctccggtacaaccgcgacggggacctcctcttctcgtgcgccaaggaccacacccccaacgtctggttcgccgacaacggcgaccgcctcggcacctacagcggccacaacggcgccgtctggtcctgcgacgtctcccgcgactccacccgcctcatcaccggcagcgccgaccagaccgccaagctctgggacgtccagaccggggcggagctcttcaccttccgcttcgacgcccccgcccgctccgtcgagttcgccatcggcgacggcctcgccgtcatcaccaccgacaacttcatgggcaacgtgcccaccgcccaggtcaagcgcatcgccgacgaccccgatgaccagtcggaggagtctcttctcgtgatttctggcatcaaggggaggattaacagggctgtatgggggccgttgaacaggaccatcatcaccgccggtgaggatgccaccatccgcatttgggacactgagcgataa

SEQ ID NO: 3703 - DNA, 2025 bp, Oryza sativa
  Clone ID: PAT_MRT4530_10653C.1
atgggttctttgccgtccaaagccactggtgaggatgccctagttctatgcaaggagcgaatgcgccatatcaagcgagctattgattcaagagatgcactgtcggcatcccacctatcatatactcagtccctccgtagtgtgggtactgcattgcggcgttatgcggagtctgagatctcaacagaatcatcactgtccatttcagaagcagataagtcaccatcacattcctctatggcttctccatcgccttctcaagcattagagagcactggttccccagtacatcgaggtagtcagctgactcctccctcaacaaagatccattacatgaaagcagcaggaacaaaacctttaacaatcactattgatccatctgctgctgactttgtggggcaagaatccccagtctctacctttgtgccgccaccaccaccattgccccctgaattatgtacctcatgggatttcttcgattccaattatgcttctggtagtgccacctcaaataatgagaatggagtgacattaaattttagtagattgaagggtctgagagattcaagggaatctgaagcagtctcgctgagagaagaagcaacaaacaggtctgatggaatgcacccagagcttcctggtgataatgcagcacctaagcaggaagcccaagcaaagaaaagtgggatgagtaagccaagtggatcggttgaggttacaactgaagctgctacttctgggcaagttggagaaaaggttgaggaagatgacatggagaaagaattgtgcacagaagcagaagacccttcagagttcatcactcatagagcaaaagattttgtgtcaagcatgaaagacattgaaatccggtttatgcgtgctgcagaagctgggaatgaggtttccagaatgcttgagacaaagaagatcagacttgatatatgtgctaagattccaggttctccaggcaagccacctactgcccgatttgtgtcagcacttcgagtctgcttcaatcgtgagaatattctcaaccaggaaactgcacagcatgtttcaaaagttgtcacttggaagcgttctgtatcatctttgtcctcatcatctaagagtccacttacagcagcaatgattaccgatgatgtgggtgatagtaacagtgattttgttgagcaatttgccatggtatctggaagccactcgtctaccttggataggctacatgcatgggagagaaaactacatgatgaaatcaaggctgtcgatgcaatatcaaaaagaatagagaagataagggatgaagaactgcagccacaacttgtcgagctgattcaagggttaataagaatgtggaaaacaatgttggaatgccaccacaaacaattcatcacaatatcactggcataccatgtcaagagtgcgaccacggtgcagcaaggtgagcaccaccacagggccgcaacgcatctctggaacgagttggactgcttttcgtccagcttcaagatctgggtcactgctcacaagtcctacgtcgagtccctcaacgcttggctccagaagtgtgtcctgcagccagcccaggaccgatggaggcgcaagcgcaaggtctctttccctccccgccacgcgctctcccctccgatcttcgttctctgcagagactggctcaccatgatggagtcacagtcactccccacagatgagctctgcaagtctatcaaagaggtggtgcagctcctgcgcggttcgttcgaccaccaggctgatcatcagaacaaaatgacgactgaatcgcacttgagaaacgagtcgcaggaatgtgggatgctggagaataacgagcaggaggtgagtggaagcgtaaaagcagtggaagggttgcagtcaaagctgactacggttctggaacgcctgacaaagttctcagaggcttcactgaaccattacgaggaccttaagcagaaatatgagatggctcgtgaagaatacaagatgggtcgatcaaatgcacatcttgtttag

SEQ ID NO: 3704 - DNA, 303 bp, Oryza sativa
  Clone ID: PAT_MRT4530_10654C.1
atggagccgggaagcatagccgagcgtttcagagataggagcatactcatcaccggctctactggctttctggcaaaaaccttgtccattctatactctctcgtgaagaagatactgcgagttcagccggaggtgaggaagctctaccagctggtgcgtgctccagacgccgcagctgccgaggagcgtgttctcacagagttcatagaaaaatgtagtgaaccatttcgacagccatacgacggggctttggtgccactggtggagaaaccatctttactccctggttgggaaccgctttaa

SEQ ID NO: 3705 - DNA, 215 bp, Oryza sativa
  Clone ID: PAT_MRT4530_10655C.1
tttggcttgggaggattagtgattgaccttaaggggaaggtggtgggaatgactggtcttatacatgcttttataccttcatcggtgatactcaagtgtttgaagctatggcataagttccggtgcatccctcgccctcaacttggagttaagcttgcatgcctgcaggtcgactctagaggatccccgggtaccgagctcgaattcgccctata

SEQ ID NO: 3706 - DNA, 369 bp, Oryza sativa
  Clone ID: PAT_MRT4530_10656C.1
atgtggcggccgagcgagggcctcaagtcccccaagagggggtccgggccacctgggcacgttgctgagcccaagggattccttcccctcagcgcagcgaggggtattttcgtccaaagattttcgagcccatatccaaccaaccaagtccatctgaagccgttggggtgcgccgggctgcacagcgcacggacggggaaacggcaagacgagggaacgaagaggatggagaggcagcaagccgggcagtgctgggctgagcggtgccggggtcgggaagcggccaggctaggggaagaagagggcggagcgccggggcagggaaatggcgaggcgaggggaagacgagggcgccgctgcttaccgtag

SEQ ID NO: 3707 - DNA, 114 bp, Oryza sativa
  Clone ID: PAT_MRT4530_10657C.1
taattactctgtcccaacgccgctgctcgcgggctccctctctcccacgaaagatggcgattcacattgctgggtacccccgcatgggctcccaagagggagcttaagcctgcc

SEQ ID NO: 3708 - DNA, 156 bp, Oryza sativa
  Clone ID: PAT_MRT4530_10658C.1
ccagcgaacgcggccggaaccgtagatgggattgtcaaagtcaatggatgcatcgttttcggatgcttgccaacctataaagacaaatgcgcatttaaaccaagcaaacagttaaagaagcctattattacatgatcctaagatacacacatgatc

SEQ ID NO: 3709 - DNA, 147 bp, Oryza sativa
  Clone ID: PAT_MRT4530_10659C.1
atggctgtgatggtgctgatgacgacaaaagtggtgatggcggcggtgatgaagatggcgatgtgcgtggccagcggagccaagcctgggtcggccgacgcctggcaggcctccctgggccagtccttccttctgaacgtctcctga

SEQ ID NO: 3710 - DNA, 441 bp, Oryza sativa
  unsure (1)..(441): unsure at all n locations
  Clone ID: PAT_MRT4530_10660C.1
ccggtggcggcggcctcccttcctcgacggcgcggcgcatcccccctcctcaacgccacggcggcgggggtggctcggccgcctcgggcggcgctgcccaacgccgattcggtgccgtcgccgacggatccggcgacagcgtgcggcggggcgacggatccggcggcgggctagggtttgggggttttttggattttattttttttgtttgccgaatttatttttgcatgcggccggtataagtgaccgcatgcgaaaataggatcttcgtatacggttgcgccggccgtatgtaaaaanagcgatttttgcagaccttctcctccatgcggttggggcaaagatcctcttcgtccgcatgtacagagcctttctgtagtagtgtatgtcacatgagaatctactattaattcctagacccaaaaaaaaaaaaaaaaaaaa

SEQ ID NO: 3711 - DNA, 1286 bp, Oryza sativa
  Clone ID: PAT_MRT4530_10661C.1
tgagaaacagtatttgtgattgatttgttgcaaaagcacaggcaaacatggtcctatcgtttgtactatttgattatgtcatcccaagctttactgatcatgctcccaatacatttcggcaacaacattttaacatcattttcctttcctacagacattgactaacctgatgaaccctttgctggtcacaacctccacatcaaaacgtgcttgacatgattcattttttgcacagtatttacagccccaatggttgacatgatccatttcgcacaatatatgttttggcattcggaaatgtcaatgatatctcagtagccaagatctcccaatggccatgagacacttagtgcctgccaggaattttcacccattgcagttgcacttgcagctcaccactctcgacgtttctaagtcggagaataatgtcctggacaaatttaccattcctccagaataggtgactctcatcagcaaggcagttctggttggatggtcgaattgtttttatgatggaaccattccgaatgttctccgggtccatgttcagaacttccatgaagggctccaggtctatttctgcatctcccattgggtcgtctctactgaaagtgtctttgtcaaacaccccaagcttaatcggtgcaatagggttcatgatcgacaaagttagctcttcatgccaaataggattcacagatttcttctttacactagtcttcactttttgcttgccgaggcgaaggacgacatatggatcactgcctcttgtgtcgcggtaggcaaggttaatcccacgcaccacccgtattttcaagaggcctaccaatccgtccataattggatttaattgttgtttagttcctgtggattatcagttgatactattttacaatgagaggcaatgtgggggcgaagatgtgcctaattcaataggagaattaggcgacttcttgcaacccctgtgcctctcggtagaatgcgcctgtgttttttcccccttctgtcctcatcggcctatatagttgcagccttgcaggaaggagcctggaggctggaggtggaggaggatctcattctcgcgcggagatcgagaatgattgatttggaggtgctagggttcgaggagtgaaagagatgttgctcttcaagtggacgagacgcggcggaggcggccccggccggcttcctcctcgtgccaccgccagcaagtcggcgagcatgaaagaggcggtgcacgccattgtatctccctgaactaggctcgtgtggctggagcaaacatg

SEQ ID NO: 3712 - DNA, 1023 bp, Oryza sativa
  Clone ID: PAT_MRT4530_10662C.1
atggcggccgccgccgaccacgcagccaccgccattgccatccccggcgaccctctcgccgacagcgcctgctccaccccgttcgtcagcgcgccgtccagcccgacgcgggagcgggagcgggagcaccacttcgcttctccccacggcgcgccgtgcttcttcagcgcgccggcgagccccacccgcggcggcggcggcggcgggtgcctcggtgacttcgacttcgacttctcgtcgcggttcccgtctccctccgcggcggcgatgtcgtcagcggatgagctcttccacaacggccagatccgcgctgtccgtctctccgcgatgctcctccagcctcagcctctggctccgctcgtcgacggcgacggccacgcgtcgcatctggcggaggaggatgcggcggcggtggaggaggatggtgcggaggccgacgagcgtggccgcatccgcagccggtcggttcgacggaaggcgcggtcgatgtccccgttccgcacgcgctggagggcgccttctcccgcgccggagaccgccgaggaggtcgaggcagtcgccacgccggcggcgtctcgctcgtcgtcgtcctcgtcgacggcttcctccgcttcgtccacctcctcacgaggctcccgccggtgggcgttcttgaaggatctcctccaccggagcaagtcggacggcggcaagaaccaccaccacgacaccgcgccaccgcctcctccgccaaagaggagcccgtccccgtccccgtctccgtctccggctccggcggcggcgagcgcgagaggagggagaggggcagcaacggggaggaggagcaggaggagatcggcgcacgagaggctgtacgaggcgaggagggcggaggcggaggagatgcggcggcggacgtacctgccgtaccggcaggggctcctcctcttcggctgcatcggcctcggctcccgcggctacggcgccgtccacggcctcgcgcgggggctcaacgccgccgccgccgtctcatcgcggtcatga

SEQ ID NO: 3713 - DNA, 318 bp, Oryza sativa
  unsure (1)..(318): unsure at all n locations
  Clone ID: PAT_MRT4530_10663C.1
cacgggggtgtccaagggggtgatccaagggggcagtgccgccatagaaagagaatggagcatgcgttggaantgggtgggtgtgatggctgggctggcatgtgtggagatgatgctgtgagcgtgtgcgtgtgaagtgtgtgtggcccaccgggccatgggcacctgcgtgtggacatgggaccccgttgaatgaatgctggctgcgcaaatggtgcncntagtgtgtaggtcggtnttataaacgtcggtgttatgtgtcgtatgtcggttnaaaactgtggatcntcgtgaggtctgtaaaaaaaaaaaaaaaaa

SEQ ID NO: 3714 - DNA, 1084 bp, Oryza sativa
  Clone ID: PAT_MRT4530_10664C.1
ctcttctttggaggatgactctacagtaggttctacaccctgcacacattgtgggttcacatcaacaacttttgaaccctgtatggacatctctctagacttggatgctggatataacaattctcttggtgttgcaaacccaaaggtacatgtgcggaatggagagcgaagctcaggtggcactaataccaaggtatcaacactcatgagatgtttggagcggtttacaagggctgagcggttggatgctgaacagaagttcttctgtgaacgttgcaaggagaggcaagagtccctgaagcaaatgtccattcggaggcttccattggtttcatgctttcatattaagaggtttgagcattcatcagttaagaaaatgtcaaggaaggttgatcactgtttacagtttcctttttctcttgacatggcgccatatctatcgtcctctatactcagaagcagatttgggaaccgtatatttccatcagaagctagtgatgcagattcagtttctgaattttcatcagaatttgaaatatttgcggtgatcatgcatagtggtaagctagaagctggccattatgtgacatatctcaggttaaacaatcactggtacaaatgtgatgatgcctgggtaaccagagttgaagagcatactgtcagaacctctcaggcatacatgctcttctatgtgcagaagacactttactacaaagcttgtgaaagagcaactgctgtctgatttggaacaaatatggctgatattattctgatcagccacaaaatatagtcatcagagagcgcaccatgtaattccatccagagaaaaagtgcctgtcatttggacagccacgaagtcggatgagattcaacttttttgcatgcaataacctttggattcggttgaccgagggtttttggcaattttctcaatagccaccacccaaaggaagaaggtcaattttatttgctcaatttatcttattacctgatttatgtgatcaattaagctggaagcattacactgttttacacaattggttgcgagggtgttctaaccccgataatgctggtgtttaagatt

SEQ ID NO: 3715 - DNA, 350 bp, Oryza sativa
  unsure (1)..(350): unsure at all n locations
  Clone ID: PAT_MRT4530_10665C.1
gacagaacccgagctcctgtgcccactgcccatgcaactcgacgcccccgcttcctctgtagaatccgttgcatcccgtgactcgtttcccaaattggttgaagggatttcttcccttatcctcctctttcttncccctcaagaatcggagcaaatcccatcgtatatcgcttggattcgaagcggagttcatctcctattttcccggcgaaccttaaccaatccgccgccaaatcctcacgggtccgagcctatttcctccacctttgcctataaatagcagtatcaatacctcctcttccgtttctatntttttccagaagcttttncctaacctttagccggcctgc

SEQ ID NO: 3716 - DNA, 1077 bp, Oryza sativa
  Clone ID: PAT_MRT4530_10666C.1
atggggagggcgccgtgctgcgagaaggttgggctgaagcgcgggaggtggacgacggaggaggacgagaagctcgccggctacattgccaagcacggcgagggatcctggcgctcgctgcccaagaatgcagggctgttgcggtgcggaaagagctgcaggctgcggtggatcaactacctgagagccggcgtgaagcgggggaacatctccaatcaggaagaggacgtcatcatcaagctccacgctaccctcgggaacagaaagtcttacgttgtgaaacggatggactacgtgtgtttgggcgcacgtgactactgcttccaacaaaacacacacgtacggtggtccctgatcgcgagccacctcccggggaggacggacaacgagatcaagaactactggaactcgcacctgagcaggcagatccacacgtaccggaggacgtacaccgcccccagcgaggccgccgtgaccatcgacgtgaccaagctccaggccgccgggaagcgccgcggcggccggaccgccgggcagtcgcggaagggcgacaagaagcgcgcggaggacgacccgcccaaggagaccgccgccgccgacacgccgttgccggagtcgagcccgcggcgcgcgcagagcgacgaggcgcggagcggcagcgtggtggtcgacccggaggagccgagcagccagcccaacaacggcagcagcggcggcggcggcggcacgccggacgggccgtgcagcgaggagacagccactgggccgacgtcgctggacccgatggagatgggcctctgggaggttgagagcgagttcgccgagatggaggcccttctgtgcggcggtgtggcgcccgacggccccgggataccggggctcgagccgctggacgtcgcggcccaggcggacgacctgctcgacatggactgggacggcttcgcggccgacctgtggggcgatccggcccagaggggcggccttgtccaagacgcgggcgagccaaacggctcgatgggctgcagctcggacgagctcgagtcgttcgcgagctggctcctctcggactcctgctga

SEQ ID NO: 3717 - DNA, 468 bp, Oryza sativa
  Clone ID: PAT_MRT4530_10667C.1
cacacgcggacgaaaccaaagatgagggataccaccatggttattttcaccatccttgtctgcctcgtcgccggcctcggcgacggccacagcgacagcgacaccatgagccacggcccaagagaaggagcagaagcaccaacacgctgggacagacgctgcgactgctgcaacaacatggagaagatctcgctcgagatgtaccggtcgatggaccagtggaacgacgaggtgaagcactgctacgactgctgcaaggagcgcgtggaggcgccccgcgacttcttccgcggcgcctactggtgctgcgactgggactcgacggaggaccgcacccacatgtgcacggcgacggatcagacgacgacgaagaggtcgtacaagagctgggacatgatcgagcagatgtcgcagaggatctggcggtcgtactagcactgcgaccacgagctgtagcaccgcaagtgc

SEQ ID NO: 3718 - DNA, 219 bp, Oryza sativa
  Clone ID: PAT_MRT4530_10668C.1
atggaggggagaacgagggaatgggttgacaagtgcgagaagtatttaaagttgttccaaataaatacacttcaaaaagtgaaaggagtagtcagagaaggcatgggctggaatgagttcttgaacgaaggttttgataggtttgaccaggaaggagagtggaaattgctcaaacagtggagtgatgtggaaagaactaggtgtcggtcgcgaaaacct

SEQ ID NO: 3719 - DNA, 585 bp, Oryza sativa
  Clone ID: PAT_MRT4530_10669C.1
atgagcaggggatgggtttcgtcgtacaagctcctttaccaggagtgcgacgtcgcgtccttctccgtgcgcgaggacgacgaccgcatgctcaagggcccgcttgacaccgccgccgcacatcgctcgactcttctctcactggccgccggcacccgccgtgtgctgcccttctcccatcggttgtcgtcctcaagatggggaagagaggaagagaggagggcgtcagcatcggcaggggcaaggagttggcgccgccacagcagggcatcggcggcgcaagagcaggtgctgcgtgtgacgcgaggccacaaagcatgggtggcagttctcctaaatctcaacagcgattctcctcaattttcgactcccgcaccgttgccaacgccactcctggccccctcctcgccgttgttgccgtaccgcggaggggatggtgagctcgagctccctcgcctccctcctccccgacactcccccctcacctccctcctccccgacactcccccctcacctcctctgtcgttacagaccgccgcggccctcctcgctggccgcccaccgccattgctactttacctttag

SEQ ID NO: 3720 - DNA, 458 bp, Oryza sativa
  Clone ID: PAT_MRT4530_1066C.1
gggaggcgaaaaaatacaatatgggagcgagctagctagcgcgcacggggtttcaccctcttatctgtactgcacgacgactggatcgtggtggtggtggcggtgcagctattgcttgcattgcgatgagggcgagtcgcgtgctgccccaacttatatagagttgatatcttgcaatacatagatggcagaggcgtactcgactcacatcatggagctgagcaagatgcatcggttgcacgaggcgagcgacatgatctcttcttcgccggcgtgcgcagcacccatcattgtagagatcacgaggcttcaacaccttctggattgcatggatgcggcagacagtaaggatcgatgacagcgagtaaccagcgtgggatatgtcttcttgcagtttgtcgtcggacgacgaggtgagctaaaatgacggccggtttgtgccgacacgcccgttcact

SEQ ID NO: 3721 - DNA, 408 bp, Oryza sativa
  Clone ID: PAT_MRT4530_10670C.1
cccccccaaaaattcaaactttccccccacagggaaaaaaaattccagttaccccacctttgggtggacaagccccgggggtttaaaattttaacctgggggaaaaaactgggccttggccaaccagggggcggttaaaaaaaccggggcctcccctttttaagagggggggaaatttttttagggggcaaaaaaattttttattttggttccaaaaactggaaagccattgttgggggaaattaaaaagttagccctaaattccataaaaattgggggggcgccttaaaaaaggggggggtttttttaaagccggctccaattaaaaaaaggggcagggcaaatcccgggcccgaaattggggggcctttcccagggaccaatcccgggaggggagaggcaacccat

SEQ ID NO: 3722 - DNA, 5583 bp, Oryza sativa
  Clone ID: PAT_MRT4530_10671C.1
atggagtttctactatgggtatcctaccttaccatcacactcgccaccatcctcttatttcttagaaccctgatcttgaggcacaaccgccgggtgtacaacctccctcctgggcctaagccatggccaatcatcggcaacctcaacctcatgggctcactcccacaccgctccatccacagcctctccaagaagtacggtcccctgatgcacctcaggttcgggtccttccccgtcgtcgttggctcgtcggtggagatggccaagttcttcctcaagacccacgacgtggtgttcgccgaccggcccaagaccgccgccggcaagcacaccacctacaactacagcgacatgacgtggtcgccctacggcgcgtactggcgccaggcgcgcaaggtgtgcctcgccgagctcttcagcgccaagcggatcgagtcgtacgagcacatccgccgcgaggaggtgcgcgcgctgctccgcgatctgcacgcggcgtccgggcgcgtggtggcgctcaaggactacctgtccgcggcgagcctgaacgtgatctcgcgcatggtgctcggcaagaagtacctggagcgcgaggtggtgcacgagggagaagtggtgacgacgcccgagcggttcaggtggatgatcgatgagctcttcctgcttaacggcgtgctcgacattggggattcgatcccgtggttgggctggctggacctgcaggggtacattcggaggatgaagaagctgagcaagatgtttgatcagttcctggaatatgtattggacgagcatgagaaccggatgtgtcgcgagggggagagcttcgtggcgaaggacatggtggatgtgctgctcaatgtcgccagcgatccttcgctggaggtcaagttcagccgtgacagcgtcaaggcattcacccaggacctcatcgctggcggcacggagagctcatcggccactgtggattgggccatcgcggagcttctcaggaagccggaggtgttcgccaaggtcaccgaggagctggaccgtgtcgtcggccgcggccgctgggtcacggagaaggacatcccgagcctcccctacatcgacgccatcatgaaggagacgatgcgaatgcacccggttgcgcccatgcttgcgcctcgcctgtcccgcgaagacacgtccgtcgacggctatgacatccccgctggcacgcgggtgctcgtcggcgtctggtccatcggccgcgaccccaagctgtgggacgcgccggaggagttcatgccggagaggttcatcggcagcaagatcgacgtgaaggggcaggatttcgagctgctgccgttcgggtcgggccggcggatgtgccccggctacagccttgggctgagggtgatccaggtgagcctcgccaacctgctgcacggcttcgcgtggaggctgcccgacggcatgacgaaggagcagctgagcatggaggagatcttcgttgttactgcatctgtcgtcgctgcagtccgattcccaaacttcttcatggtatcagagcgattggaagaagaaatcgattctgcatctgaatctgaagagattgcatccgagtcatctgaagaagaggttgcatctgaaaagagcacccagatggcatctacatccaactccgctgcgagctccaatcccttgatcggagttcaggtcaccgagaagctttccaaggcgaatcatgggctctgggtggcgcaggtgctcacggcaattcggggcgccagacttgaggggcacatcaatgggaaaaacccagctcctcctgctgaaatcacgaagaccgtcgatggaaaggaagtcaagacctccaacccgaactatgatgaatggttcgctgctgatcagcagatcctcggcttcttgttctcctcgttgacgagagagacactctcacaagtagctgctgtgaagacggcggccgaagcatggaaaaccctggacgacatgtttacgtccaggacacgcgcgcgttctctcaacatgaagaccctcgcagatgaagttgcagcagccggcaaaccactggatgatgaagaactgatcgcctacatcctcaacggcctcgacgaagatttcgactccgtcgtctccacaattgttggcagggttgaacctgtcacggttgcggaagtctactcacaacttttaagctttgaaaacaggttagcaatgaggcaggcgcaggccacggcgaacatggcgaacagaggtggacgtggtggtggtggctcacggggtggtggcgcaaaccctgggcgaggacgcggcgcaactcgtgggcgcagcgccgcaccaggtcgtggacgcggcaacaaccagcagcagcgcagctatgacaatcgtccattgtgccaggtctgctataaacgcggacatgttgcagcggactgttggcatcgatttgatgaagatttcgtccccgacgacaagctagttgctgctgccatccacacccatgcacgggactccaactggtatgttgacaccggcgccaccgaccacatcacctgggaactggagaaactcaccgctcgagacgtctacaaaggacatgatcaaatccacacggcgagtggttcaggtatggagattaaacatattggtcattcaatagttcatacccctactcgcccattgcatctgaataatgttctccatgtccctcaagccaataaaaatcttatttccgcatataagcttgctgcagataactctgtgtttcttgaaattcactcaaaacattttttgatcaaggatcaggccacgaggagaacggttcttaaggggagacgccaaaaaggactctatccagttccatctgcatctcctccatcatctgcaaaagtagtttgtgctgtcacgccatcctttgagagatggcatagtcgcttgggtcattcctcagcacccattatctccagagtcattagcaagaataaattaccttgtctagatgagtccaataaagagccggtttgtgatgcatgtctaaaggccaagagccatcagttaccttattctaaatctttgagtatatcgagtcatcctttggaacttgtgttttctgatgtttggggtcctgctccagtttctgttggaaataagaaatattatgtcagttttattgatgattatagcaagttcacttggatttatcttttaaagaacaaatctgaagtttttcagaaatttcatgattttcagaatttggttgaacgtttgttcgatcgtaaaattatttccatgcaaactgactgggggggagagtaccagaaactcaattccttttttgagaaaataggtatatctcactatgtctcctgcccacatactcatcaacaaaatggctctgccgaaagaaaacataggcacatcgtagaagttggcctatctcttctagcatatgctagtatgccgctcaaatattgggatgaagcgtttcttgctgccactcatattataaatcgggttcctagtagagtcattgagtttgagtctcccctggaacgtctcttcaaacaaacaccagactattcatcctttagagtgtttggttgtgcttgttggcctaatcttcgtccttataatgcacataagctccaatttcgttcaaagcaatgtgtatttcttggtcatagccaccgccataaaggatacaaatgtctggacattgcttctggtagaatctatatatccagagatgtcatttttgatgagagtgtatttcctttttctaaattgcatgacaatgctggcgcacgtattcgtcatgagatctctcttttgccctctgatctcattattcacacgtctcatcaagggggagaacttgagaatgatcagatgtttaattctcctaatgaaatgcctgatcaatctgttgagcatgcagaagatacaggaaatataggtgcagaggactgggtggatgaagcaaatacgcagcagctgtcacagcagcaaccatcatcgccgcagtcgccgggatctgtgacacccttgtgtgtgcgcaggtctggtagtgacacgcatgcagcaacttcaggcacgcgtgttgagaacgagccgagtgatcagtctccgtctgccacgacgatggcaggtaatgatgatgtctctgaatcctctgcatcgcatgaagaagccgcgagctctcctgtggctgagcagcatcaaccagaaatagttcggcctagaacccgcttacagagtggaatccgcaaagaaaaggtatacacagatggtacagttaaatatgcttgctttacagcttctggtgaaccagaaaatttacatgaggcattaaatgataaaaattggaaaaatgctatggatgctgaatatgaggcactaatgggtaataaaacctggcatttagttcctgcagaaaaagctaataatattatagattgcaagtgggtctataagattaaaagaaaggctgatggtagcttagacagatataaagctagattggttgcaaagggatttaaacagaggtatggaatagattatgaagatacctttagtcctgtggtaaaagcaattacaatcagaattattttgtctattgctatctctagaggttggagccttcgacagctagatgtcagtaatgcttttctccatgggatattggaagaggaggtttatatgaaacaacccccaagatatgaagataaatccttgattaatcatgtatgtaagttagacaaggctttatatggtcttaagcaggcaccaagggcatggtactcaaggctaagcacaaaactgcaagagctaggattcatgccttccaaggctgatacatctctgttcttctacagcaagggtgatgtcattatatttgttcttatatatgttgatgatataattgttgctagctctatgccagatgccaccacagctcttttgcaggacctgaataagtcttttgccttaaaggacttaggagagcttcattatttcctaggaatagaagcaacaaaggttcattgggctgcagtcaagaggattctgagatatttgcaacaaacatctgggcttggtcttaagataagaaagtcttcttctttacttgtcagtggtttctctgatgctgattgggcaggttgcttagatgataggagatccactggtggctttgctgtttatttggggcctaatcttgtgtcttggagtgcacgtaaacaacctacagtgtcaagatcaagtacagaagcagaatataaggctttggctaatgtcacagctgagatcatgtgggtgcaaactctgttgaaagagatcaagatagaagtaccaaaaacagcaaaggtatggtgtgataacattggagcaaagtatctctctgctaatcctgtgtttcatgctcgtactaagcatatagaagtagactatcattttgttcgtgaaagagtatctaggaaattgttggaaatagagtatgttccttcacaagatcaagttgcagatggatttacaaaacccttgaatgagaaacagctagctgtatttagatacaatcttaacctttatggtttagattga

SEQ ID NO: 3723 - DNA, 257 bp, Oryza sativa
  Clone ID: PAT_MRT4530_10672C.1
cccacacgtacggtgagaagcaacatgattggagagattgcgaatagatcaacattcctattagctgtcaaagcgcatgtggagacacaaggagactttgccgagtctgtagcaaatgaggtccgagcagcaagtttcgtaaatatcgactatgttgatgcatttgttaattggcttgatgaggtactatactacttggtcgatgtgcggcccattctttagcactttaattgaccagatagccttactgatgcact

SEQ ID NO: 3724 - DNA, 5822 bp, Oryza sativa
  Clone ID: PAT_MRT4530_10673C.1
tcaatctaaaccataaaggttaagagtataacaccttattatcaagcatattattgactcacacttgccctattacattcagctctacaaaggcagcacaggatgcataataagtaacaacgctagcaatacactgcaagcttaatgttggaccgcgacaggagcagtgcctacagtacagtcaagagacacagaacgtacacacgcacatcatcaaaggcatatcagatcaggcagcagcatagaggtgagcgggcagcttgggctcgacgacagcctcaagcgggaacttgcgcggcgtcgacaagccgaagatctcctccatgctcagctgctccctcgtcacgccgtcgggcagcctccacgcgaagccgtgcagcagattggcgaggctcagctggatcaccttcagcccaaggctgtagccggggcacatccgccggcccgacccgaacggcagcagctcgaagtcctgccccttcacgtcgatcttgttgccgatgaacctctccggcatgaactcctccggcgcgtcccacagcttggggtcgcggccgatggtccacacgctgacgagcacccgcgtgccggcggggatgtcgtagccgtcgacggacgtgtcctcgcgggacaggcggggcaccagcatgggcgccaccgggtgcagccgcatggtctccttcacgatggcgtccacgtaggtgaggctcgggacgtccttctccgtgacccagcggccgcggcccacgacgcggtccagctcctcggtggccttggcgaacacctccggcttcttcaggagctccgacagcgcccactccacggtcaccgccgagctctctgtgccgccagcgatgaggtcctgagtgaatgccttgacaccttccctcttgagcttgacctcaaggttgggattgtcagcgaactgcagcagcacgtccaccatgtccttggccacgaagctctccccctcgcggcggcggcgctcgttgtgctcgtccacgacgtgttccaggaaccggtcgaacatcttgccgagcttcttcatcctcttgatgtacccctgcaggtccagccagtcgagccacgggatggagtcgccgatgttgagcacgccgttgagcaggaacagctcgtcgagcatccacttgaactcctccggcgtcgtcaccgacccccccgcatccttgtccaggtacttcttgcccagcaccatgcgcgtgatcacgttcaggctcaccgtcgacaggtagtccttgagcaccacgacgccgccggccgcgccgtgcaggtcgcgcagcagcgcgcgcacctcctcgccacggatgtactcgtacgactccagccgcttggcgctgaagagctcggtgaggcacatcttgcgcgcctggcgccagtacgcgccgtagggcgaccacgtgatgtcgctgtagttgtaggtggtgtgcttgccggcggcggtcttgggccggtcggtgaacaccacgtcgtgggtcttgaggaagaacttggccatctccaccgacgagccgacgacgacggggaacgacccgaacctgaggtacatcaggggaccgtacttcttggagaggttgtggatggagcggtgcgggagcgtgcccaccaggttgaggttgccgatgaccggccacggcttcggccccggcgggaggttgtacacgcggcggctacggccgagcaccgctttcaggaacagcacggtggcgagcactacgccgacgaaggacgcccatggcggcagcatcagctccatcggtaaccggtcggtagtacgtggattggctgcaattcagttactatgttataggctgagccggctcgtgctgctgcgtatttgcttcatccacccagtcctctgcacctatatttcctgtatcttctgcatgctcaacagattgatcaggcatttcattaggagaattaaacatctgatcattctcaagttctcccccttgatgagacgtgtgaataatgagatcagagggcaaaagagagatctcatgacgaatacgtgcgccagcattgtcatgcaatttagaaaaaggaaatacactctcatcaaaaatgacatctctggatatatagattctaccagaagcaatgtccagacatttgtatcctttatggcggtggctatgaccaagaaatacacattgctttgaacgaaattggagcttatgtgcattataaggacgaagattaggccaacaagcacaaccaaacactctaaaggatgaatagtctggtgtttgtttgaagagacgttccaggggagactcaaactcaatgactctactaggaacccgatttataatatgagtggcagcaagaaacgcttcatcccaatatttgagcggcatactagcatatgctagaagagataggccaacttctacgatgtgcctatgttttctttcggcagagccattttgttgatgagtatgtgggcaggagacatagtgagatatacctattttctcaaaaaaggaattgagtttctggtactctcccccccagtcagtttgcatggaaataattttacgatcgaacaaacgttcaaccaaattctgaaaatcatgaaatttctgaaaaacttcagatttgttctttaaaagataaatccaagtgaacttgctataatcatcaataaaactgacataatatttcttatttccaacagaaactggagcaggaccccaaacatcagaaaacacaagttccaaaggatgactcgatatactcaaagatttagaataaggtaactgatggctcttggcctttagacatgcatcacaaaccggctctttattggactcatctagacaaggtaatttattcttgctaatgactctggagataatgggtgctgaggaatgacccaagcgactatgccatctctcaaaggatggcgtgacagcacaaactacttttgcagatgatggaggagatgcagatggaactggatagagtcctttttggcgtctccccttaagaaccgttctcctcgtggcctgatccttgatcaaaaaatgttttgagtgaatttcaagaaacacagagttatctgcagcaagcttatatgcggaaataagatttttattggcttgagggacatggagaacattattcagatgcaatgggcgagtaggggtatgaactattgaatgaccaatatgtttaatctccatacctgaaccactcgccgtgtggatttgatcatgtcctttgtagacgtctcgagcggtgagtttctccagttccgaggtgatgtggtcggtggcgccggtgtcaacataccagttggagtcccgtgcatgggtgtggatggcagcagcaactagcttgtcgtcggggacgaaatcttcatcaaatcgatgccaacagtccgctgcaacatgtccgcgtttatagcagacctggcacaatggacgattgtcatagctgcgctgctgctggttgttgccgcgtccacgacctggtgcggcgctgcgcccacgagttgcgccgcgtcctcgcccagggtttgcgccaccaccccgtgagccaccaccaccacgtccacctctgttcgccatgttcgccgtggcctgcgcctgcctcattgctaacctgttttcaaagcttaaaagttgtgagtagacttccgcaaccgtgacaggttcaaccctgccaacaattgtggagacgacggagtcgaaatcttcgtcgaggccgttgaggatgtaggcgatcagttcttcatcatccagtggtttgccggctgctgcaacttcatctgcgagggtcttcatgttgagagaacgcgcgcgtgtcctggacgtaaacatgtcgtccagggttttccatgcttcggccgccgtcttcacagcagctacttgtgagagtgtctctctcgtcaacgaggagaacaagaagccgaggatctgctgatcagcagcgaaccattcatcatagttcgggttggaggtcttgacttcctttccatcgacggtcttcgtgatttcagcaggaggagctgggtttttcccattgatgtgcccctcaagtctggcgccccgaattgccgtgagcacctgcgccacccagagcccatgattcgccttggaaagcttctcggtgacctgaactccgatcaagggattggagctcgcagcggagttggatgtagatgccatctgggtgctcttttcagatgcaacctcttcttcagatgactcggatgcaatctcttcagattcagatgcagaatcgatttcttcttccaatcgctctgataccatgaagaagtttgggaatcggactgcagcgacgacagatgcagtaacaacgaagatctcctccatgctcagctgctccttcgtcatgccgtcgggcagcctccacgcgaagccgtgcagcaggttggcgaggctcacctggatcaccctcagcccaaggctgtagccggggcacatccgccggcccgacccgaacggcagcagctcgaaatcctgccccttcacgtcgatcttgctgccgatgaacctctccggcatgaactcctccggcgcgtcccacagcttggggtcgcggccgatggaccagacgccgacgagcacccgcgtgccagcggggatgtcatagccgtcgacggacgtgtcttcgcgggacaggcgaggcgcaagcatgggcgcaaccgggtgcattcgcatcgtctccttcatgatggcgtcgatgtaggggaggctcgggatgtccttctccgtgacccagcggccgcggccgacgacacggtccagctcctcggtgaccttggcgaacacctccggcttcctgagaagctccgcgatggcccaatccacagtggccgatgagctctccgtgccgccagcgatgaggtcctgggtgaatgccttgacgctgtcacggctgaacttgacctccagcgaaggatcgctggcgacattgagcagcacatccaccatgtccttcgccacgaagctctccccctcgcgacacatccggttctcatgctcgtccaatacatattccaggaactgatcaaacatcttgctcagcttcttcatcctccgaatgtacccctgcaggtccagccagcccaaccacgggatcgaatccccaatgtcgagcacgccgttaagcaggaagagctcatcgatcatccacctgaaccgctcgggcgtcgtcaccacttctccctcgtgcaccacctcgcgctccaggtacttcttgccgagcaccatgcgcgagatcacgttcaggctcgccgcggacaggtagtccttgagcgccaccacgcgcccggacgccgcgtgcagatcgcggagcagcgcgcgcacctcctcgcggcggatgtgctcgtacgactcgatccgcttggcgctgaagagctcggcgaggcacaccttgcgcgcctggcgccagtacgcgccgtagggcgaccacgtcatgtcgctgtagttgtaggtggtgtgcttgccggcggcggtcttgggccggtcggcgaacaccacgtcgtgggtcttgaggaagaacttggccatctccaccgacgagccaacgacgacggggaaggacccgaacctgaggtgcatcaggggaccgtacttcttggagaggctgtggatggagcggtgtgggagtgagcccatgaggttgaggttgccgatgattggccatggcttaggcccaggagggaggttgtacacccggcggttgtgcctcaagatcagggttctaagaaataagaggatggtggcgagtgtgatggtaaggtaggatacccatagtagaaactccat

SEQ ID NO: 3725 - DNA, 427 bp, Oryza sativa
  Clone ID: PAT_MRT4530_10674C.1
aaaaaaaggaactcggatttttttcaaaatccacaatttgatcaaaggattttttttcaaactgcttcattcaatttatacccatcagggaaatcatccctccatgtttgttcttccttttttttcaaaaaaaaccacccaaaaagggttgccccggtcctacctcctttttttcaaaaaaccctacctgttgggtttcaccttataaaatatacaggctaatttccgggatctgaaaagggatctacatacccttttcatgcaaatttaacaaaccccatcctttttttgccaaaatcaaaaaccctttgaaaagcccccctaaaaacctttccaaaaatccaaaaaggaccccgtgggggaggtttttcaaaccccataaacccccttatgcaaacgggttgccctccttgctcccctcgggcca

SEQ ID NO: 3726 - DNA, 5802 bp, Oryza sativa
  Clone ID: PAT_MRT4530_10675C.1
atggagtttctactatgggtatcctaccttaccatcacactcgccaccatcctcttatttcttagaaccctgatcttgaggcacaaccgccgggtgtacaacctccctcctgggcctaagccatggccaatcatcggcaacctcaacctcatgggctcactcccacaccgctccatccacagcctctccaagaagtacggtcccctgatgcacctcaggttcgggtccttccccgtcgtcgttggctcgtcggtggagatggccaagttcttcctcaagacccacgacgtggtgttcgccgaccggcccaagaccgccgccggcaagcacaccacctacaactacagcgacatgacgtggtcgccctacggcgcgtactggcgccaggcgcgcaaggtgtgcctcgccgagctcttcagcgccaagcggatcgagtcgtacgagcacatccgccgcgaggaggtgcgcgcgctgctccgcgatctgcacgcggcgtccgggcgcgtggtggcgctcaaggactacctgtccgcggcgagcctgaacgtgatctcgcgcatggtgctcggcaagaagtacctggagcgcgaggtggtgcacgagggagaagtggtgacgacgcccgagcggttcaggtggatgatcgatgagctcttcctgcttaacggcgtgctcgacattggggattcgatcccgtggttgggctggctggacctgcaggggtacattcggaggatgaagaagctgagcaagatgtttgatcagttcctggaatatgtattggacgagcatgagaaccggatgtgtcgcgagggggagagcttcgtggcgaaggacatggtggatgtgctgctcaatgtcgccagcgatccttcgctggaggtcaagttcagccgtgacagcgtcaaggcattcacccaggacctcatcgctggcggcacggagagctcatcggccactgtggattgggccatcgcggagcttctcaggaagccggaggtgttcgccaaggtcaccgaggagctggaccgtgtcgtcggccgcggccgctgggtcacggagaaggacatcccgagcctcccctacatcgacgccatcatgaaggagacgatgcgaatgcacccggttgcgcccatgcttgcgcctcgcctgtcccgcgaagacacgtccgtcgacggctatgacatccccgctggcacgcgggtgctcgtcggcgtctggtccatcggccgcgaccccaagctgtgggacgcgccggaggagttcatgccggagaggttcatcggcagcaagatcgacgtgaaggggcaggatttcgagctgctgccgttcgggtcgggccggcggatgtgccccggctacagccttgggctgagggtgatccaggtgagcctcgccaacctgctgcacggcttcgcgtggaggctgcccgacggcatgacgaaggagcagctgagcatggaggagatcttcggtttgtcgacgccgcgcaagttcccgctcgagttgttactgcatctgtcgtcgctgcagtccgagcgattggaagaagaaatcgattctgcatctgaatctgaagagattgcatccgagtcatctgaagaagaggttgcatctgaaaagagcacccagatggcatctacatccaactccgctgcgagctccaatcccttgatcggagttcaggtcaccgagaagctttccaaggcgaatcatgggctctgggtggcgcaggtgctcacggcaattcggggcgccagacttgaggggcacatcaatgggaaaaacccagctcctcctgctgaaatcacgaagaccgtcgatggaaaggaagtcaagacctccaacccgaactatgatgaatggttcgctgctgatcagcagatcctcggcttcttgttctcctcgttgacgagagagacactctcacaaaagggcaactcgtcgatctctgaatatatcggcaagatgaagaccctcgcagatgaagttgcagcagccggcaaaccactggatgatgaagaactgatcgcctacatcctcaacggcctcgacgaagatttcgactccgtcgtctccacaattgttggcagggttgaacctgtcacggttgcggaagtctactcacaacttttaagctttgaaaacaggttagcaatgaggcaggcgcaggccacggcgaacatggcgaacagaggtggacgtggtggtggtggctcacggggtggtggcgcaaaccctgggcgaggacgcggcgcaactcgtgggcgcagcgccgcaccaggtcgtggacgcggcaacaaccagcagcagcgcagctatgacaatcgtccattgtgccaggtctgctataaacgcggacatgttgcagcggactgttggcatcgatttgatgaagatttcgtccccgacgacaagctagttgctgctgccatccacacccatgcacgggactccaactggtatgttgacaccggcgccaccgaccacatcacctcggaactggagaaactcaccgctcgagacgtctacaaaggacatgatcaaatccacacggcgagtggttcaggtatggagattaaacatattggtcattcaatagttcatacccctactcgcccattgcatctgaataatgttctccatgtccctcaagccaataaaaatcttatttccgcatataagcttgctgcagataactctgtgtttcttgaaattcactcaaaacattttttgatcaaggatcaggccacgaggagaacggttcttaaggggagacgccaaaaaggactctatccagttccatctgcatctcctccatcatctgcaaaagtagtttgtgctgtcacgccatcctttgagagatggcatagtcgcttgggtcattcctcagcacccattatctccagagtcattagcaagaataaattaccttgtctagatgagtccaataaagagccggtttgtgatgcatgtctaaaggccaagagccatcagttaccttattctaaatctttgagtatatcgagtcatcctttggaacttgtgttttctgatgtttggggtcctgctccagtttctgttggaaataagaaatattatgtcagttttattgatgattatagcaagttcacttggatttatcttttaaagaacaaatctgaagtttttcagaaatttcatgattttcagaatttggttgaacgtttgttcgatcgtaaaattatttccatgcaaactgactgggggggagagtaccagaaactcaattccttttttgagaaaataggtatatctcactatgtctcctgcccacatactcatcaacaaaatggctctgccgaaagaaaacataggcacatcgtagaagttggcctatctcttctagcatatgctagtatgccgctcaaatattgggatgaagcgtttcttgctgccactcatattataaatcgggttcctagtagagtcattgagtttgagtctcccctggaacgtctcttcaaacaaacaccagactattcatcctttagagtgtttggttgtgcttgttggcctaatcttcgtccttataatgcacataagctccaatttcgttcaaagcaatgtgtatttcttggtcatagccaccgccataaaggatacaaatgtctggacattgcttctggtagaatctatatatccagagatgtcatttttgatgagagtgtatttcctttttctaaattgcatgacaatgctggcgcacgtattcgtcatgagatctctcttttgccctctgatctcattattcacacgtctcatcaagggggagaacttgagaatgatcagatgtttaattctcctaatgaaatgcctgatcaatctgttgagcatgcagaagatacaggaaatataggtgcagaggactgggtggatgaagcaaatacgcagcagctgtcacagcagcaaccatcatcgccgcagtcgccgggatctgtgacacccttgtgtgtgcgcaggtctggtagtgacacgcatgcagcaacttcaggcacgcgtgttgagaacgagccgagtgatcagtctccgtctgccacgacgatggcaggtaatgatgatgtctctgaatcctctgcatcgcatgaagaagccgcgagctctcctgtggctgagcagcatcaaccagaaatagttcggcctagaacccgcttacagagtggaatccgcaaagaaaaggtatacacagatggtacagttaaatatgcttgctttacagcttctggtgaaccagaaaatttacatgaggcattaaatgataaaaattggaaaaatgctatggatgctgaatatgaggcactaatgggtaataaaacctggcatttagttcctgcagaaaaagctaataatattatagattgcaagtgggtctataagattaaaagaaaggctgatggtagcttagacagatataaagctagattggttgcaaagggatttaaacagaggtatggaatagattatgaagatacctttagtcctgtggtaaaagcaattacaatcagaattattttgtctattgctatctctagaggttggagccttcgacagctagatgtcagtaatgcttttctccatgggatattggaagaggaggtttatatgaaacaacccccaagatatgaagataaatccttgattaatcatgtatgtaagttagacaaggctttatatggtcttaagcaggcaccaagggcatggtactcaaggctaagcacaaaactgcaagagctaggattcatgccttccaaggctgatacatctctgttcttctacagcaagggtgatgtcattatatttgttcttatatatgttgatgatataattgttgctagctctatgccagatgccaccacagctcttttgcaggacctgaataagtcttttgccttaaaggacttaggagagcttcattatttcctaggaatagaagcaacaaaggtatgtgatggtattctgttatctcaagaaaaatatgtaaaagatctattgaagcgaatcaatatggataagtgcaaacctgtgagtacgcctctgtcaccaactgagaaactctcaatacatcagggagatgttcttggacctaatgatgctaccaattataggagcatagttggagcattgcaatatttgactctaactaggccagatatttctttctcagttaataaagtctgtcagtacttacactctccaactacagttcattgggctgcagtcaagaggattctgagatatttgcaacaaacatctgggcttggtcttaagataagaaagtcttcttctttacttgtcagtggtttctctgatgctgattgggcaggttgcttagatgataggagatccactggtggctttgctgtttatttggggcctaatcttgtgtcttggagtgcacgtaaacaacctacagtgtcaagatcaagtacagaagcagaatataaggctttggctaatgtcacagctgagatcatgtgggtgcaaactctgttgaaagagatcaagatagaagtaccaaaaacagcaaaggtatggtgtgataacattggagcaaagtatctctctgctaatcctgtgtttcatgctcgtactaagcatatagaagtagactatcattttgttcgtgaaagagtatctaggaaattgttggaaatagagtatgttccttcacaagatcaagttgcagatggatttacaaaacccttgaatgagaaacagctagctgtatttagatacaatcttaacctttatggtttagattga

SEQ ID NO: 3727 - DNA, 2987 bp, Oryza sativa
  Clone ID: PAT_MRT4530_10676C.1
atgggtaatggagttactgaggattatttggtttgcttccacaataacgagccgagtaacgcgtgtgtcacacctgtaacctctgaaggtgttggcggtgatcattggggggatcatcatgtgaatgccgggcatccaggcagtccgtcaacaccgtcaggatcccatgaaggtgtggatcgacctccttgtgttcaggcatgtgagatgaatacgcctgagaaggatcgtgtgtacagacatgactccaaacttagagaagaaatggtaccaaaagtagggatggtttttgattcgtacgaagaggcgtacgatttctacgaaagatattcatatcatgctggttttgatattaaaaaaagcaggaataaacctacttttagagagatatgctgcacccgggaggggaagaacaaatataggggagatgaatcaaagcgtgagcggatgcgtgggtctgctaggattggttgtaaggcatatgtgaaggtgaagaatgttattagagaaggcgagtttgtttccgtacggtttgatgatgtcataatcgaacacaatcacccattgacgtcgtctccatcggctgttaagctgatgcgttcgcacaagcatcgagatgaaacactgatggagttcgttgacacgatgcagcaaagccgtgtccccaattcaagtattgtaggagtactttctgatatgcacggaggacgtgagaatattcctttcacgacacgagaccttgaaaataggaaagctgctaatgttcgagcagagaatgcagatgacattagcaagctgctagagtttttcaaagaatgcaagaaagaaaatccaaagttctactgggatataaagtcaacactttttgggtgtgcgttgattcgggatgaaagggctgagtcattccaatggctattcgaaacgttcaagaattgtatgggggacagcccttcaccccggtgcattctgacagaccaagaccaagcaatggcagtggcggttgaacgcgtttttcctgaagctatccataggttgtgcatgtggcacattatagatgggcactcggaccatctgaacacaattttttctagaaacgatgacatagagggggagatgatggtttgcattaaccagacatatactcctacggagtttgagaatgcatgggatcgtttcattgataaatatgaactacgtgacagcgtgacactacgcaacctgtatgatcttagggaaagatgggttccagcttttttcaagaaacattactgtggtcgtatgacttccacacagaggagtgaaagctttaacagaatggttaaaagtaattttgtagatcatcaaactgcactacataggtttgccagaaggatgctcgatgttgtggtatctaggaaggataaggagtccgcggagacccgaggttgtgagggtgtacccattgtgaagaccccttggccatttgcggagcagttatctagggtgtacactcgggctgtgttcaaggtgtttgaggattccctacatgatagtgtgtattttaggattgaactagagggatcggatggcattcattgggttatttctcataccaaacgctcggagaagcatgactggtgccaaagacagttcaaggtgatagtggatgttgataacgggaactttagttgtgaatgcctgcagtgggaacatacaggaatgttctgcccccatctgttgcgagcctttgttcatgcgcaggttgagaaaattccacatatgtatgttcttcgtcgatacacaaagcaagctaaaagtgatgtgaactatgatcgtcgtgaccgtcctatggctggaccagacggtgttaaagaatcctacagaacaaagttgttgtcatatgatgccatgcagatcgtcaagttggggcggaggtcaaaggtagcttttgatagggcaactgctgtgctgaagggactgaggaagcaacttgaagagataccaccagattcagatgttggggttggcaatgcagtgacaagtggtaaagacgcggaaagtgtggccgataccatgcgggctggacaatcgatgtcaatgagtgaacatgattgtgaaagagtgagcagacgccctcctcctcggtcaatgacaaagggaagggcaagcgagcctaccgagaaggttaagctaggggctcgtggcgataagaaatgcaccagggggtgcgggtggtgtggtctgaaagttggtcacaatagctctacatgtcctaataatccagctaatttcaagcgtattgcggaggccaacaacaagggaaaacgtaagagaggtcgcccaagaggaagtggcgttggaggtggtcgtggacggaaagctgtgagaaggaacctgattgacgaatgggctgaagggcctgtgggaggggagtgtagcatgagaagcgaggagggttggttgggggtagggggtggggtgggggtgggggtggggggtggtgtaattgggcaaaaatcgacttctcctgcaaatttagtcgttagtggcttcttctccgcggcctccgactcccagaggttggccggcaaggtggccgtcatcaccggcggcgccagcggcatcggcaaggggacggccacggagttcatcaagaacggcgccaaggtcatcatcgccgacatccaggacgacctcggccactcggtggcggcggagctcggcccggacgccgcgtacacgcgctgcgacgtcgccgacgaggcgcaggtcgccgcggccgtgggcctcgccgttaagcggcacggccacctcgacgtgttccacaacaacgccggcatcgccggggcgctgccgcaggacgacatggcggccgtggacctcggcgacttcgaccgggtgatggcggtgaacgcccggtcgacgctcgccgccgtccagcacgccgcgcgcgccatggcgccgcgatgcagcggctgcgtgctctgcacgtcgagcggcgcgggcgt

SEQ ID NO: 3728 - DNA, 503 bp, Oryza sativa
  Clone ID: PAT_MRT4530_10677C.1
gtctttttgaactacccttatgatagacctgttccccgtgcctccagtttactgatctagttcgattgggcaaattctagtcgatgccagggtaattataactacattgtcaacacaaagggaaccagcatatcgcaccaaatgattctacaagccaaagcgatcataattacggaactcccttatcaagtggcaaacgtcatggtcacaagccatgccaagtgtaccccgtgtcctgcgaatgtaccccgggttccgaccccacagcagtcaccggttggatgcggatggaaggcgttcttgatgatctaaatggcgctagtgtctgctgttaatgcccttgccataaagaccgctagatattacgctgcttggcctttattctagtgttataggatagcttactacatgtatggtatccctacttgaatctatgctgccacccaggagttttgaattacatggattatgccggtctatatcaaaaaaaaaaaaaaaaaaaa

SEQ ID NO: 3729 - DNA, 461 bp, Oryza sativa
  Clone ID: PAT_MRT4530_10678C.1
gggcactgctgcttacacccgccatttttaataccacgccgcgccgctcggggtggagctaaagctagtcgctgactgacgctgcccgccgtgtggccgtgcattgctgtccctgagcttgctgcctcctctcccctccgaccaccatgtcctcctctacctagaccaccaagaacaacaccacctcgccgtcgacatggtccgcaagcgccccgcctccgacatggacctgccaccgccgccgtcgaatcctgctctcctccctcccgacgccacggagccaccgccaccccccacgtcggtcggcgcgcttactccccctccggcgacatagcccgacaagcggcgccctgagcctcagtgttaggagcaggagcccaaccagccagagtcgacggagcccgccaccgcggaggaaaccgacgcctatgatcgggcctgcaaggagcggaaggaggagc

SEQ ID NO: 3730 - DNA, 613 bp, Oryza sativa
  unsure (1)..(613): unsure at all n locations
  Clone ID: PAT_MRT4530_10679C.1
actatactattatctttatatttatttgtgaacagagtacataacacggaattgtcggtgataagaggtgccattgtgcatccacagatccacttgtaagcgcagaggattaaggggggaaaggacaaaactaaaaactagttggaacatgacgagatacagagatagagatgctccagtccagcatccttattgatatgctacaatgtgaatatggattttcctgataagcaattgctacgtactagcaatagacccaatcattgaagtccaggaacacagcgccatacggaatgggcaatattctgttgccatctcctctgtttaggccattaactggacccagcccttattaacgcattcatnnngtccgtagcaagcttctttgttaggggncgngaancgggggttcatgaattnccnnagngananncntggnnncnaanttgggntagcccncnccnnttgantgnggcnntctangttnnttnanangacnttgngnncctaggttanngtgganaggatgnggnagannancntgnnnnntctatannagaaannnnnannnnangannnnannnaganngtangntgnanaatttnattagat

SEQ ID NO: 3731 - DNA, 468 bp, Oryza sativa
  unsure (1)..(468): unsure at all n locations
  Clone ID: PAT_MRT4530_1067C.1
gcggtggggtcccgcggagaaccacgacggtcgcccgcgcgncggnggcgtgattcgggcgagcaggagcggcggtcggcaaaggcgtggtgggggcgccgncggtggaggcggagtggatgacgggagcgcgacggcggaaacgtggtgggggcgcggcgatgggagcgccggcggtggaggcgtggtaggggcgcggcgaaggatgaggggagcggcgtcggcggttggatcgcgagcgcgatctgcctgtggggagaaaagcgattcgcggaggaggagcgcgcccagagcggcctagatcggggatgcggcggaggcggcgtggagcgtcggcgatggtgtggaggaggcgggatgcgacgacggctgggcggcggtcgtgggcggcgcgggtcgaggggaaggcgcgacgagggaggagggagctcggaggagtcggcggcggcggagggagtaggccgctag

SEQ ID NO: 3732 - DNA, 151 bp, Oryza sativa
  Clone ID: PAT_MRT4530_10680C.1
atggtgccccgcgcgcgatcgcgagtcgacgtgcagccgcagcaaactttgcccaccgcgtcgcgtacgtacgtcggcctcggcggcaacgtgcaccagcagcagccaccagggggcgcgcgcggcagcgaggatatcgtaaagaaatggg

SEQ ID NO: 3733 - DNA, 404 bp, Oryza sativa
  Clone ID: PAT_MRT4530_10681C.1
aagcaccgttgaacatgtgaatttgggggactcacgagtgaaacatgattgatcagataaataacgataactgcaccgatttccattaaagagttctctagtgctagtatgagatatttactcggactcagacatgtggaaatggagcaacagtatcggggcctgtacatgacactgcatgactcactcgttagaccaaaagtttttcccaaatgtatctgggatttgtctctgcctggctatcatgacagactgcttgaaacaaagggattgcatctctacacgagcatttcacgactatgcaagtgtatctccattaacacaccagactggcgcccatgcagcccggccccctgcggagctggcgcccattttcggtatgtgcacctacccatcacgcagaa

SEQ ID NO: 3734 - DNA, 393 bp, Oryza sativa
  unsure (1)..(393): unsure at all n locations
  Clone ID: PAT_MRT4530_10682C.1
accaagtccagaaattcccagggtcaaacccacagcgtccagcccaaagcgtccagcccaacgcgtccnnctagttctaagatcgcagaacggcccaccctttttttttttttttttttttttttttttgcatttctagatcaactatattaatcatcataccatattttttgctggttcatactcgacagtactacatagagaaatagagaaataacaagagcgatacaccaacacaaagcgtacaataatacagctgatgaaaacttgaaaagtatgcgtactacgcatgcattaaaccatcctcccctcgttcatcttcgccgccgccgccaccgcctccgccacgcccttcccgccgccgccgccgcgcctggccgcgtnccgcgccgc

SEQ ID NO: 3735 - DNA, 3720 bp, Oryza sativa
  Clone ID: PAT_MRT4530_10683C.1
atggcggcgacagctgcggcgctcgcggtgacggacgagctggcgttgccgctccgcgcggtgggggatctggcggccgccgcgggggtctcgcgggaggaggtggtggtcatcacgcagtgcgcctcgcttggtgggaagttaccttttgatgatgcatcagttggttctgttcttgctgtcattaagaaagtggaaaacttgggcgatctgttcataactgaaataagcagggttcttaaagctggaggcatggtgcttatacagagttccccctctgatcaggatcccaataactctattcagcgcaagctactgttaggaggatttgttgacgtgcaagcttctgctgcaagttcccaggatagcgagcattctgttactattaaggcaaagaaggtctcttggagcatgggttcggggctcttccttccagctcctctcaaagtttgaggcttttttctttttttcttgttttattttctttcttggtaggagtaacaatactagggtctcttcctctttctctctctctttatccaaggagaggaatccagaggcaaaacttcaggggtttgtaaaaatttttaggctctaaccgactaaccccaaaaaaaaaaaagaagaaatcagaggctcgagagatggaaaatcaaagatgagccacttcgccgccgccacgaagtgccttctcccagtcgccggttctcacgccgctgcgacctgcggtgggtgcgagatttcgatcttctgcagcaagcctacacgcacataaggggttcgatccaaggatagccccttttggtatttaatcaaaaaaaatttttctcttcatctgtccctgtaaactctctttgggatttagtagctaattgaattagtaggtgggaaggggggttgggattagttaggtatctgtccctagtttattctatcatgatgatgatgcttatttttggtttttgatggaattgttttttgtccatgcaaccaagaaatgcaaaggccatggagatatgtacaaaagagtggctacaagaagagagtaagagagcagcttagctttaggttcaatcagtgtgagggagacatgaatgatgtatctgtgaaatctttttctttcttttttgtatattgtaatatcttgttggatttccaatgaagcaatctgtataatatgctatgattatcaattatcatcaccactacttataaaaaaaaaaattagaaaattgaagatgctgaccaagtaaagaaagccacaaagggtcttccaaagattcagattgatgatgattctgaactgattgatgaagacagcctcttgactgaagacgacttgaagaaaccagaacttccagttgttggggattgtgaggtgggagccacaaggaaggcatgcaagaactgtacttgtggccgggctgaggctgaggagaaggtggagaagctaaatctcacatcagaacagatcaataaccctcagtcagcttgtggcaattgtgggttgggcgatgcatttcgatgtggtacttgcccatacagaggtctaccagcattcaagccgggcgagaagattgccctgcctggcaacttccttgcggctgacttgtgatgatagaaaggaacatcggcgacagcagcagataggaattggcttctttaattcgttcgtttgttaggatgttaagttgctggtcaagtatgggtgtgagtatggatagaagaggaccatttgctgtagtccctgctagttattaccactttctggttcccaggtttcatgtgtgagtgtgactcgcctatatgcgtcctgtttgaggatatctgaactaataactgagaaattaccgcactgttggttcagtggggaaaaaaaaaatataaaaggcaaggcaaacccttgtccgcaccaatagggagcaacatgaagttgttgatgggaatgaaagtttccctatggctctttatgtggtatccggtgatgaagatggtgaaagaggtggagctccagttgtttgtattgatgttgctgctcagctttgctgtgatttcaacaaaggtcaatcaacttggtcaccgattcttttgctggtccctctggttcttggtcttgacaaaattaatccaaggtacattcctttactaaaggagacgttcacatttcctcagagcttggggattttgggtggaaagcctggaacatcaacctacattgctggggtacaggatgacagggcgctctacctagatccccatgaagttcagatggcagttgatattgcagctgataacatagaggcagacacttcttcataccactgcagcactgtacgagatttggccctagacctgatagatccgtcattggctattggtttttactgccgtgataaagatgacttcgatgatttctgttctcgcgccactgagctagtagataaagccaatggagcaccactcttcactgttgtgcagtcggttcaaccgtcaaaacaaatgtacaatcaggacgatgtgttgggcatctcaggggatggcaacatcaatgtcgaggacctcgatgcctcaggcacggatgccggcggcgtcggcgtcacctacggcatgcgggggacgaccatgccgccgccggccgacgtcgcgcggttcctctcccgcgacaccatcttcgaccgcgtccggctgctggacgccgacccgcgcgcgctgcgggccttcgccggcaccggcctcgccgtggacgtcaccgtccccaacgccgacgttccgcgcctcgccgccagccgcgcgtccgcgcggcggtgggtgcgcgccagcgtcgcgccgtacgcggaggccaccaacgtctcgcgggtcctcgtcggcgacgaggtgatctcgcaggccaaccggacgctgctgctcagcctcgtgccggccatgcggaacctgcacgcggcgctggccgccgtgctgccgccgtcgccgcgccgccgcgagatcatcaaggtgtcgacgccgcattccctcggcatcctggccgcgtccacgccgccgtcggccgggcggttccacgacggctacgacaccgccgtcgtgaagccgctgctcggcttcctgcgcgcgacgggcgcgccgttcatggtgaacgcgtacccgttctacggcgggctcaccaacgagaccctcgactacgtgctgttccggggactacaacaagaacgccatccgccacctcggcttccgcgtggcacgccgctcatgccgaaccgcaccttcgagctctccatcttctccctgtttgacgagaacctcaagcccggcccggtgtccgagcgcaactttggcctctaccacgccgacatgacgccggtctacgacgccggcatcctcaccgccccgcaggagatcgtcgggacgaaggtcacgccggcgccggcgccggcgctggcgccggcggaggatgggcggcggcggtggtgcgtgccgaagccggcggcggacgaggtggcgctccaggtgaacatcgacttcgtgtgcggacaaggtggcatcgactgtggcgcgatccgggcggggggttcgtgctacgatcccaacaacgtgcaggcgcacgcagcattcgcgatgaatctttactttcaatccaacggccagcatgagtttgactgtgacttcggccagaccggcgttatcacaaccgtcgatcctagttataagagctgcaaatttacatga

SEQ ID NO: 3736 - DNA, 3222 bp, Oryza sativa
  Clone ID: PAT_MRT4530_10684C.1
attaaggcaaagaaggtctcttggagcatgggctcttccttccccctcaagaaagccacaaagggtcttccaaagattcagattgatgatgattctgaactgattgatgaagacagcctcttgactgaagacgacttgaagaaaccagaacttccagttgttggggattgtgaggtgggagccacaaggaaggcatgcaagaactgtacttgtggccgggctgaggctgaggagaaggtggagaagctaaatctcacatcagaacagatcaataaccctcagtcagcttgtggcaattgtgggttgggcgatgcatttcgatgtggtacttgcccatacagaggtctaccagcattcaagccgggcgagaaggagattgattttggtgctcctgtcgttcttggacaggagattgattttgcttcggtaatgacgagcttgcctgataggggtgtatcatcgtcttcatctgatccgttgtgcgagggtaacattgcaccttgttcttctagctcggaacagaaggaggattgtagcctgaaacaatcgaaaacctcgatcctgtcctgcgttttcaattcacctttcaatatctttgaggcgcaccaggattcgtccgcaaacaagtcgccgaaatcgtcctctggatcctatgattggttgagggtattgaggaggatcgtgtgctctggctcaatgtggcgttttctgggcacctccaaggttctcacttcaagtgatgtgtggttccttggtaaatgttacaagctttcgtcggaggagtcgtctagtgactcagattccgaaagtgggcatgccacatttcttgaggacttctcgtcaaggatatggatcacttatcgcagaggctttgatgccatctctgattccaagtatactagtgatgtgaactggggctgcatggtcagaagcagccagatgctggttgctcaggcattgattttccaccatcttggcagatcttggagaaggccctcggagaagccatataacccagaatatatagggatcttacacatgtttggtgattctgaagcttgtgctttctcaattcacaatttacttcaagctggaaatagttatggtctggctgctggatcatgggtgggtccatacgctatgtgtcgggcatggcaaacccttgtccgcaccaatagggagcaacatgaagttgttgatgggaatgaaagtttccctatggctctttatgtggtatccggtgatgaagatggtgaaagaggtggagctccagttgtttgtattgatgttgctgctcagctttgctgtgatttcaacaaaggtcaatcaacttggtcaccgattcttttgctggtccctctggttcttggtcttgacaaaattaatccaaggtacattcctttactaaaggagacgttcacatttcctcagagcttggggattttgggtggaaagcctggaacatcaacctacattgctggggtacaggatgacagggcgctctacctagatcctcatgaagttcagatgtcagcgaccgttattatctggctatttttgcagtatcccttttatgcttggaatccattttgctatggtagttacagtggggtgttctctacatctcaggcagttgatattgcagctgataacatagaggcagacacttcttcataccactgcagcactgtacgagatttggccctagacctgatagatccgtcattggctattggtttttactgccgtgataaagatgacttcgatgatttctgttctcgcgccactgagctagtagataaagccaatggagcaccactcttcactgttgtgcagtcggttcaaccgtcaaaacaaatgtacaatcaggacgatgtgttgggcatctcaggggatggcaacatcaatgtcgaggacctcgatgcctcaggcacggatgccggcggcgtcggcgtcacctacggcatgcgggggacgaacatgccgccgccggccgacgtcgcgcggttcctctcccgcgacaccatcttcgaccgcgtccggctgctggacgccgacccgcgcgcgctgcgggccttcgccggcaccggcctcgccgtggacgtcaccgtccccaacgccgacgttccgcgcctcgccgccagccgcgcgtccgcgcggcggtgggtgcgcgccagcgtcgcgccgtacgcggaggccaccaacgtctcgcgggtcctcgtcggcgacgaggtgatctcgcaggccaaccggacgctgctgctcagcctcgtgccggccatgcggaacctgcacgcggcgctggccggcgtgctgccgccgtcgccgcgccgccgcgagatcatcaaggtgtcgacgccgcactccctctggcatcctggccgcgtccacgcctgccgtcggccgggcgtgttttccactgacggctacgacaccgccgtcgtgaagccgctgctcggcttcctgcgcggacgggcgcgccgtttcgtggttaacgcgtaccccgttctacgcgcggtctcccccacgacccccttggactacgcgctgttccgggtgaacgcgggcgtcccggccgacgccaccggcctgctttacgccaacatgctcgacgcgcagctcgacgccgtccactccgcgatgcggcgtctcgggttcggcgacgtcgacgtcgtggtgtccgggaccgggaactacaacaagaacgccatccgccacctcggctccggcgtgggcacgccgctcatgccgaaccgcaccttcgagctctccatcttctccctgttcgacgagaacctcaagcccggcccggtgtccgagcgcaacttcggcctctaccacgccgacatgacgccggtctacgacgccggcatcctcaccgccccgcaggagatcgtcgggacgaaggtcacgccggcgccggcgccggcgctggcgccggcggcggatgggcggcggcggtggtgcgtgccgaagccggcggcggacgaggtggcgctccaggtgaacatcgacttcgtgtgcggacaaggtggcatcgactgtggcgcgatccgggcggggggttcgtgctacgatcccaacaacgtgcaggcgcacgcagcattcgcgatgaacctttactttcaatccaacggccagcatgagtttgactgtgacttcggccagaccggcgttatcacaaccgtcgatcctagttataagagctgcaaatttacatga

SEQ ID NO: 3737 - DNA, 590 bp, Oryza sativa
  Clone ID: PAT_MRT4530_10685C.1
tttttttttttttttgactcaaataaagtaggcaacttttcatgattttttttggaaacaaacagagctcttctttatggaaaaactggcatttacaaacaccaacagattcgcgaagttagccgaaacaatgaaagtagagtcgaaacaaaaactaggtcggtcaatacatacaccgacgactatatggcggatacccgtctcattatacagagtactaaatacagatagtgagatagatatacaagaagcttgttagtccagtattttttttggttagtttctccttccttccccgtctttccatgagtcagcataccccatgatgttgcacatcgctccaaagttgaagtacccatccatcctgtctcgcgcggtgcatgccaggtacttcacttcgatatggttgatttagttaaagaagttcgctgactcacatagggcccgaattcgatgtatgaaaaaaaattgtaccatccattcaactataacaaacgaatattattgggtcattgagggactattccacacaaccgagctcgtccaggggttaagcaatggagttgacactatccatccctgttccctcg

SEQ ID NO: 3738 - DNA, 558 bp, Oryza sativa
  Clone ID: PAT_MRT4530_10686C.1
atgacgagcttgcctggtaggggtgtatcgccgtcttcgtctgatccgttgtgcgagggtaacgctgcaccttcttcttcttctagctcggggcaggacctgaaacaattgaagaactcgatcctgtcctgcgttttcagctcccctttcagtatatttgaggcgcaccaggattcgtcggcgaacaggtcgctgaaaccgcactctggatcctatgcttggtcgaggtttttgaggaggatcgcgtgtaccggctcgatgtggcgtttcctgggcgcctccaaggctctcacttcaagtgatgtgtggttccttggtaaatgttacaagctgtcgtccgaggagttatctaatagctcggattgcgaaagtgggaatgccgcatttttagaggacttctcatcaaggatatggatcacttacaggaaaggctttgatgccatctctgattccaaatatactagtgatgtcaactggggctgcattgattttccaccatcttggaaggtcttggagaaagccctcacagaaggtgagatacatgactacctgttctga

SEQ ID NO: 3739 - DNA, 1054 bp, Oryza sativa
  Clone ID: PAT_MRT4530_10687C.1
ccgccgggccaggcccccccgcgccgcgctcgctcgctttgcaagcaaaacgccccaactctcccgcacgcacacgcgcccttccaccgactcgtcagcttagagcaccgcaagcgcgcacagcagcaaagatgtgtggcggcgcgatcatttccgacttcatcccgcagcgggaagcccaccgcgcggccaccggcagcaagcgtgccctctgcgcctccgacttctggccgtcggcgtcgcaggaagccgccgacttcgaccacctcaccgccccctgcaccttcacccccgaccaagcggcagaggagccgaccaagaagcgggagcggaagacgctgtaccgtggcatcaggcggcggccgtgggggaagtgggcggcggagatccgcgacccggcgaagggcgcgcgcgtctggctcggcacgagcgggcgggccgaggcggcggcccgcgcctacgaccgcgccgcccgccgcatccgcggggccaaggccaaggtcaacttccccaacgaggacccgccactcgacgacccggccgccgacggccacagccacggcggcgccgccatcccgtgcagggagttcatggactacgacgccgtcatggcgggcttcttccaccagccctacgtcgtcgccgacggcgtgccggccgtgccggcggaggaggcgcccacggtggcgtacgtgcaccaccacctgccgccgcagccgcagcaggacgcggggctggagctctggagctttgataacatccacacggccgtgccgatgtgagatcgatctgatgatcattcagatcgatgctagctcatgtgtttttaattatatcttcacagcagaaacaaaaaaaagttcaattcagtttattttgttgttatacgttttaaaatgtttcattaggttttcatgttataggagtgatttatcggattgaactctcaagtgaccgacttctgagttcttcgtgtaaagatgaatgctccaaggaataaaatgcaatttgtatttaaaaaaaaaaaaaaaaaaaaaaaaaaaaaaaaaaaaaa

SEQ ID NO: 3740 - DNA, 382 bp, Oryza sativa
  Clone ID: PAT_MRT4530_10688C.1
catacagttcatgccgtcaagaggaagatggctatgttctcagatacaaagcagcatcagtgtcaacctagcgctgtcgagatctttcgttgatccaggctattgataagctgaaagccccttttttggatagggttccatcaacattcagcacctgttagccgtatagagtcacagatgattcattccttaaaaaaaaaagaatatttaaacgatttgatactatacttatgcattgtctagaaatgctgggtgggatttccaccacctttcagaatatttagctgggggttatatgatgtacatcaatatgtttgtatcagatcttaaagatggtgtattcccccttccagataatatattacagtttcgtatttgatgc

SEQ ID NO: 3741 - DNA, 3651 bp, Oryza sativa
  Clone ID: PAT_MRT4530_10689C.1
atggcggcgacagctgcggcgctcgcggtgacggacgagctagcgttgccgctccgcgcggtgggggatctggcggccgccgcgggggtctcgcgggaggaggtggtggtcatcacgcagtgcgcctcgcttggtgggaagttaccttttgatgatgcatcagttggttctgttcttgctgtcattaagaaagtggaaaacttgggcgatctgttcataactgaaataagcagggttcttaaagctggaggcatggtgcttatacagagttccccctctgatcaggatcccaataactctattcagcgcaagctactgttaggaggatttgttgacgtgcaagcttctgctgcaagttcccaggatagcgagcattctgttactattaaggcaaagaaggtctcttggagcatgggctcttccttccccctcaagaaagccacaaagggtcttccaaagattcagattgatgatgattctgaactgattgatgaagacagcctcttgactgaagacgacttgaagaaaccagaacttccagttgttggggattgtgaggtgggagccacaaggaaggcatgcaagaactgtacttgtggccgggctgaggctgaggagaaggtggagaagctaaatctcacatcagaacagatcaataaccctcagtcagcttgtggcaattgtgggttgggcgatgcatttcgatgtggtacttgcccatacagaggtctaccagcattcaagccgggcgagaaggagattgattttggtgctcctgtcgttcttggacaggagattgattttgcttcggtaatgacgagcttgcctgataggggtgtatcatcgtcttcatctgatccgttgtgcgagggtaacattgcaccttgttcttctagctcggaacagaaggaggattgtagcctgaaacaatcgaaaacctcgatcctgtcctgcgttttcaattcacctttcaatatctttgaggcgcaccaggattcgtccgcaaacaagtcgccgaaatcgtcctctggatcctatgattggttgagggtattgaggaggatcgtgtgctctggctcaatgtggcgttttctgggcacctccaaggttctcacttcaagtgatgtgtggttccttggtaaatgttacaagctttcgtcggaggagtcgtctagtgactcagattccgaaagtgggcatgccacatttctagaggacttctcgtcaaggatatggatcacttatcgcaaaggctttgatgccatctctgattccaagtatactagtgatgtgaactggggctgcatggtcagaagcagccagatgctggttgctcaggcattgattttccaccatcttggcagatcttggagaaggccctcgcagaagccatataacccagaatatatagggatcttacacatgtttggtgattctgaagcttgtgctttctcaattcacaatttacttcaagctggaaatagttatggtctggctgctggatcatgggtgggtccatacgctatgtgtcgggcatggcaaacccttgtccgcaccaatagggagcaacatgaagttgttgatgggaatgaaagtttccctatggctctttatgtggtatccggtgatgaagatggtgaaagaggtggagctccagttgtttgtattgatgttgctgctcagctttgctgtgatttcaacaaaggtcaatcaacttggtcaccgattcttttgctggtccctctggttcttggtcttgacaaaattaatccaaggtacattcctttactaaaggagacgttcacatttcctcagagcttggggattttgggtggaaagcctggaacatcaacctacattgctggggtacaggatgacagggcgctctacctagatcctcatgaagttcagatgtcagcgaccgttattatctggctatttttgcagtatcccttttatgcttggaatccattttgctatggtagttacagtggggtgttctctacatctcaggcagttgatattgcagctgataacatagaggcagacacttcttcataccactgcagcactgtacgagatttggccctagacctgatagatccgtcattggctattggtttttactgccgtgataaagatgacttcgatgatttctgttctcgcgccactgagctagtagataaagccaatggagcaccactcttcactgttgtgcagtcggttcaaccgtcaaaacaaatgtacaatcaggacgatgtgttgggcatctcaggggatggcaacatcaatgtcgaggacctcgatgcctcaggcacggatgccggcggcgtcggcgtcacctacggcatgcgggggacgaacatgccgccgccggccgacgtcgcgcggttcctctcccgcgacaccatcttcgaccgcgtccggctgctggacgccgacccgcgcgcgctgcgggccttcgccggcaccggcctcgccgtggacgtcaccgtccccaacgccgacgttccgcgcctcgccgccagccgcgcgtccgcgcggcggtgggtgcgcgccagcgtcgcgccgtacgcggaggccaccaacgtctcgcgggtcctcgtcggcgacgaggtgatctcgcaggccaaccggacgctgctgctcagcctcgtgccggccatgcggaacctgcacgcggcgctggccgccgtgctgccgccgtcgccgcgccgccgcgagatcatcaaggtgtcgacgccgcactccctcggcatcctggccgcgtccacgccgccgtcggccgggcggttccacgacggctacgacaccgccgtcgtgaagccgctgctcggcttcctgcgcgcgacgggcgcgccgttcatggtgaacgcgtacccgttctacggcggtctcaccaacgacaccctcgactacgcgctgttccgggtgaacgacggcgtcacggacgacgccaccggcctgctctacgccaacatgctcgacgcgcagctcgacgccgtccactccgcgatgcggcggctcgggttcggcgacgtcgacgtcgtggtgtccgggaccgggtggccgtccgccggcgagtactgggaggtcggcgccggcgccgacctcgccaggaactacaacaagaacgccatccgccacctcggctccggcgtgggcacgccgctcatgccgaaccgcaccttcgagctctccatcttctccctgttcgacgagaacctcaagcccggcccggtgtccgagcgcaacttcggcctctaccacgccgacatgacgccggtctacgacgccggcatcctcaccgccccgcaggagatcgtcgggacgaaggtcacgccggcgccggcgccggcgctggcgccggcggcggatgggcggcggcggtggtgcgtgccgaagccggcggcggacgaggtggcgctccaggtgaacatcgacttcgtgtgcggacaaggtggcatcgactgtggcgcgatccgggcggggggttcgtgctacgatcccaacaacgtgcaggcgcacgcagcattcgcgatgaacctttactttcaatccaacggccagcatgagtttgactgtgacttcggccagaccggcgttatcacaaccgtcgatcctagttataagagctgcaaatttacatga

SEQ ID NO: 3742 - DNA, 891 bp, Oryza sativa
  unsure (1)..(891): unsure at all n locations
  Clone ID: PAT_MRT4530_1068C.1
ccggccgggctagtcgccggatcgcgtctctcccatcctctcgcgcatcctcctccgactacctcggttgggttttgggggcggctggagatgtcggactccgaggagcaccacttcgagtcgaaggccgacgccggcgcgtccaagacctacccgcagcaggctggtactattcgcaagaacggtcatattgtcatcaagaaccgcccatgcaaggttgttgaggtctccacctccaagactgggaagcatggacatgcaaaatgccactttgttggtattgacattttcaatggaaagaagcttgaagatattgtcccctcatcccacaactgtgacgtaacatacatacagatcatgctctacagatcatccnctaatcccacaactgcttgctttaactattttgttatccatgtatcatgcaggttcctcatgttgatcgtactgattaccagctgattgacatttcggaagatggatttgtgagccttttgactgagagcggcaacattaggatgacttgaggcttccaactgatgatactctgactaaccagatcaagaacggtttggtgaagaaggcaagggtatgatcttgactgtgatgtccgccatgggtgaagaacagatctgtgccgtcaaggagattggggccaaaaactaagcggctttgctcgattgcctgcctgcctacgatactttgctatcttagtgttgagagctgagacacataaatagaagttttttttatgctacctgtggatgaaatgacgatcaaaaccttcatcgattttatgttacactggatggtcctgagatacttgttaatgcttttcattatcagtttcaagtatcctttgaatcgagtggcagctgtaattcgtatagt

SEQ ID NO: 3743 - DNA, 117 bp, Oryza sativa
  Clone ID: PAT_MRT4530_10690C.1
acgcacacgcatgcgacgacgcgtccgggcagatacttatggggaagtgaggctacaatgcgtacgacaatgagcttggatggagtctaaaatgcgtaaaaagtggtattggtcaag

SEQ ID NO: 3744 - DNA, 838 bp, Oryza sativa
  Clone ID: PAT_MRT4530_10691C.1
ctgatgagcgcggcatataagatcaagatcattcttctccaaaaattctacaagcttatctgcaccaaaagtgcaggaaacacctctgtcactctctccccacccttctgagtcaggactaggatcagaccaaactaaatcacacaaaagaccatagtcaggaatctcagtgggcctctcgatatcctttatttgatccaagctattcagttcaggtgagaggccaccatgcatgcagagtatcttatcgtcaatgagtgattcatcatagaaaccatacactctgttaattttcgcatcttcatggtttccccttaacaggaaaatcttatcaggatacttcactttgtatgccagaagcaagcatatggtttccaagctttgcttgcctctgtccacataatctccaaggaaaagataagtggaagttggaggataaccgcccaaatcaaacagcctcagaagatcaacaaattgcccatggatatcaccgcagatcttgacgggggcgtggatgcccaggaggttcggctgcgacaggagcacccgcttcgcctcgacgcagagctgccggatctccgcctccgacagctgcacctgcctccccccgcgcccgccctccaagaggcgccgcaccacctcgtccaccgccgcgccttccatcgcccccatcgacgcccgcgtcatcatcatcgcgtcgcggacgggggcattggaggggcggggatggccgaggaagggggtcttggcggcgaggacgcgggaggttggggccatgatcgtggacgccatcggcggcggctgagctgctgctgctgcttctgctgctggaatcgca

SEQ ID NO: 3745 - DNA, 1714 bp, Oryza sativa
  Clone ID: PAT_MRT4530_10692C.1
atgacgagcttgcctggtaggggtgtatcgccgtcttcgtctgatccgttgtgcgagggtaacgctgcaccttcttcttcttctagctcggggcaggacctgaaacaattgaagaactcgatcctgtcctgcgttttcagctcccctttcagtatatttgaggcgcaccaggattcgtcggcgaacaggtcgctgaaaccgcactctggatcctatgcttggtcgaggtttttgaggaggatcgcgtgtaccggctcgatgtggcgtttcctgggcgcctccaaggctctcacttcaagtgatgtgtggttccttggtaaatgttacaagctgtcgtccgaggagttatctaatagctcggattgcgaaagtgggaatgccgcatttttagaggacttctcatcaaggatatggatcacttacaggaaaggctttgatgccatctctgattccaaatatactagtgatgtcaactggggctgtatggtcagaagcagccaaatgctggttgctcaggcattgattttccaccatcttggaaggtcttggagaaagccctcacagaagccgtatagccctgaatatatagggatcttacacatgtttggtgattctgaagcttgtgctttctcgattcacaatttacttcaagctggaaagagttacggtctggctgctggatcatgggtaggtccatacgccatgtgccgggcatggcaaacccttgtctgtaccaatagggagcatcatgaagctgtagatgggaatgggaattttcctatggctctttatgtggtatctggtgatgaagatggtgaaagagggggagctccagttgtttgtattgatgttgctgctcagctttgctgtgatttcaacaaaaatcaatcaacctggtctccgattcttttgttggtccctctggttcttggtcttgacaaacttaatccaaggtacattcctttactaaaggagacattgacatttcctcaaagcttgggcattttgggtggaaagcctggaacatcaacctacattgctggggtacaggatgacagggcgctctacctagacccccatgaagttcagctggcagttgatattgcagctgataacttagaggcaggcacttcctcatatcactgcagcactgtacgagatttggccctagacctgatagacccgtcattggctatcggtttttactgccgtgacaaagacgactttgatgatttctgttctcgggcctctgagctagtggacaaagccaatggagcaccactcttcaccgttgtgcagtcggttcaaccttcaaaacaaatgtataatgaggagagtagctcaggggatggcatggacagcatcaacgttgagggtctcgatggctctggtgaaacgggagaggaggaatggcagattctttagtgatgaagtggaaaaaaactgacttcacgaggaaactgaaaaaaatgttgcgtccaacacatcggtggaatgcccttgttttatgtgtgggtgaatgaatagaaatgactcgttattttagagtgtgtagagaacaagctggactgtctcaatagcccaggggagctgggaaaaatcggcgttgggtacgtgctaccgatgtaaaaatgtgatcagttcatcgctcattcgttggaaattttcttgtgtcatacgtgctcctgtggttggttatgaaaatgaatttatt

SEQ ID NO: 3746 - DNA, 1727 bp, Oryza sativa
  Clone ID: PAT_MRT4530_10693C.1
tttttttttcttttcatctaactcgagtctcaattgcttttttttttgaaacagaaaacgggttacacaattccaccaagcatatatctcatgatctaattaagatgatacataagcaaacacagctcacagcaaccaggcaaagaaaccacactaagaaactaacaaaaagaggaactactgcatccacgacaaaacacattgtgccgccaaacattgcagcggcaagataaacaaaaaaaagaggatcagaatgaatgagctgctgagtcagatagactgctgctgtacaacaatgcagtaccgcctgtggagtcaacacatatccagcgagcagcggagagcatgccactcaaggaggaaatgatattggctggagaagactaatgccatgccctggtggatccgagacataaaagagatcacccccttcgggctgacaacaattatgctttgtagcttgatataatataagttaagcgtttccagtttttggggtcttgtttgaagttggtttccttgaatgtggagcccctgtatcatttggcttcaagatttgaaaagaacacattaaactttcatctatgctcaacagagcacccgcattatcaaattccccacaatagtttggagctgaaaagattgtcactaatctcctttgcgcaaagaactcgtagccatcctcaacaacctgatgagcgcggcatataagatcaagatcattcttctccaaaaattctacaagcttatctgcaccaaaagtgcaggaaacacctctgtcactctctccccacccttctgagtcaggactaggatcagaccaaactaaatcacacaaaagaccatagtcaggaatctcagtgggcctctcgatatcctttatttgatccaagctattcagttcaggtgagaggccaccatgcatgcagagtatcttatcgtcaatgagtgctgccataggcaagcagttgaagcaatcacagaaaatcttccacagtcgaacattgaatcgcctcttacattcatcatagaaaccatacactctgttaattttcgcatcttcatggtttccccttaacaggaaaatcttatcaggatacttcactttgtatgccagaagcaagcatatggtttccaagctttgtttgcctctgtccacataatctccaaggaaaagataagtggaagttggaggataaccgcccaaatcaaacagcctcagaagatcaacaaattgcccatggatatcaccgcagatcttgacgggggcgtggatgcgcaggaggttcggctgcgacaggagcacccgcttcgcctcgacgcagagctgccggatctccgcctccgacagctgcacctgcctccccccgcgcccgccctccacgaggcgccgcaccacctcgtccaccgccgcgccttccatcgcccccatcgacgcccgcgtcatcatcatcgcgtcgccgccgccgcttgctgccgctggccctcctcctccccaccaccgccgccgcgctcgagaagagaggagaggagagagaggatacgggagaaatggggataatggcgacgacgaagacgacgacgacgatggcggcctgcgtaattatggcgatcgaaagcgcgtgaagctggatcggccgttggatcggggatggacggatggatgttgcgggggatcggggggctttcttttatggtaggcggttgggtttggcccggacgcgtgg

SEQ ID NO: 3747 - DNA, 363 bp, Oryza sativa
  unsure (1)..(363): unsure at all n locations
  Clone ID: PAT_MRT4530_10694C.1
ttgttttttggtaaatagcattcagactttgattcctttctgcacttctccaatttcacgggaaaccagacctttgcacaagctcatgctgaagcacactaataggaaaaaacgtttttctaagcgggccaaaaaatagttttctcaaaccggggaaaggggcccacgttaaaaacgaccagaccaaatagatgatttttacagggaggctaacgggccccctgcgaaaataatttaagcgcacaaaaaaaaaaaggcggcaccactcatacccgccgccggcggatggatctatgaggaagggagggagatatggttnnnnnncctcaaacacctccccccctcggggacaagacggccttg

SEQ ID NO: 3748 - DNA, 647 bp, Oryza sativa
  Clone ID: PAT_MRT4530_10695C.1
atgttccgccgcgtgacgcagcagttcaccgccatgttcaggaggaaggccttcttgcattggtacaccggcgagggcatggattgtattccagattagctaggcgacaaaacgacgcccccgattagtcctgaattcacagagattggtctactccacaccattttttttcaagtggaacggcaggcaaggagagttcttagtaattggtgtattctttacgagtgaccctgaccgtggtggccaaacaggtgaaactggatagtttacaaatgatgataactaatcaaactaagaagttgtttcccaccataaaacgggtcggtagtatggaggatccgggaacctgtaactgcaaatgattctttacagaagtcaaatagttatacatgtcatcaggcgcaacctgtaatacaaatgtataggcattctgatcagagtcaagaccatcggaaatcataacttatatactctgcagggaaagtttactccagttttgacaatttgcatagagcattacactgtatacttatttctcaaattgtatacttacaatttgtatacctgtgtgaccgtgtcacgataaacagacattatttttcgaaaaaaaaaaaaaaaaaatactcgagactagttctctcctcgtc

SEQ ID NO: 3749 - DNA, 3723 bp, Oryza sativa
  Clone ID: PAT_MRT4530_10696C.1
atggagcagaagccgtcgccgccgccgccgccgaggagcgacgaggaggaggatggattgatgggatgcgggatgggcgggacgggggatatcgccggcggtgacctggatctcatggaggagttcttgctggcgacgccggggttcgatttgtcggagttctggcatccgggggcggcgagccccttctccccgctgttcgacatcggcagcagcgtcactaccttgactacccccgcgccggcggccggcgaggacgacagggacgaggcggagatgcccagccgtggcggcggcggcctcgaggtgagccccgcgcaccgcggctggacgttccagacggcgccgcaggaggtggccgtggagccgacggtgaaggagcggctgcgccgcgcgctggagcgcatcgcgtcgcagtcgcagtcgcaggcgcagcggggcgacggggagctgctcgtccaggtctgggtgccgacgcggatcggcgaccggcaggtgctgacgacttgcgggcagccgttctggctggaccgccggaaccagcgcctcgccaactaccggacggtgtcgatgaagtaccagttctccgccgacgagagcgcgcgcgccgacctggggctccccggccgggtcttcgtcggccgcgtccccgagtggacgccggacgtccgctacttctccaccgaggagtacccgcgcgtccagcacgcgcaatacttcgacatccgcggcagcgtcgcgctgccggtcttcgagccgcggagccgagcctgcctcggcgtcgtcgagctcgtcatgaccacgcagaaggtcaactacagtgcggagatcgagaacatctgcaatgctctcaaggaagttgatctcaggagctctgatgtttcaagtgatcctcgttccaaggttgttgatgcttcttaccgagcaattatacctgagatcatggatgttctcagagctgtttgtgatacccacaatctgccactagcccagacatggataccgtgcatctgccaggccaagaggggaagccgccactctgatgaaagctacaaacattgtgtgtccactgttgatgaggcatgttatgtccgtgattgttccgtattaggctttcaccaggcttgctccgagcatcatctgttcagaggtgagggtgttgtcggcagggcatttgggacgaatgagccatgtttctccccagacattaccacctacagcaagacccagtaccctctctcgcatcatgccaaactttttggcttgagggcagcagttgccatccagctgcgaagtgtcaagactggaagcctggactttgtcttggagtttttcttgccaatgaagtgcataaatactgaagagcaaagggccatgctcaattctttatctaataccatacaacaagtatgctatacattaagagttgtgaagccaaaagagctggtaaatgatggaccatttgaaattagtcaaccaaccaggccagaattttatgccaagtctgtgcatgaagacttggatgagctctgtagtggtattaatgttcctggaaggacaacatcattggaagcatctgaggaggtatcatcatggatagcgagcttagtggatgctcagaataagggaggaaagggagaaatagatgttgacttgccattcggattcagcaaacaagatgatgaaggatttagtgttacagctggctggcatacttctccagttatggcacctgacggtagcatgttttcagggtttaagcggcatgaagattatgatgtcaaagaaaatacttgttccagtgatccaagcaattcaaactcggacaaagcagtagaaaaacggcgcactaagacggagaaaacagttagcctgcaagatcttcggaagcattttgctggtagcctgaaagaagctgcaaagaatttaggagtgtgcccgactacactgaagagaatatgcaggcagcatggaattaatcgttggccatcacgaaagatcaagaaagttgggcactccctgaagaaattgcaaatggtcattgattcagtacatggtcctgaaggaacagttcagctcagttcactctatgaaaattttaccaagaccacatggtcagaaagagagttacaaggagatgtccattttccagcatctgagcaaaactttcagctggaaccttcagttcctgatcgtccatgtgagggcagattcacttcacatacttctggctctaattccatctccccatcctgcagccagagctcaaattctagccttggttgttccagtgttccaaagactcagcaacagcatggtagtgctcctcagcttgcagtcaaagaggaaatatctatggatgagaatcagtgctccacactaatcaaatctgctagccatgcagaggcagagctgcaaatgtttgttgaagaaagacctaccatgctatttaggtctcagagtcaagtacttttaagtgaacacaaaccgatagaaaacatgtcaaacgtgcaaaaggctaggtctgattctctcaaaataaaagccatctatggcgaggaaagatgtatattccgtcttcagcctagttggggctttcaaaggctaaaagaagagatcgtaaagcggttcggcatttctcaggatactcacgtggacctcaagtatttggacgatgaatctgagtgggttcttttaacctgtgatgcagacctgctggagtgtattgatgtatacaagtcatcaagtaatcaaacagttagaatattggttaatcctagcattcaaccgttgctcaatgcttccttcggtcaaactggtctgtcttgacagtggtgttgcagcactgaaaacaatcatctcattgctccttcaggtaaagaatgcctgacgctgcctttggttgtaagtcaagatggcgtatgcaggcttcagatttggatacttgggctgaggtgcaaattaatggacagctgcctgttgatgttgcagttgaaccgtgctgtgttcttgaattggaaatgaagtaattgttgatgttccctgtcggtgcttggtattgatttgcatgctgaagttcatgcagtggagtccacgggaatagaagatggagctgtatgccttttgttcagtttcataaccataggaactttgtgtaggcagactaaactagtgtacataattgtaggtgagtaggtcagaggatgaaaataattggcatttgtcgaaatgaagctttgggatagatttagcagtcagttacagttcaaaagtttgtagctcttttggggtttcatctgactcaatagttctcaagtgttcacttcaaggtttcagcatttgaaagcctgcctcaggttacccgttacagcgtgtctgttcagccttcatgggagcatttttgcaattctgaaatgtcttcccaccagtaagcgaaagggttcacaagaaagcagttgcagtgctggcaatgaaacaagatcatcatcaaagtcgagatgaattctgttgtttttagatcagtgttagcattattgttaatacaatgttatttatatgttggagtagtttcgatgttgctcgtgtaaacctgctcttttacgggtgaagatttttttttttgtatatcatgtacagtacggtagaaatgtaagaattgtgctactttggcctggtttttcttcaaaaaaaaaaaaaaaaaaaaaaaaaaaaaaaaaaaaaaaa

SEQ ID NO: 3750 - DNA, 467 bp, Oryza sativa
  Clone ID: PAT_MRT4530_10697C.1
gccacacgtccggaggagttggagaacctgaagcatgagctgcagtgggagggcagcaaggtggcggtgctgagcaaggaggagaagatgcttctggaggcacgcatggggttcgcgcacgcccgccccatcatgagcaacgaggagtacgacgccctcaagcgcagcctgccgggcagtagcgtgtacacgctgccgagggaggggcccgtctgcacgctcggcaagcccggagagcgcggccagaagcagggcgaggctcagactgactacaccaagatgctgatgctgaccgtgccgaccgcgcttattgatggcggcacgctgattggcgccgacctgctggcgggcgctccactcatgcacctgcccgggaccgtgggcgtggtggtgtggtgcggcctcatcctgccctcggcgtacgtgctggcggcctcgttcgccaacctgctgttcaaggacgcgct

SEQ ID NO: 3751 - DNA, 120 bp, Oryza sativa
  Clone ID: PAT_MRT4530_10698C.1
atggcgcagaaatacttctggtatattatggttacagagtgtatccgcaagcgcatggatataccattgtaccatttcacccgagagtattccaagggcgcggaggaatacccgtactga

SEQ ID NO: 3752 - DNA, 392 bp, Oryza sativa
  Clone ID: PAT_MRT4530_10699C.1
gtcttctttactcctcatccataacccctacgcttgcggagccttatagaagcttccgttgcgctcgcattccgctacaatggctgagggaacctgatgcgcgtgctagtcatcgcagcctcaggacaaaatggatatgcacttgtccccatgatcgctaggggtgggatgttgggcgctgaccagcctgtgattctacacatgctcgacattccaccagctactgaatctgttaatggccttacaatggagctggttgatgctgcattccctctttagaagggaatagacagaacaactgatgtcgctgaggcccgcactggggtgaatgagaccattatgtgcagggggttccccaggaaggagggaatggaaaggaaggatgttatcgt

SEQ ID NO: 3753 - DNA, 1707 bp, Oryza sativa
  Clone ID: PAT_MRT4530_1069C.1
tttttttttttagtgaacacaagaacaaattctgacattcattgctttaattttttttatacaattacaaagctacaaactgttccactcacttccacagagtaggcatttagctcagcgacattggagatatacaactttgataaatatcatctagctatgtgaaactagaaactcctcagtggaaaaggacataacttaaaacttcacaataacatcaaagccgagtttttcatgtgagcttttctatttccaaggtttcagatctgctacaggccccgcagtccagttgagatgcttctcgcctggctttaagtatacactgtctgggtgtgggagcttccgagcaaggccgttgaggatctgatggaatgcatctctaggttgtgctggctgcggaaacaacatggcctgtttcattgatggattggcgagtaatctttgcttccttaggatatcatcaattgggatggatgtgaggattgagtctagccttggaacatcctcctcgtcaacaaaaacaccgatttcgtcccatgggattgcgtcagcaaacggaagcacaatatcatcagctatgatgactggaatgcaaccgaaaactacagcctccaccaatctagggctccatggtgcccatcccaaggggcacaagcagaagactgagcgctgcatatcttcatagtaagtagctgggtgttccgtagaaatgtcgaagaggggattgttcttgaaattctcccacagtgaagctcgggcacctcttgcataatacccaccctcagggtcattcccattgtcatagaacaggcctctgaagtaaacaaagattgaacggggagtatcaggaggaatcaagtgagcttgcattttctgaggaggcgcatatggtggtatagtgatagaaccctccttcaagcacacatggttcttctgtccaaaagtttgaaccaatgtggcacggcggagcaatggaagtatcccacgctcaatagctttctcttcctgatagtgaaagcatgccccaaaatcatgtggaacaacaaagaaatgatctgctccatcagttctattccagaatggccattttcttgaaagaaactggattgcgctccgcatcatcctaggagacttgaatggcaatggaagtccagcatgagtcaaatcacaagtagtgtaaacaggggcatagaaccaatcagcctgttcagggttgagcgttcgaacagcactagagagcaagaaacgatgcataaatatctcagcagcaaacatgtggttgaggcatcggggatccttggcgactatcctcttgttatacttgcttggcaagtcataaacaaaaaccttcaaccgcccaactggattgtcttctagcacatcaccagcacttcctgagatgcgctcggtgttcccctgagccgctcccccgaccacctcggcggcggcggcggcccccgccagcgacgagaagacgcacgcagcgacgatgagcaccgcagccgccgccgccgccgccgctgggacccgcccagcccttgcgcccaccatgagcgccgcccccccgctccacccaccagaaatgcctcgggggggagacgccgtggaagcttctagaagtcgcgagagcttgatcgctggaggaggaagcaaagggaggcagcaaaaaaagggggaagagagaagggaaaatggcaaagtggtggg

SEQ ID NO: 3754 - DNA, 1919 bp, Oryza sativa
  Clone ID: PAT_MRT4530_106C.1
atggcgcatcgcgctggctgcctctcgatgctgctcaccgccgccgtcgtgctgctggcgctggcgccgcgtggcgcggcgtacccgtggcaggtgtgcggcacgacgggcaacttcacggccaacagcacgtaccaggccaacctcgacgccgtcgcggcggcgctgccccggaacatctcgtcgtcgccggacctcttcgcgaccgccatggtgggcgccgtgccggagcaggtgtcggcgctggcgctgtgccgcggggacgccaacgccacggagtgctccggctgcctcgccacggcgttccaggacgtgcagaacatgtgcgcctacgacaaggacgccgccatctactacgacccttgcatcctctactactccaacgtccccttcctctcctccgtcgacaacgccgcctcgacgagccgcgtcaacctgcagaacgtcacgtcggacccgggcaggttcaacggcatggtggcggcgctggtgaacgccaccgccgactacgccgcgcacaactccacccgccggtacgcgtccggcgaggccgtcctcgacagggagtcggagttccccaaggtgtacagctgggcgcagtgcacgccggacctgacgccggcgcagtgcggcgactgcctcgccgccatcatagccaagctgccgaggttgttcacgaaccgcatcggcggcagggttcttggagtcaggtgcagctaccggtacgaggtaaaccccttcctcaatggcctggtgatggtgcatctgactgcgccaccgattccgacagcatcaccgcccgccgctgccgcggcggcggccggagaaggtgagtcaaagcatgcttcttttttttctttttgcttactctacaactctgctgaatcggagaatatttcaagtgtggagtcgatgcttatcgacatttcgactttacgagctgctacagggtgttttgcagaacgcaacaagcttggcgaaggtggatttggtgcagtgtacaagggtactctgcctgatggcgatgaaatagcagtgaagagattatcgaagagttcagcacaaggagtgggagagctgaagaacgagctcgcattggttgcaaagctccagcacaagaatcttgtcaggcttgtcggtgtctgcctggagcaagaggagaggcttctcgtctatgagtttgttcccaaccgcagcctcgatcagatcctctttgacgccgacaagcgtcaacagcttgattggggaaagaggtacaagatcatcaacggcattgctcgtggcctgcaatacctccacgaggactcgcagctcaaggtagtccaccgtgatctcaaagcgagcaacatcttgctcgacatgaacatgaacccgaagatctctgactttgggctcgcgaggctcttcgggcgagaccagacgcagggggtcaccaacctcgtcatcggcacatatgggtacatgtcaccggaatatgcgatgcgaggcaactactccctcaagtccgacgtgttcagcttcggcgtcatggtgctggagatcgtgacggggaagaagaacaacgactgctacaactccctgcaatccgaagacctcttaacccttgtgtgggagcagtggacggcgagggcggtgtcggaggcggtcgacccggtgatgggcggcggtttctcgtggagcgacgtgatgcggtgcatccacatcggtctgctctgcgtgcaggagaaccctgcggatcggccggtgatgtcgtcggtggtgatgatgctcggcagcgacacggtgtcgctcagggcgccgtccaagccggcgttctgtgccaggaggaacggcggcaccggcggtgccggtgccagctcggggggcacgtcgtctggtacctctgtaacagacacatcattaactgacatcatcccaga

SEQ ID NO: 3755 - DNA, 608 bp, Oryza sativa
  Clone ID: PAT_MRT4530_10700C.1
ttctcctctgcaggatcacggccggaaggggatgagtgcaggcggctggcggaggaggaggtcctgcgcggcgactggcgaagactagcggggaaagaagcagcggccgtcggagaggagcttgacgttggcagtggcagccatcggctagacccagtgggcgccgtcctctgccaggaacgcgtagcggcgagaccggacgtcgagcccggcgggcttgtcggagaggtcgagctcgacgcccatggcgtgggcctgctccccgtttccgtcgaagaggaggagcacctcatcacggcggcatcatctgcgactttgcagactcaccggcctccccgcttcgccccgtcggcctccttcccacctgccggttgcggtggcggtggcggtgggggcggcgcttgttctagcggtgagcctcctcaccatggccgtggcggccagcaccgggtcgtcgtcgtgcccacgcgacgcgctgaagctgcgtgtctgctggccagctcgcctagagaagagaagagaagagaagagaagagtgagagagagagaggaggaggaggaagggagagtggagaggaggggagagagaggatgatgatgtggcatac

SEQ ID NO: 3756 - DNA, 669 bp, Oryza sativa
  Clone ID: PAT_MRT4530_10701C.1
atgacgacaaggccgagcggcgcagagtcgtcggcgccgcctctccccatccgcaaccgcgtttgcccaccgccgccgccgctctcttccgccgacgccgcaccgctcttgcccgccgacgccgcctctccgcagccgtgctcgcccagtcgcccagagaagactataatatgcccgtgcttacggatcaaggttgcggaggagaatagcatggcagttaaccttaactttcagctcatgtggagggaggccatttggagttatcgtgttaagaaagtccaaagggtagttattttgggaatcatcatcgacataatcaaagctatgcgacgcaactcctcgcttgcggcggtaggaaagggaccacttgcgttccggtatttgcgcgacgagcgcggccgcaacggcgaattgcctctcgctcgtggcggcaccaggggctccgacctcgccttcgtgctctcgccggcgcaagtggaggatgttggatcggttgagtgtattcaagcgctggcgggtcaggccgcggttggggaagacctcgacttcgtcgggggcagcggtggacttcggcggccaccgcggatggggaagaactcggctccagcggcaactggggacgacgtcggctccagggaagaccacggctccggcggtggctggggatga

SEQ ID NO: 3757 - DNA, 668 bp, Oryza sativa
  unsure (1)..(668): unsure at all n locations
  Clone ID: PAT_MRT4530_10702C.1
accaccagagcacaagaaagcataagcacaccnagggattaactcatcactcatttagntaantaaatcttccaccatggcgcgaaagtgcggcaactgcnactgtgctgacaagagccagcgcgtgaagaaaggcacccagctatggcgtcgtctagtgaacgcagaaagccacttcagaggccccgccggagggaacgcggtgcagtgcgcaccactcgtctggacgattgnaagtgcggcagtgaaccccnccccacccgaccctcccgccccgaccccacctactaccccccttaactcccattgaggcgctcgcgccccgctcccatgtcgcccaaccgcgcgccccacaaccccccccgccccccccgcccgcctcccccccaccccccccccccccccccccccgcccccgccccccccccctcccccccccccccccccccctccgcccccccccccccccccccccccccccccccaccccccccccccctcccgccaccccctcgcgcgccccaccccccccccccccccccccccccccccgctcgccgcgccgctccccccccgcccccccccgccgcccccccccctcccctgccccccccccccccccccccccgccccctctcaccccccccacccccctccccccccccccc

SEQ ID NO: 3758 - DNA, 469 bp, Oryza sativa
  unsure (1)..(469): unsure at all n locations
  Clone ID: PAT_MRT4530_10703C.1
gttctagatcgcgagcggccgcactccaaaaaaaaaaaaaaaaaaaaaaaaaaaaaaaaagaaaaaaaaaaaaaaaaaaaaaaaaaaaaaaaaaacaaaaaaaaaaaaaaaaaaaaaaaaacacaaaaggggggccgcccaaggaggagcaaaggcgaactaccccgggcaggcaaggtaaaacttttttaaaggggcccccaaaataaaatcaaggggccggggttaaaaaacgccggaacgggaaaaacccgggggtacccaaattaaatggcttggaaaaaaacccccttttcccaagggggggaaaaagaaaaaaggcgnnaacgaacggccctcccaaaaaggggccaacccggaggggnnnngggaacccccccttaaccggccaaaaaaccccgggggggggggggtaaccccaaggggaaccgtaaaattggcaaggccctaaacccccgttcttttggtt

SEQ ID NO: 3759 - DNA, 3290 bp, Oryza sativa
  Clone ID: PAT_MRT4530_10704C.1
taaaactcaaccatgcatatctaaaccatattgtctaacaccccccgcagtcgcaacgtcgatggagcgaacgttgagactggagcgaaactcgatgaagacaagagagggaagacctttggtgaagatgtccgcatactgtgatgaagttggaacatgcaacacctggacaacacctagagcaaccttgtcacgcacgaagtgtagatcgatcttgacatgcttcgttcgttgatgctgtactggattggaggagagataaactgcgctcacattatcacaatacaccaagttggctttagacggcggggaatgcagctcatggagaagttggcgcaaccagctggctttggcaaccgcatttgccacagcgcgatactcagcttcagcactcgagcgagagacagtgttctggcgcttggatgaccatgacacaaggttgtcaccgagaaaaactgcataaccggatgtggacttgcgagtgtttggacagccggtccaatcagcgtcagaatagacaacaaggtcagtggcctgagaacgctgaatatggagaccaagatcaattgtacctcggacatatcgcaaaatccttttgagagcggtgagatagacctcgcgaggatcatgcatgtgtaagcacacctgctggaccgcatacgaaatatctggtctggtgaaagtgaggtactgaagtgctcctgcaagactgcgataatctgtaggatctgccactagtggaccgttggtcgaagataacttggcacatgtatccacaggagtggcgcacggcttgcaatctgtcatgccagcacgctccaggatatcaagactgtactgccgctgatgcaaaaacaagccggtgtccctgcgagcgacggtgacaccaaggaagtgatgaagagcaccaagagagcaccaagatccttcatggagaactcggactgcagggatgagatggtccactggaggagctgagcagaggaggtagtgagcacgatgtcatcgatatagagaagcaggtatattgtgccagagtcgcgatgaaggacaaacagggatgtgtcggacttggcctcagtgaagccaatggacagcaaaaaagtagcaaatctgctgtaccatgcccgaggtgcctgcttgagaccatagagcgatttgttcaggcggcaaaccatgtcaagtcgtgtggggtcgacgaagccgggaggctgaatgcagtagactgtctcctggagggtgccatgaaggaaagcattcttgacatcaagctggtgtattggccaatcgtgagagactgctaggctaagtacagtgcggacggtggccggtttgacaaccggactaaacgtctcatcaaagtcgatgccggggcgctgaatgaaaccgcgaagaacccaccgagccttgtatctgtcaagtgtgccgtcaaattggaacttgtgcttgaagatccacttgccggtgacgacattggcgctggatggtcggggcaccaagtcccatgtgcggttggcggtgagagcagtgaactcctcttccatggctgtttgccagtatgggtcggcgagggcagctcggtaggtgtgtgggactggagatagcatcgaggcatgaaggttcagtcgctggacaggcttgcgcagaccggctttgccacttgtggtcatggtgtgatcattgatcacgagcggtgccgtagtggagggcggtggaggagcgatttgcacgcgcaccgaccggggtcgggtgggcaccgcagcaaaggtgacgacgaaaaaggcggccggagcggaggaagacggcggcacggctcgggtcgacggggtcgacggcgttccggcggtcggcggactcggcgaggggtggacggggtcgacggcggtgcggcgaagccggaggaggcgacgccggggcgggagacggtcccggcgagcggagaaggccggccggaggtcgtcggccacggaggagagagagggcgacggcgtgagaaaatcctccaaaaagtcgagctcatcagcactgcttggagaagaaatgttagcatatgcaaaagaatgctcatcaaatacaacatgatgtgaaatgatgaccctattggtggaagggccggggcgcccctcccctctgcgggggtgtggatagccaagaaagatgcacatggtggatcggggcgagagcttatgtggggctatggcggaaaggtgaggatagcacttgcaaccgaatacgcgaagatgtgcataggaggggtgtacaccatagagggcaaacaatggggtgtggtgttgaagcgtcttggtggggtgtctgttgataaggtaggtggctgtgtgaagggcctcaacctaaaaggtgccgggaaggctagcctgaaaaaggagggagcgcacaatgttgttaatggaacgaaggatgcgctcggctttaccgttttggggagacatgtgggggcaagacatccgcatggtgacaccgttggtgaggaagaaggtgcgggccgaaatgttgtcgaactcgcggccgttgtcgcactggatgctgcaaatgttggtggagaattgggttttgacataggcaaagaagtgtgatagcgtggtaaacatgtcagacttgaagcgcaggggaaaggttcacacaaagtgagaacaatcatcaagaataactagataatatttgtaacccgaaacgctaacaactggagatatccacaaatcacaatatagaagttcgaaattggcagaagctctagtaaaggaagtggtataaggaaggcggatgtggcggccaagctggcaggcgtggcacaggccagagagcccatctttggagacgagaatgatggtgctgaggcgagcgagggcgtctaagccaagatgaccgagacgacgatgccacaaggtgccggaggtagtggtagcagtgtaggcggccggtggagatgacgaaggaggtgcaggcaaggcatggtggagggcatacagcgggccggagctattgtatttggcgatcacggtcctggtatgtagatccttcacagtaaagccaaaggggtcaaattcgacagagcaccaattatcaacgacaaaatgacgaacagatataaggttcttaatgatggcgctggcgccggtgttgccgccattgttgccgctgccgctaccgccgccgccgcgacgccggcgattgcgggagttgccgttcccaccgccggtagatccgtttccgccgccttggttcccggcgccaaacctggtagagtatgccgggttgacgttgttagccgg

SEQ ID NO: 3760 - DNA, 2795 bp, Oryza sativa
  Clone ID: PAT_MRT4530_10705C.1
atgaaccctactcagccagtggttatacatgacagacattgtgttggtttgcttcctgcaagccatattgctgccggcaatacgatgcgaatatgcgcacgagtctccgaaagctttggggctcggaaatatattttagatgccaaaagatggtgcatcatagggaaaaatatggagtcacttgagccagaagacggtgatggacaccaatcagatgctacagatgacgacttaccaccacgtatatgcactggaaaagcgtaccaagcagagatccctaatcttgccacagaggatgagcgtcgtcagtacatgagcaacacaactgatagttgcatggcacttggttatgattgccctataccaattatgtggacattaccaagtgaattcaataagaaggaagaggaaatacaaaagcagcattcttcagaaaccaaggctatagaaaatagcagagatggggatagccaaacgacctcaatttgcccaaccagtaataacacaagtggacagtgttcaacatctcaggatccgcatccagagctacctgatcagatagtatctgacagtcatcaagcacacgatgataaattggctccatgttccactcaagaaggtctaaacttcactgataaggccatggcagatcaaggagaaattgaacagtttattccagtgcctaattcatccacttccatttggagtgatcaggaagcagaattattgctccttggcctctatatttttggcaaaaatctgcatgtgttgagcagatttgtaggtagtaagactgttggggatgtgctttcctactattatggaaagttctacaaaggagaagcatataaaagatggtcagcctgcagaaaagcaaaaataaggagatgcattcttggggaacgcatttttataggttggcgaaggcaggagcttatatctcgccttaaatctaaaatccctaaagaagctcatgatctgttgcatgagatgttcaaatctttcaacgacggccaaacatcgctaatggattttgtttttcatctgaaatctgttgttggaatagaagcttttgttgaggcggttgcgatcggtaaagggaaggatgatttgactggttttgttttggacccatccaaaccaaaccaagtcctttctgttcagcccggcatgcctgcaggcaaagattgttcctctcttgcttcaggagatataatcgaattcttaacgggtgatttcagaagaagcaagacaagatcaaatgatctttttggggaagctgtctggcctcgtttgcttgcaagagggtggcactcagagaagccaaatgatgtcagcaccacgaagaattgccttgtctattcattgcgcctggtattcaaaggttttcaagaagtgaacttacaaaaggcactcattattttgattctgccagtgatgtcctcaagaaagtggtagcagaccctgttcgtcttgagctagaggttgatggaatgggcaatggtgttaatgctgagaaaaatggctttgacacagccatgaaactgaaccaagatgttcctttcgatggctatcacgagcttccaaagtttacaataatcgatactagcttggtccaaggggaagagccctcgcaagtgagggagctgaggaacttgcctgctgatgcaaatattagttttggccctttgcgtcatacacataatatggtgagtgatagttcctcagacgaacatgacacagatgacagatcatcagattacaaggaaggctacgcaggagttacagctgatgagaatggcactgaaatggtttcatccaagaatgcagacaatgaaagccaagtggactcttttcgaaatatggctgctacatcatgctcagtttttccagttaatggccattcttctaatggcaatggtgacacaattggtgcgacaagcttctttccccagaaaactaaaattgaaaagcgcaagtacttatccccagtgacgaagcgcagaagactaactagctgtagcaatgaccagaccagtcgacgcagcttttctttctcaaaaggccccggtttagaaaaagagaaagtcaagctgccatcaacttcatcaaaaccaactgctattgatgttggtggtagttttcaatccaaatcacttgcgagctgttctggcaaggagaagccatgtcagcagataaaggatgcatcaaactctcatgccaatgacagatcaaatgagaagatgaatgtggcaaggccaaaggagaagccatctgggcataaggtagatacactggcttctgttcattcgaagaccgccgttgaggatacaaaacctgccaaaggagtagctcagtctagtgatttggtggctaatcaggttaaactagaaacaccgcaggatgataagactgtcacaattgcgcacgccccttcatcagacaaccatggtagcatcctcaagaataaggagactacttccagttcaaacaccgagatcgctcatgatgccccggaggcaacaagaggaggacctgccaaccctcagcctgatcttcaggcttcttcgcaggcaatgaatcctcggaggcaaggaaccagagtcaggcctcccacggcaagagcccttgaagcggtcgcctttggcctcctcggaagcgggaagcgcaaggctgaccccactggctcgagcaggcctcgtcagcgagctcgcaagtccaccaaggaggcagcttccgtgtccaccagcagcgacaccgagaagtcgagcatgcactctggagctcggcaatga

SEQ ID NO: 3761 - DNA, 498 bp, Oryza sativa
  Clone ID: PAT_MRT4530_10706C.1
gatcccgggctgaggctttttcaatcaatggagtaatggcttactgtgccatttgctctttggacttaaacagtatgctctcgaaactgcggcaagacataattatttaaggttgggcatgtgtttcttttggttagtagctaggtgctatgtttttgggtaatggtgacaaatcgtaaagtagaaactaaaggttaatcagctgacaatggtcatcagtaattggaaattttctaagggcctcctttacatgtttgccataatccatgacaacaactttttgtaattcacggcacattgcccttcttgtctatcatctccttaaaatccattttttattctaacttcagaaaacagctgtaccacatttatggcattttcattttcttcagtggagtgtttttttaatgagaactcagtgaagtgttgttatgaaaacattctcaatgctgtgaattatgttctgaggcgcaattgaagccaaaacaataacctttc

SEQ ID NO: 3762 - DNA, 536 bp, Oryza sativa
  Clone ID: PAT_MRT4530_10707C.1
gcacgaggggctcatgggaagttaaacacctggatctgggctctttcctataggtggaaggctagatctgtgaaagattagttgtaggattttgtttttggagatgatgatttgtatcagaggctgtttctgaggacgggccaatggctctcccagtgctgcaaagaactgatttgccgttctgatccaaaaccacttcgtagattgctgtttgcaagtagaacctattttagatctgaggggggagtggtacctgtttgttgacctataaagtaattggattttgtttttgctttgttcatgttcttttggagatgatgatttatatcagaggctgtttctgaggatgagccttgagctcacccagtgctgcaaaagaactgatttgccgttctgatccaattctctttctttatttgcattttctcccttaaaagatctgcctagttaaattggtcaaattaagatggcgttgctatctgatgctttcgaatatgtgctcgagaattgagagcatctactgaaaggcttagctc

SEQ ID NO: 3763 - DNA, 861 bp, Oryza sativa
  unsure (1)..(861): unsure at all n locations
  Clone ID: PAT_MRT4530_10708C.1
cccgggctgcaggaatcggcacgagggccccgagcaccgacttgacttgttcgtcggccactttttaaaatccaaaaaagaaattcattttttttcttctcgcgatctagaacagttcccctcgccgtcgccgccaccgccaccgtgaccggcaagtgacctccgcccctcgccgcggctcgccgcccggccgccgccaggttgcctcggatgcgtggaggtctggtcgcctctgcgcggctactccctcgccctctcgtcncggtggtttctatggatgatccagacgtccttactgaaaagaaggatattaatgagaacatgttgggtggcaagaaagttaaaattatatttgttctaggtggtcctggaagtggaaaaggaactcagtgcagcaatattgtagagcattttggttttatccatcttagcgctggtgaactcttgcgtgcagaaatcaattctggttcagagaacggaaccatgattgacactatcataacggaagggaaaatcgtcccatctgagataaccataaagcttttgcaagaagccataataaaaggtggaaatgacaagtatatcattgatggatttccacggaacgaagagaatcgtgttgtatttgagagtgttataagcatatctcctgaatttgttctatttttcgattgttctgaggaagaaatggaaaggcgccttttgggtcgcaaccagggaagaagtgatgataacattgagactatcaggaaaagattgaaagtttttgtagaatccagcttgcctgtcattgagtattatgagtcaaaaggcatggttaagaagggtcaaaacttgaaattcacagtacacatggaataa

SEQ ID NO: 3764 - DNA, 1671 bp, Oryza sativa
  Clone ID: PAT_MRT4530_10709C.1
atgcatcattttgcacccacgactgttcgtgttcctcggcggcggagacgaatccgaggcgaggacggtggagctcagagaagcggagtgcgggttgaagccagccacgctggagttgtccgcagcggctggttagaaggatgttgccgcgattgcgagggaaaacagaagggccaccgtcatacggtcctgatagtgatgcattcaccattgagttgcaccatggaggtttttttgctgggtgcggtcatcttaggtcttatgttgatgaaaaaattgactggtttgactggattgattgtgatacatgggaaagatcttagtgatgggctgagggtaattgcaacagatgaagatactaatgtaatggtcagtgtagttcgcaagcacaaaagagtagaccaagctggaccaggccaacaacctgatggagatgaacagcaagaatctgatggagatgaacaacaagaacctgatggagatgaacagcaggaattgtttgacagtgactatgatcttagtgatggagatgatgacttattagaggatgctgttaacttggatatgccaaaggttagaggcaacaagaaggcaaagcgaagccatttgaaggctattgagatcagagtacctactgcagtagatgatgatgcagacacagaggatgatgccctggatcttcctgagtctgatggtgaaggagaagagagaatgagattcaattcttggaaccaagaggacatgaacaacccagctttctctgttgggcttgtctttccttcagttgagagtgtgaggaaagcaattacagagtactctgttaggaacagagtggaaatcaagcttcctaggaatgataagaaaagagtaagggctcactgtacagatggttgcccctggaatctatatgcatcttgggatagcagagtgaattcttttgtggtgaagacatattatggaaaacataaatgccagaaagagtgggttctgaggagatgcacctctagatggctggcagacaagtacatagattctttcagagccaatgagaagatgagcgttactagttttggtagagtcattcaaaaggactggaatttgacaccttcaaggagcaaggtagctagagcaagaagactgatcatgaaagtcatccatggtgatgagatcaagcagtatgactatctctgggattatgcacaagagatcaggaggagcaatcctggcagctcactgtatctgaacttagcaggaaatctgtttagtacttgcttcattgctttggatgcttgtaaaagggggtttttggctggttgcagacccctcatatgtattgatggatgccatatcaagacaaaatttggaggcaaactgttgacagcagtgggaatggacccaaatgattgcattttcccaatagcaatggctgttgtcgaggtggagtcatttgtttcttgggagtggttattagagacattgaaatctgaacttgggatagataacacatacccttggaccataatgactaataagcagaagggactaattccagctgtcaagaaggtattccctgacacagagcataggttctgtgtgagacacctgtactctaactttcaagaaaagttcaaaggcgagattaggcacctaaatgcccgttttgtgagttag

SEQ ID NO: 3765 - DNA, 502 bp, Oryza sativa
  unsure (1)..(502): unsure at all n locations
  Clone ID: PAT_MRT4530_1070C.1
ctaactaactacntggctatggcccccaccgtgatggcctcctcggccacctccntggctccattccaagggctcaagtccaccgccgggctccccgtcagccgccgctccaccaactcgggcttcggcaacgtcngcaatggcggaaggatcaagtgcntgcnagtgtggccnattganggcntcaagaaattcgagaccctatcgtacctgccaccactcnccgtggangatcttttgaancanatcgantncctgcttcnatccnagtgggtgccttgcctccagttcancaangttggattcntctaccgtgagaaccacaggtctcccnggtnctaccanngcaggtnttggaccntgtngaactgcccntgttcggctgcaccgatnccacccangtgctcnagganctccaagaagccnanaaggctaccccnatgcctttgtccgtatcatcngcttccacaacntcaggcangtgcanttgantaacttcatc

SEQ ID NO: 3766 - DNA, 1839 bp, Oryza sativa
  Clone ID: PAT_MRT4530_10710C.1
atggcgatgctggctctgccaccggccggtcacacccggcacacgggatgcaatgcaagacaagaccccgtatcgatggatcgcaggctgctcagagccgcacgcggcggccaccgcgagtggctggaggctgtacttctgggggccgctccggcgccaaaccacgtcaccgtccacgtcgccgcggccggggagccacagccacccaccgcggcggcgctgctcctggacgtggcgacgacgccgcagggagactccgcgctgcacgtcgtggcggcctccggcgacagcgaagcgttcctgagctgcgcgcgcaccatctaccgcagcgccatggccctcctggatcgcgccaacgcgaggggcgacacgccgctgcactgcgccgccagggcggggaacgcggcgatggtcaggtgcctcctcgacatggcgatggaggaggacgaggagcgcggcggcgcgaggttcagggtggccgacgtgctggagaagcagaacggccggcgtgagacggccctgcacgacgccgtcaggctcggcgacgagcgcctcgtcggccacctgatggccgtgcatccgcggctcgcccgtctccccggcggcgacgggatgtcgccgttgtaccaggcgatctcactggggcacgaccgcatcgcggagctcctgcatcagcaagggggcgacgagctctcgtattctggaccggccggccaaactgccctgcacgctgctgtcctacgcggcgcagaaatgacagaaaagataatgcaatggaacgccgggctctccggcgaagccgacgcgtccggcagcacagcgctccacttcgccgcctcggcggacggaccaaagatcgacatcgagaacagctcactcctccggtggctcctcttgccgtgcccgttccaatgccgccggacaccaaccgaacttctcctggagaccgacccgtccttggcctgccagccggacggcgacggcgactaccccatccacgtcgccgcgtccgccggcaacctgaggctcgtcgccctcttgctcgacaagtgccccgagtgcgccggcctccgcgacgcccgcgggaggaccttcctccacgtcgccgtcgaccggaggaggcaggaggtcgtgggattcgcctccgacgtcgatggacgggccaacgccctcagcggcggaaacatcaggcgcgatcacttcctgcagcggcacgtacccaagctcgacgagagcgccgagtccaagaaaatgacggagtcggcccaggtcctgggcgtcggctccgtgctcgtcgccaccgtggctttcgccgtggccttctcccccccgggaggctacgtcgcagccggcgcgccggcgctggcggggcggtacgccttcgacgcgttcatgtacgccgtggcgctggccttcacctgctccatgctcgccacgctcagcctgatgtacgccggcacggcggcggtggagatgaatgtccggcacaggtacttcaagaattccgtgtggtggatgcgcttgtcgatgaggagcctgctggtggccttcgcgctgggggtgtacctggtgctggctccggtgtcccgcgccaccgccgccggcgtctgcgccctcgccgccggcacgatgctgttcaggaacagggagctggtgctgatggtgagctgcgcgcacgtggtgcgcaggaggatggggatcagggtcgtgctcaggattggagccccgatcggcatcgacctgctcatctccaacattgtctacttgatcatcttcggtgcacccttctgcactccgctgtgcgttctaattctcttttggagggtagcgccaacagag

SEQ ID NO: 3767 - DNA, 264 bp, Oryza sativa
  Clone ID: PAT_MRT4530_10711C.1
atgggcgtgccgggccacggcgagcacaacctccttgccaccaacgctcgcctggtcaccgacgtgaggctgctcatggacgtgagcagaatggacttcgtgcccattcccatcgtcgtctccaccctcgtcgagaaccaccccaagcgaatccaacccaaggagttcgcccccggcgtcgacctcagagtggctcgagttcccggcagtgtggaaggaggggatagagagagaagagagatgggagatctaacattcacatga

SEQ ID NO: 3768 - DNA, 330 bp, Oryza sativa
  Clone ID: PAT_MRT4530_10712C.1
atgaggccggcgccatcaaattacacgacaacacatggaaagtctgcccatcctcaacaaaatgaaacccctgaccaggagaatgatgcttccgcagtcgtacaacccagtccacgaaccaacataggaaccgagtacagtgatgaaaatatgtcaccgacaattgctacatctgaagttcgaaatgaaacaccttctaatgtgtctattccttctacaatcgtcacaggtacacctgccaatgttactaatttaagtgcaatcgaacttagaagaaagcgtgatagagaggtatacgcttcactttctgctgtggtagttcattcgtga

SEQ ID NO: 3769 - DNA, 288 bp, Oryza sativa
  Clone ID: PAT_MRT4530_10713C.1
atgccgaggacaacaagttcaagtgggggagggcgttcggcggctttggtaggccaggagttgggcatcggcgtggctcaaagcagagacgtctcccaacgagaaggtcaagcggctacgatggctgaggaggccaccgtcgccacttgggtctgtcgtcatcggggaaggtattcagctgaggagggagctaacgagggtacaacggtggtgctagcggtggtcacagggtactgcatcgaagaggagatggatgttgggtgcaaccgcacacactctccttgctga

SEQ ID NO: 3770 - DNA, 159 bp, Oryza sativa
  Clone ID: PAT_MRT4530_10714C.1
ccctcgccatggcaagacaagcagggcaagcgggacgtcgactcctacaccattccggcaccaacaagtgggggacgcgtgctgatgcggcggggactcggacaaccagccgtacgtggcgcgggtggagaagatggagctggacgggcgcgggagcgt

SEQ ID NO: 3771 - DNA, 2847 bp, Oryza sativa
  Clone ID: PAT_MRT4530_10715C.1
atggactatgagcccgtgttaaaatgcctgaagaagttgcctggagttgctgtgcaagatataccttacaaaacaaggaatgttatcaagaatctccctaagttctttgccgaaagctgcgcttctgataaagaagttgacgggcttctcatgaagttgccacaacacttacgagatgcactcctaccctttcaacttgaaggtgtgaagtttgggcttcgaaggcatgggcgctgccttattgcagatgagatggggcttggtaagactctccagcatttctccctgctttctaaaatattgcaatgcacaaatgttgaaattatctcaaactatttattccaactacttcagtcaccttgtgtatcaatattgcatttgatttcactaatgatagctgctatgatatatgacatattttgtgtacatcatctaaacggttttaaaattccagagatctatctcacagtttgttttctcctaggagacaatagaccttttgacatctatcatcagataaatatgctatggccccatttgcttggcagcaataaatttgactttgcgaacaaatattgcttgctacatactgttcaaggctgcaatgggagaacttaccaggatttttcaaagggtgctcggttgacagagttaaatgttttgctcagtcagactctcatgattaggcgcttgaaggagcatttgttgaatgaactacctcccaaacgtcgacagattatttggttgaagctgaatgcatcagatatcaagacagctatatcttgtatcaaaggggtgaacactagtgatgagattcctacaattgcctcgccagacaatagcaatgactctgaggaggtgaacatggaagaagggttcaagattagtaagattggtctgtctgctccttataaacattgtgctcatttccttgtatttccttttcatttgcccacagctgatggttgcaagaaatctccaaggaatctcactacacaagaaattggtattgtgaaaatacctgggttcagcgagtggttcttaaatcatttcatcatgaaagaaccagctgataatggtagtctggactctcagtctaattgccagaaaacaataattttcgcccatcatttaaaggtcctagatggagttcaggtgtttgtcacagagcagaggatcaagtatgtccgcattgacggaagcacatctcctagggaaaggaaagatgctgtcgattctttccgtttaaatccagaggtaatggttgcaattattggaattactgctggcggtgttggtttagatttctcatctgctcagaatgttgttttcgtggagctcccaaagtcagcttcagagttgcttcagaacacattagatgagtcacattggcttcatttgaaccagagtctgttccgtgtctcatcattgatgaatggaaagaaagatgctataagagagattgaggtgcttccatggtccgtaacaattgacaaaattttccttctttctaaggttgatcaagtttaccaccttgaggaaagcagtaaatctgagggaaaatcacagcttggatttcttcctttggagaatcataatgctgattgtgggcatggaccaggagagaatgtagaaagtgatgatatgtccattgagaattttcctggcctcaacgatatgaattttgagtcagatttcttcagtattaggacaattcctcttcactttgaggatgatagccttcatacggtaatgcaaaattgtccatctccaacagcacatgaagagatagcttttgatagttcttctatctctcaagcttcagttatttgcccttcaatgtcaagcgctaaatcagtaaaggttagccagcacacaggccgaattcatttgtacatatgtgttccagggcatgattcaagacccagaccactttttgaaaacttcctgccagaagaagtagagtcacctttatgttctgataataccatgaaaacaagtaatcgtctcttgaagagggatcctgcattttgcaatacgttcaaagcgttcgtgaaggaatggttggcgcttagaccaattgagcagaagagactactgggaaagcccttacagcttcccttgagccttgagttgtgctacctgaaagataccaacaaccacagcacaaaagggttgcttaaaggaggaagtaagaggcgtgtaacaccatggtgtgatattagtaatcctttgccagaaaatgctgaatggagaaaggtggttttgcataatggtacaagtagagagagagagtacactcaaggctggactgttcacgatgaacctctctgcaaattatgtcaaggaccttgcaatggaaggcttgcaaagtcacctgaatattttgaagacctgttctgtggtctgccttgcttcgaggtgttcagatcgagaactagtggcaggtttgcacggcaggcactatttgaaattgaacatggtatatgctccaagtgtaaacttgactgtcacgagcttgtcaagaatatcagaccattatgcaagaaaaagagagaagaatacattaggaatgttgctccaaatattgcaagtagattgaaattgctagataagcttgtacatgagccaaatgagggtaatgcttggcacgcagatcatatagtgcctgtatataaaggaggaggtcacctgtgcacagcaaaaggagcgaaaagattaacaaagaaagctaaagagcttctgaaaaacaccgtcaataatcagcagaaggatgaagcaagtgaagcagcagaagaagatgataagtcgttgcttgtcgttgtccctggtagtgcctactcctga

SEQ ID NO: 3772 - DNA, 310 bp, Oryza sativa
  Clone ID: PAT_MRT4530_10716C.1
ttgcatttttttttacttgcttgatgtattcgaaagcgtcctgggttctttgtttgtaaatgaaatcttagcactcataatcaaagtttttacaataaggggtagagtatcacaagatggtggattgtagcatcaaacatggtatgtgctgctatccttcacaaatactagaatgctatgagataggccagtattcttatgggcattttctgtaagaaccagctggaaaggactgcatactttactgcggctgctgttccttaactggcagcgatagatttaagcagtaactgttaacccaccacaggaa

SEQ ID NO: 3773 - DNA, 798 bp, Oryza sativa
  Clone ID: PAT_MRT4530_10717C.1
attatttggttgaagctgaatgcatcagatatcaagacagctatatcttgtatcaaaggggtgaacactagtgatgagattcctacaattgcctcgccagacaatagcaatgactctgaggaggtgaacatggaagaagggttcaagattagtaagattggtctgtctgctccttataaacattgtgctcatttccttgtatttccttttcatttgcccacagctgatggttgcaagaaatctccaaggaatctcactacacaagaaattggtattgtgaaaatacctgggttcagcgagtggttcttaaatcatttcatcatgaaagaaccagctgataatggtagtctggactctcagtctaattgccagaaaacaataattttcgcccatcatttaaaggtcctagatggagttcaggtgtttgtcacagagcagaggatcaagtatgtccgcattgacggaagcacatctcctagggaaaggaaagatgctgtcgattctttccgtttaaatccagaggtaatggttgcaattattggaattactgctggcggtgttggtttagatttctcatctgctcagaatgttgttttcgtggagctcccaaagtcagcttcagagttgcttcaggctgaggatagagctcataggcgaggtcaaacaaatgctgtcaacatatatatattctgtgcaaggaacacattagatgagtcacattggcttcatttgaaccagagtctgttccgtgtctcatcattgatgaatggaaagaaagatgctataagagagattgag

SEQ ID NO: 3774 - DNA, 522 bp, Oryza sativa
  Clone ID: PAT_MRT4530_10718C.1
atgtcgaccaccaacgacgaagctacgacgtcgtcgtcgcctccttcagaattagatgctctcgacaccgtcgccaaggcagtcggcgacgccgttcgcttcgcgttaaagatggatcctaagaccaccttcctcgcccacggcctcgccgatttcgtcgcctccgccgccgcacgcgacgcgctctcccccatcttcgccaagttggcagccgccgagccgccgccgccgcccagtacaacggcgccgatcatcgcggcgccggcgtgggcgcccctcctgcagtttgcggcgacgcaacagataatcccgatcagtgcgaggctgttcgtgttcggcgtctccaagaagcgcaccaccgagctcgacctccgccgccacttcaagcgctacgggtatgtggccgacatctggctgcgccgtcgcggcggctacgccttcgtccagttgaggacaccctcccacgccgccctcgccctcgccgataaaaacccaggtcgtcaatggccggaagaagactaa

SEQ ID NO: 3775 - DNA, 448 bp, Oryza sativa
  Clone ID: PAT_MRT4530_10719C.1
cggacgcgtgggcggggacggccgcgtggtcgccatcggcgcggggagccacggcggcgagcaggcggtgtacctgctcaccaccggggagggcggcgacaagaacggcgcggcgcagtcgtgggcgcgcgccgcggcgccgccggagttcgcggggtacgtgcaggccgcgtgctgcgtcgaagtataacgatacgtgcaagtaatgtacgtacagaaacgtacactgtacgtacgtacatatgcgcgcgcgcgcgcgcgattgtgtatacgtttttgtgcgcaatttttatagtgtatatgtttgtgttgtacacttaaagctcagcgtttcgtatatacgatgatccgagatggagatgatcagttttgcataagctctgttttgtttgtttacttcacataagcagataagctcattgaagtctaaaaaaaaaaaaaaaaaaaa

SEQ ID NO: 3776 - DNA, 248 bp, Oryza sativa
  Clone ID: PAT_MRT4530_1071C.1
atctctatctatgaggggaaaaagctctcggatatcaccggccccctcgccagcggcgttatctccgcgtctcccgggaatatttctcccccgcgggtttcggaatgaaccccacacgcgtcccgccttaatttttctttccacgtattgtgaccaccgagttctcgtgccgtacacgtggtgaatccctcatgaccgcttttatgaattgccactcgttggtgccccaaaaaaaaaaaaaaaaaaaa

SEQ ID NO: 3777 - DNA, 695 bp, Oryza sativa
  unsure (1)..(695): unsure at all n locations
  Clone ID: PAT_MRT4530_10720C.1
aatccaaagaaaagagaaaaaggggtgacaaaacaacaagtcaaaacaaaaggaaagggagctcaagtgaggaggctgctgcatcttcttcttcttcctccctttgccttggattttccacttgcacttgcacttcctcctcctcatcagtaatccatggacaatcccgaggcggagcctgatgacgcggtgctcttcgtcggggtctccctcgtcctcggcatcgcctcccgccacctcctccggggcacccgcgtcccctacaccgtcgccctcctcgtcctcggcgtcgccctcggatcgctcgaatttggcacaaaacatggcatgggcaaactcggagccggcattcgtatctgggctaacattaatcctgatcttcttctggctgtttttctacccgctcttctttttgaaagttccttttccatggaaatacaccaaatcaagaaatgtatggcacaaatggtgttacttgctggaccctggtgtgctaatatcaacctttttcctaggctctgctctaaagctcacttttccatacaactggaactggaaaacatcattgttgcttggtggattgcttagtgcaactgaccccgttgcttgttgttgcactgctaaaagaacttggcgcaagtaaaaaggcttagtaccataattganggagaatccttaatgaatgatgggactgc

SEQ ID NO: 3778 - DNA, 666 bp, Oryza sativa
  Clone ID: PAT_MRT4530_10721C.1
tgcaattaaatctttacaacaacatcacacataactatattccgatgaaaaaaaatatttgttattcttttaaatgtgtcaactagtactgtttcgctaatacatatgtaaatgttgcacatattgttttttcaatgttccaatttgtattttataatgttccagatgtaataacttaatgttttataattacatgaaaatattttaggtaatatttcatatttgcaaatatattatatctttcatatgggtttttatgtcatttttttttatttttatgtctcactcattgagactcaatgtttcataaagtgattattggtgttacaattagtatttcttaaatgttgtatttctctgaaacactttatagactgagttagaacatttgaccaagtttttttttctaactcattgagactcaatgtatcatacagtgattattggtgttgcagttagtattttctaaatgttgcatttctcagaaacatttttatagactaaattggaacatttgaccaagatttttatgtctcactcatggagactcaatgtttcatacattcattatcggtgttgcatttagaatttcttgaatgttgcatttgtctgaaatattttatagactgagttggaacatttgaccaagtggtgaaacatttttta

SEQ ID NO: 3779 - DNA, 390 bp, Oryza sativa
  unsure (1)..(390): unsure at all n locations
  Clone ID: PAT_MRT4530_10722C.1
cttctttggtaatgacccgcngaaaaaggaaaaatcaccgggggattttgcaacagattgtgggggtgcaaacccaagggcagcgcaactgacagtcaaaagaacgccaaggcaagacgtcaaggacacaccaactcttgtaaatgagaaaatgctcacctatgcaaagcactcatgaaatttgctgacccacaccaggaagaacccattcttcgtccgatcgaactggccatgtcacaggctcctcaaggagcgcgcgttgagccaaagaaaaagtgagagccggaacaaccaccgttaggatggcgaaaggataaccaggaagaaagctcgagcaacattaagtgttactgactcttcctgaagaagttttcagtcttgaggcccaac

SEQ ID NO: 3780 - DNA, 476 bp, Oryza sativa
  Clone ID: PAT_MRT4530_10723C.1
tgcaaagctcccagccatggatgatctgtctgctcgccctctgcttgattctgttgtaatctctgccactggtgaaattgagagaaacagagagcgcttctctgctcgttccctcgtggcctggcaagtgggggctcaggccggaaaggtggagctcaacacgtttgcggatgatgtccgttcggctttcagcatcaggcgtgctgacatccagttcaccaagttccatccagaagatttcttcatcacctgctccaaccagagtgaccgagatggcatccttcgtcagccaaggctcgccactgtttcgggtagagtgtacctctttcgtccatgggatgagagcctccatggtactgaggcacgcttcaggttccgcgctcgtgtctgcattgagggcctccccatgcatggccgcacagatgaagcagctgccaaggtgatcggccgcatgtgctctattcattatattgaag

SEQ ID NO: 3781 - DNA, 229 bp, Oryza sativa
  Clone ID: PAT_MRT4530_10724C.1
atggccgaatcttccaggaactctcacacaactcctctgtgctgctcccaggaaaagatcatgggcatgtccgccactggaagccggtgctctgctgctgctgctgccggggggaatcaatggaacgccattgccgttgccagcacacttcggtcgaggcgcgcacattggccgatgctgtgggggaggagaatgatggagatcctcattcttgttggcacatgctcag

SEQ ID NO: 3782 - DNA, 342 bp, Oryza sativa
  Clone ID: PAT_MRT4530_10725C.1
atggccacagcgaagaagcacaaggccaccaccagctttagcatggaactgccgctccgcctccacctcccccccgagctcgccattggcgcctcccccaaaaaccagctccttttcaagccgcacgccgcggcagcagctgtagagcggaggctgatcagccggccagatttaggaagctggaaggcagggtcagtcgaagccggccggtgccgcgacgcgaagggacggttcggcttcacagctgtctttaccgtgatcctaataagccctaaagttattcctgcccatggagaagtagggatagtcgtaaaggctcgcatgtgcaaccccgaaaaggct

SEQ ID NO: 3783 - DNA, 988 bp, Oryza sativa
  Clone ID: PAT_MRT4530_10726C.1
tttttttttttttttgtcagttgattggctttacttccccacaaaagaaaaacaagagtttattggaattacaggtagatgaggggaagaactacactttagtggaaacaaaaaggagaacaattcagagttggaaaaaaaaaacaagttctcgatatacatcaacaagagtagttttggatttacttcaaatgatggtgaccacgaacaagatataggcaagcggcaggaacaaaaacaaacaaattttatctacactgaacaagtaaatgtcagatcgtcctggttggaatccgtcagaccgtctcagacctctgagcaagtagaagtgcctcaagttcttctctccgtttctccagctcctccagatccttgactgcttgttctcgtgatgttgctttctgctgcctagaacgcttcaacacaccaatgcacagcacacccgagattatatagatcagtccacatgcaagaagcagatagctggcaatgtcttcaagcaaaatcaaatcacccctttcaacatttgggtatgcctttgtcatgacagcaacaaagatctgtaacattccccttgcaggccagtactccaaaatcttgcagaatttcatgatgaatccccactctgtctcgaccacccccacgaacagcgagatgaccaccgcgtagcaccggaatatgcccccgaatatgtcgaggccggtgcggaaggactgcacggcggagaggacgttgacggcgacgcagagcgcggcggtggcggcggtgacgacattaaagcagcggcacacgatgaggagcgggtcggacctggaccgcgtggggcgccgccgccgcggcgtgtccccgccgccggagagctgctgctgcgcctccggcgcggcgccgccgcctcccgacgccgacgcggcccccttggccatggctagcctttagggttagggttagggttagatttccgagaagcttccagctcgaggcctcctcc

SEQ ID NO: 3784 - DNA, 238 bp, Oryza sativa
  Clone ID: PAT_MRT4530_10727C.1
gcatggcaaaggaatacacgatcgagccccgcaatgaagtagagcctttatgagatgccactaaaatgattacaatccatatagaacctttcactaaatcaatgatgataatgacatagctacagctaaacactacattgaataaatcatgctatctaccagccctgtcatacctaaaagtgctacagtatgcctaaaatgagcaacaaaaagaaaatatcgcgacgcgcagatgcta

SEQ ID NO: 3785 - DNA, 2342 bp, Oryza sativa
  Clone ID: PAT_MRT4530_10728C.1
aactagtggatccccgggctgcaggaattcggcacgaggctctcctgccatcttcagatcgcatcgattttctccttttcgagtttttttccccttcgcttgagagctttcgacgagagcgagggagagggagatcatggccggcaagggagacgggccggcgatcggcatcgacctcgggacgacctactcgtgcgtcggcgtgtggcagcacgaccgcgtcgagatcatcgccaacgaccaggggaaccgcaccacgccgtcgtatgtcgcgttcaccgactccgagaggctcatcggcgacgccgccaagaaccaggtcgccatgaaccccatcaacaccgtcttcgatgcgaagcgtctcatcggccggcgtttctctgacacgtcggtgcagagcgacgcgaagctgtggccgttcaaggtgctacccggccccggcgacaagccgatgatcggcgtgcagtacaagggagaggagaagcagttctccgccgaggagatctcgtccatggtgctcaacaagatgaaggagacggccgaggcctatctcggaagcaccgtcaagaacgccgtcgtcaccgtcccggcctacttcaacgactcccagcgccaggccaccaaggacgccggcgtcatctccggcctcaacgtcatgcgcatcatcaacgagcccaccgccgccgccatcgcctacggcctcgacaagaagtcgagcagcgtcggcgagaagaacgtgctcatctttgacctcggcggcggcacattcgatgtctccctcctcaccatcgaggagggcatcttcgaggtgaaggccaccgccggtgacacccaccttggaggcgaggacttcgacaaccggatggtgaaccacttcgtgcaggaattcaagaggaagaacaagaaggacatcacgggcaacccgagggcgctcaggcgtctgaggacggcgtgcgagagggcgaagaggacgctgtcctccaccgcccagaccaccatcgagatcgactccctctacgagggcatcgacttctacaccaccatcacccgcgccaggttcgaggagctcaacatggacctcttccgcaagtgcatggagcccgtggagaagtgcctccgcgacgccaagatggacaagagcaccgtccacgacgtcgtgctcgtcggaggctccacccgtatcccccgcgtgcagcagctgctccaggacttcttcaacgggaaggagctctgcaagagcatcaaccccgacgaggccgtcgcgtacggcgccgccgtgcaggccgccatcctcaccggcgagggcaacgagaaggtccaggacctgctcctcctcgacgtcacgccgctgtctcagggcctcgagacggccggaggcgtcatgaccgtgctgatccccaggaacaccaccatccccaccaagaaggagcaggtcttctccacctactccgacaaccagcccggcgtgctcatccaggtgtacgagggtgagaggacgcggaccaaggacaacaacctgctcggcaagttcgagctctccggcattccgccggcgcccaggggtgtcccccagatcaccgtgtgcttcgacattgacgcgaacggcatcctgaacgtctcggcggaggacaagaccaccgggcagaagaacaagatcaccatcaccaacgacaagggccgtctgagcaaggaggatatcgagaagatggtgcaggaggcggagaagtacaaggcggaggacgaggagcacaagaagaaggtcgacgccaagaactcgctcgagaactacgcctacaacatgcggaacaccatcaaggacgacaagatcgcgtccaagctgccggaggccgacaagaagaagatcgaggacgccatcgacggtgccatcagctggctcgacagcaaccagctcgccgaggccgaggagttcgaggacaagatgaaggagctggagggcgtctgcaaccccatcatcgccaagatgtaccagggcgccggagctgacatggccggaggcatggacgaggatgctccggcggccgccggcggaagcagcggaccagggcccaagatcgaggaagtcgactaaatgatcgatcttttatcgcttttagttatacctgcaataatttgtcgttcgttttacaccgaattcttgagtgctcctgcaacttttttggtacgggctttcattatggccccggttttgctttacttgttaaagtttggattattatggttttattaatatagtattgagtagcaatttataccaaaaaaaaaaaaaaaaaaaaaaaaaaaaaaaaaaaaaaaaaaaactcgagactagttctctctctctc

SEQ ID NO: 3786 - DNA, 693 bp, Oryza sativa
  Clone ID: PAT_MRT4530_10729C.1
atggactggactggtttggggcttagaggtggaggagtggaaagcaggaaaccgtcagtggacgagcagttcgctcgttttgttaaagtaatccagaagatccatatcaacgtgccattgttggatgccatgcaagtgccaacatacgtgcgttatctcaaggatatcctcaacaagaaaagaccgctcccgacaattgaggtggtcaagctgacggagcaatgcagcaatgtaatactcgacaagctcccggaaaagaagaaggatccggggtgtcccacgatcacctctctttgtgacctcggagcaagcataagcgtcattcctaaagacgtcttcgacaagctcaacttcacggtgttgacaccaacaccgatgcgcctgcaattggctgactcatcggtccgttacccagctaggatagcggaggatgtgccggtaaagatttgggatttcttcatcccggttgactttgtggtgctggacatgaacacagagaaggagacgccgctcattctggggcgtccgttccttagcaccgcggaagccaacattgatgtgggaatggggagcatccgtttccatatcaacgggaaagaagagaagttcgagttccagccgaggaccgaacaatgctccatggtctggatcaatacgggccaaacccgcagaatattcaagtggtcgaagtga

SEQ ID NO: 3787 - DNA, 1394 bp, Oryza sativa
  Clone ID: PAT_MRT4530_1072C.1
ggagagagagtgagaactagtctcgagtttttttttttttttttttttttttttttttttttttttttttttttttttttttttttttttttttttttggggttccaacttccaaatttgttcaaaaaccttctgcgtacagtacaaaaattgatatgtctgctcaagatttatttaggtaatactgtgaccaaaagaaccccacaagtcacgactcacaatcaactctgcggttcgacctacaagacatagatttcaagccgttttgtggaagagatcctggagatcaagtatgtcagcaagaactccagctgcagtggtatcattgccagctccagcgccctgaatcaccagaggggcgctctcgtagcatctgctgtatatctccaccacattgtcacttcctctcaaccttcccagtgcagagtttttcgggagttcttcaaggcccacttggcaccctgtgctttcaatcttacagacatagcgaagaacatttcctttcaaagatgctgcctttactctttcttcaatgcttttatcaagctgtactaaaccactttcaaggaagtcctttgtggacattgcatcaggtccaaattcactggggtataaactctcaacctttctagctacgtccatcccactgagatcatcacgtggatctggttctgtatagccaagagacttggcagttttcacaacttcactaaatctctttccatcctccagctcactcatcacataaccaagtgtaccactcagactgccaacaatacgagaaactggatctccagaggcaataatacgggtcacagaagctattacaggcaaaccggctccaacagtagattcaaatctcatgcgacggaagttggaaaccaacttttcgaaatcctcataagcacaagtaagcggtttcttgtttgccaatacaacacaacatccacgatccacggcatcctttagcatgccaacagtatcataagttgcagaacaatcaactagtacaagaccagttgttttcccaagaacgctggcagtgtcaatgactttcctcctagcctcagtgttgttgaatagctgacattgccctcgagagagcagagaagataagggcgagccggcggacttggcggcgcagagatcagcgaggagcgcgtcgtcgaagccgttggagtggaggtcgtcggcgacgagcagagaggagctgtcggcgacgccgagcacccggatggcgacgccctggttggcgtggagagggcggcaggagacgatgtggcggagaaggtggcggccgacgccgccgcagccgaggaggacgacggggaggaccgacctcaccggcgccgccatttgttggggcactggtgcttcacagcttcaccattttt

SEQ ID NO: 3788 - DNA, 110 bp, Oryza sativa
  Clone ID: PAT_MRT4530_10730C.1
ttccgtcgaccacgcgtcgcgttgccgacgccggaactttgcacaacgggtaacttccgctcttaccgcagttcctttacggccagactttgccgggcaccccaccggcg

SEQ ID NO: 3789 - DNA, 546 bp, Oryza sativa
  Clone ID: PAT_MRT4530_10731C.1
atggcgattccaacaaaggaggaggtggagcagaatgaggaggacaatacattttcaaggttgcaattgcttgcacaacaacggcatgccatggaggaattctggaggaggagccaggaacaaatcgaggcatctgcaggcaaccatgagcatatactaccaattgactgcgtgaagaatgtcattcgaccaaagaatgatgctatgatgctatctgctgacacaccaacttttgtgacaaaactttgtgagctcttcgtgcaggagctcaccctccgtgcatgggtatgtgccaactctcacaaccgtgacatcatattaggcacagacattgctgaggcaatcaccaccactgaatcctatcactttcttggtaatgtacttcgtagccacaaggcactaggaagtactgctcctgacatagatacttctgctaggaagcatattaagctagaccaaatgacctcactctaccatcctacccaagaaatgcaggcctcacgtttagctgggtatccaccccatgttcctatatatcctccatag

SEQ ID NO: 3790 - DNA, 657 bp, Oryza sativa
  Clone ID: PAT_MRT4530_10732C.1
gttgcctgcaggctgtcgcctcgtgcagctgcgcccccgctgccgcacgccgcctcgcacctccccgccggccgccaccctatcgagcgccgcacgccgcttgcagggagagtcggagagagtcagagagagctatgccgctgcggagtcggagagagaccgagatacggagagagccagagagcacgattcagtcagtcaagcaggctagggttttcactggttagtgggctaatgggcttcggcgttttgctatttcgtgagctgttcggtggagacgaagagcggaggcacgccggccttttttggaaggccgagtgtagggccggcctgcatatggatggggctagtccaggaatgtatggaaaaatcgaaaaaaatcacaagagtaaggataataaaaaaaagagtaaaatccatcaccggtccctaaacttgtaccgttgtgtcatcctggtccctaaactcgcaaatcgaccgtttagttcctcaaacttgttcgactgtgtcatcccggtccctaaacttgcagaccactcgtttaggagagacgaaagcgctatctctgatctcgccgggcacggattcgaggtagaaggctaccctgttgtcgactacgagtcagatcgtcagaccgccatgtcgacaacagttaga

SEQ ID NO: 3791 - DNA, 231 bp, Oryza sativa
  Clone ID: PAT_MRT4530_10733C.1
atggacctcttaagtggagcgggcagcacggccaatgagaaggcgccaggagcgggcggtgccaccgcgcatagctcagtgggcacggactccggcggcagccgcaggcgagggccacagcgagggcaggcgtgggcgacgacggtggcccttcctcgcccagatccagcagcggcggccttccccagctacgatctgtcggcggcggcaattcccatcccaatctgctag

SEQ ID NO: 3792 - DNA, 792 bp, Oryza sativa
  Clone ID: PAT_MRT4530_10734C.1
actttacggaccaaaattctttgcaactgtgcctggaaaagttccaacttggcaaagcatttttggtcagatcatgcacttgatgatggtccatggaagatgagaaggttacataagtggtacatggacgccagcaagaaaggcctaactaatttaacaattcgatcaccgcctgactgcttcgccggcgacggttacttctagctagatttcgctgatctgcacaccatctatcgtcgcgataagatggacgtaaacttcgtcggtgcatggtgcctgatgtaatacatggatgctgagaagacaaatcaatctatcggatatctggatccaacaaggatctgtcaagcacaacataccgtgacacaatcaccaaattccaagcagctcaaggacaagacgcctgaagagatagaatataagaagggcttacacaaacagaagttgattactgtcgcacaatacattggatgatccttcttacgctttcaaaataaaagagtcattctagccgcgtacaactttaacgatcattacatatgtttcattatctacccgaagcacggctccgtgacagtcctcgacccccttgattatcatcacaagacgtacaaacaatttctaacaattttacaatatgtgtacaactactacaagaaaaagggtggagagcaaattcaaaccagggagaagctgctatgtcacaagcaacctagagacatggtcctttgcagggattacgcatgcgaattcctcagggttaatgggagatacaaggttaacgcagaggat

SEQ ID NO: 3793 - DNA, 341 bp, Oryza sativa
  Clone ID: PAT_MRT4530_10735C.1
taacaactacattttagatcagagcgagtaaaaatttatgcccgttccgatttgtatggaatttataggagttttatatgattccaacccattagaaaagaatattctatagatcactttgaaacataagattacatattattttctatttcgaaacttctgatatcaagtgacaattctacatagagattttggagtagatttttcatgaggttggcatacttggggaaatttttgccagctacaacttttcctagaattcgaaactcccttagataatttagttctttattctaatttcaaagaagttgtagttgttaaattaataaaatatattttaa

SEQ ID NO: 3794 - DNA, 187 bp, Oryza sativa
  Clone ID: PAT_MRT4530_10736C.1
acaaacgggagagaaggcttataaatcttgggactcaagccacacattcaacagatggaaaggaaccgaaatagcttagatcagaaaacacgggaaacatggaagtgacgtaattgacaattattacactatttggacgaaataacctccggacccaccggacgcccggggaaacccggaaagttcc

SEQ ID NO: 3795 - DNA, 2582 bp, Oryza sativa
  Clone ID: PAT_MRT4530_10737C.1
aagtacatatgcatcgctctcaacgctgacgaccacggcgaaggtggcacatttgccatgtattctctgctctgtcagcacgcaaacattgggatccttccatccaagaagatctacactgaagaagagaacctgatctcgaatcagcctgtcgtagctggaaggcctggaagactgagaaggttcatcgaaagcagcataatcgccaggaggctgctgctgctcacagccatcctaggcatgtgcatgctcatcggcgatggcatcctcactcctgcaatctcagtcttgtcagcgattgatggactcagaggcccgttcccatccgtcagtaaacctgctgtggagggcctgtcggccgcgattctcgttgggctgttcttgctgcagaagtacggcacgtcgaaggtgagcttcatgttctcgccgatcatggcggcgtggacgttcgccaccccggtcatcggcgtgtacagcatctggcgctactaccctggcatcttcaaagccatgtcgccgcattacatcgtcagattcttcatgacgaaccagaccagaggctggcagctactcggcggcaccgtcctctgcatcacaggtgccgaggcgatgttcgcggatcttggtcacttcagcaagaggtccatccagatcgcgttcatgtcgagcatatacccttcgctggtgctgacgtacgccgggcagacggcgtacctgatcaacaacgtcgacgacttcagcgacgggttctacaagttcgtgccgcggccggtgtactggccgatgttcatcaccgcgacgcgggcggccgcgtgggcgagccagtcgctgatctcggccaccttctccgtcatcaagcagtcggtggtgctggactacttcccgcgggtgaaggtggtgcacacgtccaaggacaaagaaggggaggtgtactccccggaaaacaactacatgctgatgctgctgtgcgtgggcgtcatcctccggttccgcgaaagcaaggacatcggcaacgcgttcggggtggtggtgatcctcgtgatgctcatcaccaccatcctgctcacgctggtgatgctcatcatctggggcacccacgtcgtgctggtggcgctctacttagtgccgttcctgctcctcgaggccacatacgtgagcgccgtgtgcaccaagatcctccgcggagggtgggtgccgttcgcggtgtcggtggcgctggcggcggtcatgttcgggtggtactacggccggcagcggaagacggagtacgaggcggcgaacaaggtgacgctggagcggctcggcgagctgctgtccggccccggcttgcgccgcgtcccgggcctctgcttcttctacagcaacaggcaggacggcgggtggctcaccccggtgctcgcgcactacatcaggaacatgcggtcgctgcacgaggtgaccgtgttcctcacgctccggtacctgctggtggcgaaggtggacggcaaggacagggtgcaggccgtgcgccggctggggccagcgggggtgtacggctgcacgatccagtacgggtacgccgacgcgatcgacttcgaggaggacgacatctccgggcaggtggtgggggcgctgcgggagcgggtcgtcgacggggaggaggagggggagcgggtggaggcggcgagggcggccggggtggtgcacgtgagggggaagatgaggttccacgtcgggaaggacacgaggctgttcgaccgggtgctgctcgggttctacgagttgctgcacggcgcgtgccgctccgcgctgccggcgctcgggatcccgctgcagcagcgcgtcgagatcggcatgctctacaaggcctaacggcgccgaacgccacgcacgcgccccacgaatccgtacgtacgtacgtggccattaattaccattagcagtataacccctattattagtgtggatattatgggtaccccatacccatacggcatggttatccgaccagtcataggggataacttatatctatagaatatgtaatagatcatgactcgggtattacgtttccttatatattacggaacagcctaaagtcctggtttgataatattgtaaagtagatttaggaaaccgataccgtattggttaaggtttctatcttgtaatcctgccccccaccctatataaggtgggcaggaggccctctagggggcatgagacaacctgatcgtcagatctataatacacccggcggattcaaatccccaaacaggagtagggtattacctctcattgagagggcccgaacctgtctaaaaaaaaaaaaaaaaaaaaaatccacttttaggggctcggacgctaccccttttattattgccgaatttatgtttccacaattagctttctgggttattttgttgacgggtacatttttggctcaattatttaatttgtacaagctcctgcatatgggggtcataatattgaaatgttgttggatgccgattgggctcaccaccttgaaccaaacttggtacattttaccagaataattcggcaacaattaggggtgacttccattcaaccatttttaaaaa

SEQ ID NO: 3796 - DNA, 1567 bp, Oryza sativa
  Clone ID: PAT_MRT4530_10738C.1
atggctaccgccaccgccgcctcccgcctcgcggtggccggcgctgaacccgctcgcgcccggcgccaccgcccgacgacggtggcagtctgcgccggcgggaaccggccgtcgcgcccggcggccgtcgtgggcgcgggcggcggcgccggtccctctccggccactgccgccgtcgggccggctccgccaagtcccagcagctcgattgtagcgcgtgatccactatcagtttgtggttgaaataaaaggcggattattattccaatttctgtaggttttgcaagaagaatatataacagtgtttcaggagcttttgcgataagagggtacaacgttgaatcattgatagttgtgttgaaaaatgacaagacattatttacaattgtagtataaggaaatgagaaaattcataaaatggttgtagagcaactaaacaagcaacgataagtttaaacaggtttaagatctatcgaaggaaccataaattgaaatagagctaatgcgtttaaaactaaattgtacatctacagagcaaaggtggttgacctttctgaccacacactaactattgaggtaactggagatcctggaaaaattgttgctgtacagaggaacctaagcaaatttggaatcaaagaaattgccagaactggcaagatagctttgcggcgtgagaaaatgggagaaagtgctcctttttggcggttctctgcagcttcctatcctgatcttgaagtggcaatgccatcaaaatctcatgtcaacactgcgatgaaaacagctaaccagaattctgaagaatcttcacaaggtgatgtctatccagtggagtcatatgaaaacttcacaacaaatcaaattcttgatgctcattggggtgtcatggctgacggtgatagtctggctgttggcccagctgaaaaagaaggcacttctcggatcactactgttgtccctggaactgatgagtctattgccaagctagtacaccaactgtataagctcattgatgtttatgaggtccaggatcttactcatttaccatttgctgctagagagttaatgatcataaagattgctgtaaacaccacagcccgcagggctatcctagatattgctgatattttccgggccaaaactgtggatgtatcagatcacaccgtaactcttcagcttactggagaccttgataaaatggtcgcattacaaaggatgctcgagccctatggcatttgtgaggttgcacgaactggcagggttgcgttgcgccgtgagtcaggagtcgattccaaatacctccgtgggttttcccttcctctgtagtttgtttgtcagttggcaaagaggtcatccccatcttgtcatttcgattcaattttgttctcttctgttagaatcacaatcttgaagtgatagaatcattcgaaagcaatacaataagaaaatagtggtcacagtttgtgtcagttgtattagaaaagattcaataaaagtatttgagttggctcaaaattgttgtatctgaccattaaagctgtttatttttctagttcttatattgcat

SEQ ID NO: 3797 - DNA, 614 bp, Oryza sativa
  Clone ID: PAT_MRT4530_10739C.1
tcgtttaaactaaatgttgagccagataagagaccagaggtgatgggtttggttgacatcttcagagcaaaggtggttgacctttctgaccacacactaactattgaggtaactggagatcctggaaaaattgttgctgtacagaggaacctaagcaaatttggaatcaaagaaattgccagaactggcaagatagctttgcggcgtgagaaaatgggagaaagtgctcctttttggcggttctctgcagcttcctatcctgatcttgaagtggcaatgccatcaaaatctcatgtcaacactgggatgaaaacagctaaccagaattctgaagaatcttcacaaggtgatgtctatccagtggagtcatatgaaaacttcacaacaaatcaaattcttgatgctcattggggtgtcatggctgacggtgatccaacagggctttgttcacattctttgtccattttggtgaatgatttccctggagttctcaatgttgtaacaggtgttttctcccgaagaggctacaatattcagaagtctgctgttggcccagctgaaaaagaaggcacttctcggatcactacttgtgccctggaactgatgagtctatt

SEQ ID NO: 3798 - DNA, 282 bp, Oryza sativa
  unsure (1)..(282): unsure at all n locations
  Clone ID: PAT_MRT4530_1073C.1
gttttatgcacacgtacgccagctcggaattctgctcgagtctctctcctctaggggaaccctttcttaattttnaaccgnagncngnnagnnnncaaggggagcaagagccgcacaagccaaaaaggaacccggcgacgcccccaannnccacggagaaggacaagggngnggaggaggccgaaaaggcgaagaaagaacgggacgaaacacacaagaaaacgcaagagcacanagaggcaancgcagaccacggcaaancagcaagagcaaaagaggaga

SEQ ID NO: 3799 - DNA, 195 bp, Oryza sativa
  Clone ID: PAT_MRT4530_10740C.1
ggagaaatttttcagtgtcttgaatatgacttggggtttgggggctgatatagatattgagtctgagaagtacaggtggatgggaagtgcacgctttgatttctatgctttggttcgcataatgaacttgagaaaatactacggaagtattcagtatgttcctgccccccgctatgaagcatatggagatgtcgt

SEQ ID NO: 3800 - DNA, 661 bp, Oryza sativa
  unsure (1)..(661): unsure at all n locations
  Clone ID: PAT_MRT4530_10741C.1
gnaattgtaatacgactcactatagggcgaattgggtaccgggccccccctcgagttttttttttttttttttgcacttggactaaattgtaatttgcaactaatttcacattacataccttcccttctacacatgcatggaagaagcttatacttcagcttaaaacaacaaccatgtatatacttctttgcactgctaaacaagttggtaaactggcaaaatctgacgaagcttctcgaacagggtaaaataaaggaaaaagtacgaattaccccccaacaaccgcgacagtacgaattacccatccgaacctcaaaaccggatatttgataccctaaactattgaaaccggacaaattacccccctaacttgatttgaagcggttttcagcctacgtggcacacacgtggcgatacagtcagcaaaaacaaataaaaacaggtgggagcccacctgtcattttttctctcctctcccttctctctctcggtcaacacaggctacggtggggggcggctgacaactgcgcnatctccacccgcaaggttgtgatgggccatgcggccatgaagnaatacggaanggcccccactccggacatcactcccnggatngntcggaaccaccctccggccggacggnangggacccntcgttcc

SEQ ID NO: 3801 - DNA, 345 bp, Oryza sativa
  Clone ID: PAT_MRT4530_10742C.1
atggccgctgttgaggtgtcccttgagcatgctgaacaggctgaccaccaggtgttgcgaacccagccgatgcgttcattgaaccttgctgctgaatcggctggacaacctgctacctcaatggcgtttgctgaatcggttgtacaactcgttgaattgggggtgtttgctgcactggttgcacaacctgctgccttgggggtgtttgctggatgggctgcacaacctgctgccttggtggtggttgctgaatcggctgctgctggcaatcggggattgaccaattggcctggagccgaaggtggtacagtaggtgcaagagccgatgctggtgccatcggctga

SEQ ID NO: 3802 - DNA, 497 bp, Oryza sativa
  unsure (1)..(497): unsure at all n locations
  Clone ID: PAT_MRT4530_10743C.1
aacaaacatacagatcagaatcagaatctgatctgttcttattaattactcaaaagataaatctctggattattgcaaatttacaacacacacaacccgaatcatacattacattgtaacacatcacgcaaccattaacccaaccgtaaattacgtgctcgtcgtcaaatcatgctcatttcgccggggacgtcgaaaaccatcactgccccccggcggaggcggcaaggcgggggcagcggttgaagccctaccaaacggcgttggggagggggtccccgtaataaaagggggagggggtgtcggaggggggctcgtaaaccctgacccactggggggtccaaccgtcncggccggagcggcggaggtaaaggtaacaaaccccgtaaccgcaggggccccccacgcggaacgtgtcggtggcgcaccgtttgaacgcggccgacaacaacggttgtggcaaggaggaggagccggccacccgcgccgcgtaaacc

SEQ ID NO: 3803 - DNA, 410 bp, Oryza sativa
  unsure (1)..(410): unsure at all n locations
  Clone ID: PAT_MRT4530_10744C.1
gcctgccatcttagtgtttcgagtgaccacctgcgtcgccaggagctttacaactactggatcccccgggctgcacgaaatacggcacgacgtcccgccgcgctttgccgtcttctcgccctcgactccctccctcgtcctgcgccgatttccgcctcccctcctcctcctcgtcctgctgctgcttccgccgccctccggactgatgcgaaaatgttacctctacatggaattgctactgcaacagatggtgttgtcaacaggagtctccccgcttgtttgggatatcatcacaaagggaagacccactctatgtccaatttgaacttccagttacctcgtccttgaaatcaagacatcatcacccgggagtgttgtccttatctttccacatgttaatttccattntt

SEQ ID NO: 3804 - DNA, 268 bp, Oryza sativa
  Clone ID: PAT_MRT4530_10745C.1
aaacgcatacagaatggtggcacagaagttggtgaggcaaaggcaggaacaagcctttgaactttggcaatggcttttgctgcaacaaaatttggtgatgcatgcctgcgaaccatgcgtggtgatgctggcgttggggaatggtcatatggtgcatttgcggtgaccgaactggccgtacttgccacaaaagggaaggtaaggcgcgcctgaacccaagaaggtcttccttttgggcccttgaatgattttgataaaacctgcttgg

SEQ ID NO: 3805 - DNA, 471 bp, Oryza sativa
  Clone ID: PAT_MRT4530_10746C.1
atggggttcgtagagcttcttcgcagtagcagtagcagcagcaatggttatggttggattggagcgcagcaacccagtaccagttcgccgattcttgctgtttgctggttgatcgtcgtcgtcgtcgtcgaggctagagttcgccggcgattgctactgtcgtttggtgatgtgcaggctagaggtggagcagcatatcgcagcgccaatccatctcgttggcttcggcggcggccgacggggatgaggccagcaggttcagatcgaacgggcagcggcttcgtcgccggcgcccgaggcgccgtcgttgcagagcacggtggaagaggagccggcggggagagcaagagtccaccgtcgtcatccatggccgcaaatatggcgcccgcaccgtcggcggcggcggtggcgtggggggcggccctcctgctcccacgtcgtcgccgtcgccagccggcttgcccagactga

SEQ ID NO: 3806 - DNA, 408 bp, Oryza sativa
  unsure (1)..(408): unsure at all n locations
  Clone ID: PAT_MRT4530_10747C.1
agcaaacacgcacacgcacagccgggaggggggaggcgaggtccgcgtcgttcgcgatcgccttgggttgggttgtgtctctctctctgtctccagtgatcctgggccaaggaggcggatggacgtgcgccggggcgggggcggagggcgcatcgtcggggcggcgcggagggcgctcacctggggggcgctgccctcccgatgcggatcaccaacggcctggccatggtctccctcgtgctctcctcctgcgacctgctccgcctctgcagcgacagggagcggnccctcggcggncgggagttcgccaccgtcgtctacctcgtcagcctcttcgccaacctgacggccccgcaacaacaacggcgacgacgacgacggccagggggcttccgccggggggccccg

SEQ ID NO: 3807 - DNA, 127 bp, Oryza sativa
  unsure (1)..(127): unsure at all n locations
  Clone ID: PAT_MRT4530_10748C.1
tctncgtttatggagcaacgaccgatagcacacaccgtgacgctcacataaaagatatacacttcagaccatctacggcttcacagaaggtcatctcattaatcacctgaacaggacataccctccc

SEQ ID NO: 3808 - DNA, 395 bp, Oryza sativa
  Clone ID: PAT_MRT4530_10749C.1
gtatcgatttccccgaatcgcttaactcgtgaagtatgttgcatcgccggcgctgcggaagctatggatgaacgaaaatcatggcgtcgcactggattttaaagggttggcccgcggcacgaaaccgcactacttccttccacggagagaaccgaacgttgcatgcactgttgcttcattttctttcgataatcatgagctctgtgctactctcagctcacggtggtgataatataggtcaagggaataacagaaggcacagcggtttagatcgccaaagcggaggaggagtcgttgttgcgctgctgtggtcaccggcgagggggacttgtttgtttctggtaccagtatcgaagggaaaaagaagatgcagccgttggatgatgatggaagga

SEQ ID NO: 3809 - DNA, 947 bp, Oryza sativa
  unsure (1)..(947): unsure at all n locations
  Clone ID: PAT_MRT4530_1074C.1
acggcacgaggcccgcgctccacactctccactccccgccatggctgccgttggcgtcgtactccccgccggcgccgcccgccgtggccgccgcctaccacctacgtccccgcgccgccgcgtaccgcctaccccctacggccgtgtctacctacctccgcggcgtacttccgcgcccggtagcgccgccgccgcggaagacggcggcgccacggccgcccccgaggacgccgcggcggcggcggcggtggcggaagccgtggagggggaccccgaggccgggacggacgtcgccggcggcgccgcgacgtcgacgcggccgccgtactcgctcatctccgccgacaacgtgcagaaggcgatgcgcggcctcgcaatcacagaatgtgatcattatgggaggcttgggatcaccagatcagcttctaccgatgaggttaaagccgcctacgagaagaagtgcgaggatccggacggcaaaggattggaagaagaggaaatcaacaaggagcatgacctcctaaaggaatcttttaccatactatggaccgaggaagagagaagattatacgattggagtttggcaagaagtggaaagcctgagcgatatgtctggcctttcgaagtcgatcccatggagctagcaccagatcctccaaaggaaccagaagatgagttcccaacaaagctggttggctactttttcctggcatggttcatactatctgttgccttgtcagtaaccctcaacagatgatgagtagctgtagttgtaatccagcactcctttcggcgtcccatgaatgctctgcatgactacatgtatactgattatggtaactaaagaaaagcgcgtaaaaatcgctgaatgcgtatgtacagatcatgtttatatgtctctaaatctttcaaggaatcgatgaaccattttataccnatgcaaatga

SEQ ID NO: 3810 - DNA, 183 bp, Oryza sativa
  Clone ID: PAT_MRT4530_10750C.1
atgctcgaactctattttcccctcgctcgagctcagaaggcggaaaatccgcgtgacgagctcaggaatgctcgaactctattctcgttcgagctcaaaaagcggaaaatccgcgtgacgaggaatgctcgaactcgattcccgttcgagctcaaaaagcggaaaatccgcgtgacgaggtaa

SEQ ID NO: 3811 - DNA, 432 bp, Oryza sativa
  Clone ID: PAT_MRT4530_10751C.1
cggacgcgtgggtctcgccaagctcttcctcttcctcttcctcttcctcctcctcgccgcgtgccgagaagatggggaagcggtggatccctctcgaggccaaccccgacgtcatgaaccagttcatgtgggggctgggagtcgccgagggggaggcgcagttctgcgacgtctacggcctcgacgacgagctgctcgccatggtgccccagcccgtgctcgccgtcctcttcctctacccgctcacttccctggacgacgacgaggaggaatcaggcgctgctgccacttccacggctggggacaaggatttgagcaagagggtatactttacaaagcagactgttggcaacgcatgcggaacagttggtgttatccatgcaatagggaatgctgcatccaaactcaagctggttgagggatcctattttg

SEQ ID NO: 3812 - DNA, 1245 bp, Oryza sativa
  Clone ID: PAT_MRT4530_10752C.1
agggaaaattgaaaccatgccattataatttggataagcttgacattgtgatccgttcatcttgcatcgatgtataaaaacgacaaggaaatcatgtataaatcgctctagtaactaagtactccattcaaaaccaaaacaggaagattttaaatctgtgataacctctcgattgacaaaacgtgaatacatcatccaaacacattggtctatgatctaaaacccctgcaaagagcaagcaaactacttttattcaactgtagttcctcatttttcccccttcggtagtatgcctatggaaatgaaaaaggtctaacgctcatttatcttacacaactttcgaaagagccatgacgttgaagttcattgagtcagggttggacgcaattctggctttgatgacttttgcagcatcctgtaacaaagtatctggtgatgaagggccatgacatattggttgcgattttcgtccatcaagctcataaagttcaccatcaacacaagagaaacatacaaagtgctcgttcacctcaacattagcatcagtgtcgccagccgaagcagcaacggaatgagcatcctccatctcatcatcctcctcaagaaaggcagcacgctggactggatccatatcaacagtttgtttataaaatctatcaaaataggatccctcaaccagcttgagtttggatgcagcattccctattgcatggataacaccaactgttccgcatgcgttgccaacagtctgctttgtaaagtataccctcttgctcaaatcccaggtgttctgtattgttagtaaaaggctaaaagcacattgatgcaacctcagaactaacacatctagttcagcaaattctacaatagtagattcaactagcaaaatttccagtacagtaatagtgcaatccttgtccccagccgtggaagtggcagcagcgcctgattcctcctcgtcgtcgtcctgatcaccccacgaagcagcattcatcaccctctcgacaccacgtaaatccacaaaaaccagggaagtgagcgggtagaggaagaggacggcgagcacgggctggggcaccatggcgagcagctcgtcgtcgaggccgtagacgtcgcagaactgcgcctccccctcggcgactcccagcccccacatgaactggttcatgacgtcggggttggcctcgagagggatccaccgcttccccatcacgcgtccgcggacgcgtgggcgagacgcgtggg

SEQ ID NO: 3813 - DNA, 353 bp, Oryza sativa
  Clone ID: PAT_MRT4530_10753C.1
ttttttttttttttttttttttttttttttttttttttttttttttttttttttaaataatttttttattgaatactataaaaaaatgttcgcaatgaataatccgaaaaatcggaaccgggggttaaaccagaaattcttgaccgataacgggaggttttacaatttggcttaaaatgggccatattagagctcgggataaaaaaggaatacggtgacaattgaagaaaaatgacgacccggaacaattaaaaacaaagtctggggcgcaaacataatgggctaactcagattattttaatgggcgtcactacccactttaaaggcggtaaacatactggcccatttcaatt

SEQ ID NO: 3814 - DNA, 672 bp, Oryza sativa
  Clone ID: PAT_MRT4530_10754C.1
atgccctcgccctacacccgctcccagctctccgagaagctccgccgcctcaagaacaagttccgcggcatgtccgcccgcgtcgcacggggcctcgaccccgcccgcctcgcgccgcacgaccgcgacgtgctccacctctgctcccgcctctgggacccgccaacgccgccacctcgcccttcgccgccgccggtgacgcctcctcggggaacaagcgccgccgcgccgccccgcgcgccgggccgctcatgcccccggatccctcaggggacagcaattcccatgattacaacggcggaaagtgggcactttggttatcatggagatgtcgcgattgcggctgacggaagccttgatgggattgtgaaggtgcagcctgagactcttcctgccctccccagtatcggggacattgcggttcacagtgagaatggcaacggcaaggccgtggtgccacgtagcaatgagcatcacatggcaaatgccgtgctggatatatttgaggagtgcttgcgagaggtgaaggccaatggcattacctacggtgctaatgtgaatgggggcagtgaacttgcaaggcgatggagagcacagaggattgatgagcttgatgtgttgagccggaggctaaggttgcttgttgaggatgctgcaacggctggtcgctaa

SEQ ID NO: 3815 - DNA, 1445 bp, Oryza sativa
  Clone ID: PAT_MRT4530_10755C.1
cgcttttccgcaacccaaccccctcgtggcctcggggggcctgtgtagctcgctcgaggccgtgcgcgcgcgcgctaggtcgccatggcctcggaccaaaccctccccgtcccggtctcggtcgagctgccccccgccgcgcccaaccctcctgacccgaccgcacccctcctcccgcacgcggacgacccctccgcaccccccgccgccgccgccgccgcccgcaagctccccgtcaagcgccgctccccgccgccgcgcccctcctccccctcctcctccgacccggcctcctccgaccccgccgccaagcagcagcctcagcagccgccgccgccgttcaagttccagcggatttggtccgagtccgacgagctccgcttcctgcagggcctcctcggctgcggcgcgcaggggctcgtcttcccgcgggacctcaacgtcttctacgaccgcttctccgagtccatgccctcgccctacacccgctcccagctctccgagaagctccgccgcctcaagaacaagttccgcggcatgtccgcccgcgtcgcacggggcctcgaccccgcccgcctcgcgccgcacgaccgcgacgtgctccacctctgctcccgcctctgggaccccgccaacgccgccacctcgcccttcgccgccgccggtgacgcctcctcggggaacaagcgccgccgcgccgccccgcgcgccgggccgctcatgcccccggatccctcaggggacagcaattcccatgattacaacggcggtattagcgccggtgcgcccggcgcatttggggatgggcacggtggtgaggaaatgatgtatcttgagcaggaaagtgggcactttggttatcatggagatgtcgcgattgcggctgacggaagccttgatgggattgtgaaggtgcagcctgagactcttcctgccctccccagtatcggggacattgcggttcacagtgagaatggcaacggcaaggccgtggtgccacgtagcaatgagcatcacatggcaaatgccgtgctggatatatttgaggagtgcttgcgagaggtgaaggccaatggcattacctacggtgctaatgtgaatgggggcagtgaacttgcaaggcgatggagagcacagaggattgatgagcttgatgtgttgagccggaggctaaggttgcttgttgaggatgctgcagcggctggtcgctaagcggacatactggtggttttggtgacgtgcttccgcccttcaccccatgtgtataaaatattaaaatctagattattatgctatatgcttttgtagttcctcactcagcttgggccttgccttagtcagcctaatatgcctattatttatgcctatgtacatcgtctacggatattgccttttagtttaattatttcatcagcataatatatacggttccagcattgttatct

SEQ ID NO: 3816 - DNA, 262 bp, Oryza sativa
  unsure (1)..(262): unsure at all n locations
  Clone ID: PAT_MRT4530_10756C.1
atgctcgccgccgatangtnanagtcctgggtctggtcccagatcaaggccgaagcgcgccgccgacgccnacgccganccggggctcgcgtccttcctctacgccaccgtgctctcctanatgtgcctcccgcgctccatctccttccacctcgccaacaagctctgctcctccntccngctctcnanctcctctncnactcgtcctggcttccttcacngggcaacccncctncgggcccnccttcctccnccgacctcc

SEQ ID NO: 3817 - DNA, 529 bp, Oryza sativa
  Clone ID: PAT_MRT4530_10757C.1
acctgaccactgcatccgcggtcgaccagctcattctgcttgtcgttctctcatattgcggcgggccgtacgaggtatgacgccgacactgggcaggtgcgccttgacattctcgctagctgcgtgagacgcgatgctctgactgcacagagccattatatgtttacctggtgagccttcaccctcacaagccgtggcgccgtgctgctgctgagcagagctgatcgcgagactgcctgttgcttctccatatctcgtgcaccacaaaggcttaagaggcgctggatcctgatgtatagacagcactacttgaaggctacgtctatgatgctgcctcctgatagtgatgtcgtcgctgtggtcacgatgtgcagctatgatacaacctggacacattacaatcacctgctgggattgctgctgagacagtagtacctaaagagaatcattttgcacgaacgatgttgcacataccattgagcaggacacatgctgactgatcagaaccggctcgccacagtgatgcctg

SEQ ID NO: 3818 - DNA, 561 bp, Oryza sativa
  Clone ID: PAT_MRT4530_10758C.1
ccgggctgcaggaatcgcacgaggttttttttttttttttcgtcttggatggttagttcacttgactagtctgaactttttctccttagaatggcaatcatgttctgtttaccaaaaggtacttgaattataagaagtaacagaagtaatcactggaatcactaccatgctgtacatctgaccgccagcattattccttttgatgaaagtaaagagctggaaaaaggctacccaaatctcttgtcaaataagagcaactaagactaaatgcagcctactccctttcaaaaagctagtatgcagcttacagattgaacataagttcattggttgttcaccaagaacaagaactcgctcaagtgcaaccctatcagctattccagaatgagtacaatccgctacttttccctcaaaattgctgctgccataggtgtcccaatttccggctccgggcaaaaacaattgtggcagcatctattgattcatctagtttgcgcatccattttctgtcctgttagatggcttgtttagggcccctccagcagagcaaatgtgagccaa

SEQ ID NO: 3819 - DNA, 782 bp, Oryza sativa
  Clone ID: PAT_MRT4530_10759C.1
atggccatcctatcaagaagttcttgcaggaccttggccaggtccccaaagtacctatttttaccaccttgcaatgcaaattttctccaaatggtcagttttttctatgcaaactgtgcaaatttgtggtgttctctattttgtcacagcctgacagcaagctgaatcctggtaaatcttcagtgttggatagtgtggtggggatggatttcttactaagtgattcaggtatgtttgtaggtgctgatggaaaaacaaggtacatggtgctgatggaaaagatcgtgtggtcacatttgatgggaaatatcttccatgtactatgcaggtccatgttgttggagaagagccagttgatatccgtgcgactattcccagagcccggctggctggacaaggagctcccactgctcgccagcttggttctgcgcatctcctaggtctgcccctcctaggtctacccgccgcaccggtcttatatctcctctgagatttcaagagatgaagtgacgctgagtgtatccacacgaatctgaccgcatgggtctggctttctaagaatcgaccaattcactaattcaatatgactttttattatgacatcgctcttcatggtgtaaccaatgctcatactatacagacattaaagcaatctgtaagattaatattttttctattatttctaccttgttgtatacatgaaatgatttgtacgagtaagttatgcatgaaaatatcacgttcatactcactgtaagaaaaaaaaaaaaaaaaaaaaaaaa

SEQ ID NO: 3820 - DNA, 456 bp, Oryza sativa
  Clone ID: PAT_MRT4530_1075C.1
gggatccaacttccaaatttgttcaaaaaccttctgcgtacagtacaaaaatggatatgtctgctcaagatttatttaggtaatactgtgaccaaaagaaccccacaagtcacgactcacaatcaactctgcggttcgacctacaagacatagatttcaagccgttttgtggaagagatcctggagatcaagtatgtcagcaagaactccagctgcagtggtatcattgccagctccagcgccctgaatcaccagaggggcgctctcgtagcatctgctgtatatctccaccctgctcacactcgtaggctcttttgttttcaccacattgtcacttcctctcaaccttcccagtgcagagtttttcgggagttcttcaaggcccacttggcaccctgtgctttcaatcttacagacatagcgaagaacatttcctttcaaagatgctgcctttac

SEQ ID NO: 3821 - DNA, 201 bp, Oryza sativa
  Clone ID: PAT_MRT4530_10760C.1
atggcttccactggcgatggtgcaccaggagctggagggaacggcggcgctccaggcgacaacaccaacggaggcaattctgcctcacaatccagcggagggacattcactgggggcacgggcacgttccccaccgggcgcgtacggacggtggccgcggcggcgaagcacccgtcgagcgaggaagacgcacatgcatga

SEQ ID NO: 3822 - DNA, 180 bp, Oryza sativa
  Clone ID: PAT_MRT4530_10761C.1
catgcatgagagcacactcatacagcgctgaccgagaacaatatgcttacatactggaacagaatggatgggatctcctgattgacgccagaggagactgccctcgacttagacgcattggacacctatagaagcatgcaaatctatctggcacatggagatatatatggtggaaagcgc

SEQ ID NO: 3823 - DNA, 150 bp, Oryza sativa
  unsure (1)..(150): unsure at all n locations
  Clone ID: PAT_MRT4530_10762C.1
ctggggtcgggttttaaanaaactatattcctttttgtttagagaataaaagagacacagttacaatattcatcaaacctatttatgcattggcagntggcaagggtggactccaattgggaaaaaaaagcaactacagtgtgtagattt

SEQ ID NO: 3824 - DNA, 358 bp, Oryza sativa
  Clone ID: PAT_MRT4530_10763C.1
atggtgggttgtgagcacatggttttgagagtcgtgctcatgacaattaaggaccggttcacgagtttctgttgtgaaacattaaccgtgccaaccacaagccagcgtgggcaacggctttaccttttgtatagcatggttcattgcggagcaccaatctgagaagtggcggagataagcccacgggagtcgctggggagtccatgccttgtttataagagggtgattatgatccaggaaaggtgccctgtggtggattgtgttgtgcgaggggtattgtcacagctcctttccgaggtaccagggagaggtcccaaaaaccttattgctaccttctcccggtgcaggacgtcgaagg

SEQ ID NO: 3825 - DNA, 266 bp, Oryza sativa
  Clone ID: PAT_MRT4530_10764C.1
tttgtttccacgttggtaaattgatgaggtgtgaaaatgatggtccaagtggtgaatgataatgtaatgaggatttccattgcgcacgaccaccacagtttgtgatgctgcatttttggtgttaaccaaattttgatttggcaccacttgattgatgtgtggttgcactgtggtgaattgaaatgatgggctggggaaaatgaagtgagggagggaggacccatgatgaacatcttcctacaatcttctgtatgattacatctttc

SEQ ID NO: 3826 - DNA, 259 bp, Oryza sativa
  Clone ID: PAT_MRT4530_10765C.1
atggtgggttgtgagcacatggttttgatggtcgtgctcatgacaattaaggaccggttcacgattttcggttgtgaaacattaaccgtgccaaccacaagccagcgtgggcaacggctttaccttttgtatagtgtggttcattgtggagcaccagactgagaagtggcggagataagcccacgggggtcgctggggagtccatgccttgttttataagagggtgattatgatccaggaacgctgtactgcttttaat

SEQ ID NO: 3827 - DNA, 261 bp, Oryza sativa
  Clone ID: PAT_MRT4530_10766C.1
tctgatgataggtgtgtctggggcccgcacagcgcgctgacccacttggatggtgatgtgcacacgagtatgatacgccttggccgacaggcccgggtaatcttgggaaatttcatgcgtggatggggatagatgcattcgccattgttggtcttgcaacgaggaatgcctgagtaagcgcgaggtcatcagctgcgcgtgggagctgacgtgccctggcccttgtgtgacaacccacccccgtcgctccaaaaaaccata

SEQ ID NO: 3828 - DNA, 356 bp, Oryza sativa
  Clone ID: PAT_MRT4530_10767C.1
tcatgatattaataaaagatatttgaagttttttatggagctaatataaccaaatggattgcgtacacacaggactttgacatcagaagtccaaaactcagtttaggtggttgactttttacccttgaaaatgaaccaaagtcacaccaaagaacataattcataaagaaaaatagaagggggatagttcatcaagaaaaagagaatatgcatcatccttcataattcatatcctgcaagttctttcatctgatgaacagctagctcggcaatggctctccattgatcttgcatactacttcatcatcaggcaattaattctccaggatctcctcaggggctctgttccttgatgt

SEQ ID NO: 3829 - DNA, 871 bp, Oryza sativa
  Clone ID: PAT_MRT4530_10768C.1
ttagcgccgccgcccgttcgtcgtcgctttagcatcaccgcccttcggcgccgcctttgcgccgccgtctccgccgtcggttgccgttgtcggcaacgcgcgtgcgtgtgcgcgcgtcgtcgccatgaccggtcggtcggctttgtgccgagccgagccggcggccgcctttatcgccgcccgttccctccccttcctagccgctgctagcgcagccgccttcgcgtcgccttttgcgccgtcgccttcgccgccggttgccgtcgccggcaacccgttcgcgcgcgcgccgttgccgtcgccgcggccggtcggtcggccttgagccaagccgagccgggtgtcgccgccccttttcctcccgagccgctgaccagtgggcccgcgtgccggcgccccttcctccttctcccgagtcgctgaccggtgggccccgcttgtcggcgccgcgcccccctccgtgctgacgtcagcccacaaaccagcgtgggcaacggctgggcttgtagcgtagctttcctctagccgacgcatccaggcaagggtgggcgtgatggagtttggatgggcccgtgccaaccacaagccagcgtgggcaacggctttatcttttgtatagcgtgattcattatagtgcgccagactgagaagtggcgagaagtccacgggggtcgctggggagtccatgccttgtttataagggggtgattatgatccaggaaaggtgcgctgtaatggattatgttgtgcaaggggtattgtcacaactcctttccgaggtaccgtggtggtattgaggcacatggtgacatgatgtggggttgtgtcttaccttgataactttgctttccggtcaggaatcgagctaggt

SEQ ID NO: 3830 - DNA, 678 bp, Oryza sativa
  Clone ID: PAT_MRT4530_10769C.1
atgcggtggcgcggtgacgagagaaggggcgacgcggcggaggcgggccgagagcagcggctgcgcatggtccgcgcccgttccgccgtgtccttccactccctcaccatcccgcgcaccctctcgcgcatcgcctacggcaccctacggcaccgtagggcacctcaccgcctgcttgtcaaccatggtgaacctcgccggattgacgcagtgcttgagcgcgtcggggagctcggcgcggagcgcgtccacctccttgcgcctcgctaccatgaaggtgaagaacacggccaagtccatgctagcgcagagcgacttgagtccctcggcgattctagcggtgtcggcggagccggtcgtccccgccttgctcttggcaagggaatcgaactagtcccggcagcggagtgccttgagcctgcgggaggtacgcacgtcgaggaagtggcacttggtgcggagaatctcggagcgcgcggcgaggcggcgctccagcgagccaacgtgagctgctggtacaggcgcgtgcaggtcgccagcagctgttgctgccgctccagctccgcgaagccattcctcaccgccacgctcgtcgccaactccacccccaccgccgcctctgccgccggagcggccatcgcgcaggtgagaaggagctcgccaccgccgcgtcgccat

SEQ ID NO: 3831 - DNA, 355 bp, Oryza sativa
  unsure (1)..(355): unsure at all n locations
  Clone ID: PAT_MRT4530_1076C.1
cccacgcgtccgggtcggtcctccccgtcgtcctcctcggctgcggcggcgtcggccgccaccttctccgtgacatggtctgctgccgcccgctccacgccaaccagggcgtcgccatccgggtgctcggcgtcgccgacagctcctctctgctcgtcgccgacgaccatcactccaacggcttcgacgacgcgctcctcgctgatctctgcgccgccaagtccgccggctcgcccctatcttccctgctcgctcgagggcaatgtcagctattcaacaacactgaggctaggaggaaagtcattgccactagannncgttctagggaaaacaactggtcttgtactagttgatt

SEQ ID NO: 3832 - DNA, 334 bp, Oryza sativa
  Clone ID: PAT_MRT4530_10770C.1
atggtgggttgtgagcacatggttttgagagtcgtgctcatgacaattaaggaccggttcgcgagctactattgtgaaacattaatcgtgccaaccacaagccagcgtgggcaacggctttaccttttgtatagcatggttcattgcagagcaccagactgagaagtggcggagataagcccacgggggtcgctggggagtccatgcctctggtttttgagggggtgattatgatccaggaaaggtgcactgtggtgggttgtgttatgcgaggggtaatgtcacagctcctttccgaggtaccgtgccactcggtgcgcccggaggcggccac

SEQ ID NO: 3833 - DNA, 491 bp, Oryza sativa
  Clone ID: PAT_MRT4530_10771C.1
atggtgggttgtgagcacatggttttgagagtcgtgctcatgacaattaaggaccggttcgcgagctactgttgtgaaacattaaccgtgccaaccacaagccagcgtgggcaacggctttaccttttgtatagcatgattcattgcggagcaccagactgagaagtggcggagataagcccacgggggtcgctggggagtccatgccttgttttataagggggtgattatgatccaggaaaggtgcgctgtggtggattgtgttgtgcaaggggtattgtcacagctcctttccgaggtaccgtggtggtattgaggcacatgtggtacacctctggccagagtaaaactattcgaatagccgtgcccgcggttatgggcgggtcatgctataactggtaataatttgtttagctcctggtttggaatggtatattcctggtttggagataccgcgtcctcggttatggacaatgcttgatgtgttagtt

SEQ ID NO: 3834 - DNA, 1838 bp, Oryza sativa
  Clone ID: PAT_MRT4530_10772C.1
cgagacccgcactctttttttgcgtcgctcgagcgcccgcgttccccgcttcgccgaaactaccaaccgcctcgccgttctcctctccccgtggcgccgccgcgccgcacggcgggagggcaactgaccgagggagactgcccaccagcgtgccgcgcgccgtcgcctccggctccctggttcgtggaataatggcggcggcggtcgcgggcggtggggaggagggggaggagctgctcctgctctccgccgtcgaggccggttccttcggcggcggtggcgacggtggcggcgcgggcgcagcggcggagaagtcgtggcgcctcaacttcgacggcttccgaccgccggaggtgcagcaggagaggcggccgccccgcgggctccaccaccactgcctcggcgtcctatctcaaggtcctgaggacgtagttgctgaatactaccaacagcaagtggaaatgctagagggctttaatgaaatggatacacttactgatcgtggttttcttccaggaatgtccaaggaagagcgtgagaaggttgctaggagtgagactttagccatccggctatcgaacatagcaaacatggttctttttgctgcgaaagtgtatgcttctgtgagaagtggttcacttgctattattgcttcgactttggattctcttcttgacttgttgtcaggatttatcttgtggtttactgccttctctatgcaaacaccaaatccctacagataccctattggtaaaaagcgtatgcagccactgggaatacttgtctttgcctctgttatggcgacacttggccttcagatcatcctagaatcagtacgctcgttgttgtctgatggggatgagttcagcttgacaaaagagcaagaaaagtgggttgtggacatcatgcttgcagtgacattagtgaaacttgcccttgttttatattgccggacattcacaaatgaaatagtgaaggcttatgcacaggatcatttttttgatgtcatcacaaatatgattggtcttgttgctgcactactagcgacttatatcgaaggttggatcgacccagttggtgcaatcatcctagcaatctacacgatcagaacatggtcgatgacggtgctcgagaacgtccactccctggtcgggcagtcagcctcgccggaataccttcagaagctgacctacctatgctggaaccaccacaaggccgtgaggcacatagacacggtgcgggcgtacacgtttggctcccattacttcgtcgaggtggacatcgtgctgccgtcaagcatgccgctgcaagaggcgcacgacatcggcgaggccctgcaggagaaactggaacgcctgcctgagatcgagcgagcgttcgtgcacctcgactacgagttcacccatcggcccgagcacgctctgtcccatgaaaaatagccaggcgcaggttgcaagttcgcaaccactggtattaagtttagcagcagcaattagtttcagaatttctggtgctcgtcaggaaacctgcgggtgtatgagattttaattctgtatactggattggcgggtgtgacagtgccaaagccgtagattgtgatttgtaactacttgtagtagactataggattcttgactgttaaatccgtcatctcgatcatctcgtgtagtacaatttatactcaaagtctagagagacatatgcctggtaattacaggctcacagccactttacattaatatacggtcttctgctccctcggctacgaaaaaaaaaaaaaaaaactcgagactagttctctctctctctctctcctcgtgccgattcctgcagcccgg

SEQ ID NO: 3835 - DNA, 1532 bp, Oryza sativa
  Clone ID: PAT_MRT4530_10773C.1
attgaaaaaggtttttaaaatcctcttttggctttgggccgaaagtcggcccaaaaccttctctctctctccctcggcccagtcggcccagtccgaccgcagcccagtccgcccgctcgcgcgcgcgcgtcagcccgctgacaggtggggcccactgcccctttccgtttccgatgaaattagtagaggggaaatgatcttcgggatcttctctacctttttccttttggaatcgatcgccaattcggtttggaaatccgtggattcgagttcgattcggatcgatctctctcctccgaaccctagttgttccttcacgtcgccggtcgccgtgggccttcgtcgccgcctccttgcccccgtcgccaccctcgccttcgcctctcgtcgccggtagagccctagcgccgtgtagcctagcgccgccgtcgccgccgttcgtccagccgtgcgccgccgccactccagtcgtcgtcgtcgctcgggaaggccgccgtcgtgatcgccaagtcatcgccgacctcgttcgcccctccgtcgtcgccgtaggccgccgccgcttcttcctcgacgccgtcgccgaaggtcgccaccgcttcttctttggtcaccggtgagttcgccgcgtcgctctctacgtgctggtgccctccgttcgtgccgtcgcgccgtcgttcgccgacgagcatgcacgcccgagccgccgccggtggtgacgtcgtcgctgacgtcatcgtcgtcgtccatccgtgagccgcggtggatccgatcgatcttggccgtccgttttggataggatcgatctcggccgttcgtttccgtgagccgcttttgtatagcatggttcattgcggagcaccagactgagaagtggcagagataagcccacgggggtcgctggggagtccatgccttgtttataagggggtgattatgatccaggaaggtgcgctgcggtggattgtgttgtgcgaagggtactgtcacgatttccccctttgcagtgccgtgaaatatgggaactatggttttacaagtgagctttgtcgtatgacgtatgatcttggatatgaggttccaccaaagtacactaaagtatctactcatgttggagaccaactgcattgcaagacaactgttactcttgtttccgacaaggaagatcttccccagctatcattcaatggcaaggctaattgtttcttgtatgctcgtgaaggagtcgcatatgaagctttgtgtcgtctcggttgtcatttcaaggattgtctggagaattttacatattactaccatccgaaacatggtgatgatttttggttgaacggttgtacgcatacccaaggagaagataaccaaacgattgtgcatatgactacaatgttggatgctattgatgacctccacactaattacaagactcaagccataaatcagaagcatgcccaacaggagaaaattgccaagctacaaaagatggttgaacaaatggaagatatgtctcaacctgaagatagtgacaccgccaagat

SEQ ID NO: 3836 - DNA, 810 bp, Oryza sativa
  Clone ID: PAT_MRT4530_10774C.1
atggcggcgtggtttaagctcggtggctccgctgtgcgcgccatgggcgctctccggggatcgccgccggcgatgggaattggagaaacagatgtgggggttcaggcatcagtgttcaccggtggatggctcctggggtcttccatctccagctggcagacgctgaaggttgcggagcagcagatcgacgccctggcgagggagcaagaggagtacctcaacaagtttgaggccaagtgggtcgaggaacttaacaggctgaagctcgagatgatgaatgagctcgaggagtcggaggaacggcttaacagggagattgacgtcctcaagatgatggcgaggatagcgatggaggagaaggagatgaggatggcgatggaggaggaggctgcttctccaggtcctctccagggtgagtccggggacctcgacaactgcaattgttctggctgctacaacattaaatattacgaggatgcgatagaggagatttccgacatgatccagatgaaaaacccgaatgcatttgatcccaggattattgttagtgttcaagatgcaacggcagctgatccccagagctctactagtgctatttcagacccaaaaaacacctccgatgcaatgccgggcaatgaacaacggaagcatgccaaagggtgcagctgcaggaagtccaagtgcagcaaactctactgtgaatgcttcaagatcagaagtgtgcgctcaattcgtttggaggccctgaagaatctcattttgctcttcacccgtgtcaatggttttgtcttgcctgtgttttttatctga

SEQ ID NO: 3837 - DNA, 333 bp, Oryza sativa
  Clone ID: PAT_MRT4530_10775C.1
atggtgggttgtgagcacatggttttgatggtcgtgctcatgacaattaaggaccggttcacgagtttcggttgtgaaacattaaccgtgccaaccacaagccagcgtgggcaacggctttaccttttgtatagcatggttcattgcggagcaccagactgagaagtggcggagataagcccacgggggtcgctggggagtccatgccttgtttataagggggtgattatgatccaggaatggtgcgctgtggtggattgtgttgtgcgaggggtattgtcacagctcctttccgaggtaccaccggagcgcgagggggtgcgaattccggtg

SEQ ID NO: 3838 - DNA, 225 bp, Oryza sativa
  Clone ID: PAT_MRT4530_10776C.1
gtttgacgagctcttgcagcgccatcgcacgcgctcggatgctttaaagctgtcgagcggtcgtcctttttttttttaaaatcttgtgccataatggaccattttagaaggatgcgacactgatagaagaccaaatatgtattgggaaataaatacaaatgttacacatctatgtggccggccgaccaatccggcccaattaacacaacacaaagaacaaacggg

SEQ ID NO: 3839 - DNA, 426 bp, Oryza sativa
  Clone ID: PAT_MRT4530_10777C.1
aaaaagaaatgaacatttaaccggaactgaatggatttttggaaacgataagagactgggggcagtttttggtggacatggaataatgggccagcctttttatttgggggggcccacatttttaaacctgcactggataaccctaagggaaaaggttgcactggaaaattccgtaattttgggggaaaaacaggggaagaaaaggaaatgttttttcaccggaatggggggaaattgccaaagaaccttatccaaataataccgaaggggaaaaatttatgttccaacttaattggccgaatgggaaaatgggacccttcaataactggagggggagctaagggttgggattttgcaattaaaagatcacctgtaaaaacaaattgaaggtaagtttggcgggttttaacctgttaaaaaacaggg

SEQ ID NO: 3840 - DNA, 558 bp, Oryza sativa
  Clone ID: PAT_MRT4530_10778C.1
gggcgagcgatggcggcccaaatcgggaacccttggcgattcgacggctacggccggcgtcggcggcgctggatcggtggcggtggtgattcgtcggcgacagcggacgcgacttttctggatgcaacggcggcgctgcatcggcggtggcggcggcgaatcgtcgccgactgcgggcagcggcctcgatgcgtaggcggcgctgcatcgttggcggcggcgattcgtcggcgggagcccggcaatggttgaagctatgattcgtcggtgacggcgggcggccggggctgcatcgtcggcggcgacggtgaatcgtcggccactgcgggcagcggcctcgatgcgtggcacaacatgcagagtgagggagaaaactgatccataaggtgtgtgttaattggttgctttttgtggttttttattcattgtatgggtattatatatttcccccaataaatcggtggtgatagattgaaattgtcaaaatagttcatacagttgggacaatcagaaccgatagattcaaagacatggttggaaagaaaaaaaaaaaaaaaa

SEQ ID NO: 3841 - DNA, 1198 bp, Oryza sativa
  Clone ID: PAT_MRT4530_10779C.1
tcagaatctcttatattaagggacggagggagtagtattaaaatatatcatgtcccttcgaaatcccttatattttgatacgtatgaggtacattttccaaatccataagacgattaatttatcgaatttaatatgaaccacgtacatgacgacccaaacacgaacatcaagtactcttatagccgtcgttgaccggctggcaccggttaccggccggtaagcatggaacaatggaagtggcaagtggctagcgatctacgtggccacatcgatgtcgcccttcacctccacctcgccgacggcggcgaggctgcccctctcctccatgacgatggcgacgccgccgcccttggcggccgcctcctcctcctcggcgagcacagcgtcgagtatccggagcatctcgtcgggcgccacgagctgcgggaagtggccggccgagtcgacggtcaccaaggcggcgcgcccgatgcgcccctccatgtagcgcccgacgcacggcggcgcggcggggtcgccggaggcgtgcacgagggtgcacggcgcggcgacgcggcccagcacgccgcggttgtcgccgaggaagatcatgcgcgccagcgcgtccgccacgcgcgggtccatggcgaagaaggtccgcgccagcgtctccgcggcggaggggttgtcggcggcggcgccgacgatgagcgggacgaagcccttggcccaggagaggaagtccgacgagatggtggccagcatcgcgtcgatctccggctcgtcgaagccgccctcgtagtcatccgagttgatgtacctcggggaggcgccgacgagcacgaggtgggtgaagaggccggggcggttgatggaggcaatgcagccgatcatgccggccatggaatgccccacgtacaccgccccgctcacccccatctcctccatcagcgccaccagctcgtccgcgaacccctcgaacgtgtactcctcctcctcctccgccgccgccttctcgccgtcgccgccgccgccggagaagtcccagtcgaacaggacgaccttgttcgtctcggcgagatgaggcagcaccctgtcccagatggcctggctgcctccatagccatgggagaggaccagtgtcctctccccacacccaaccactcttggattcagtggcggcatctctcactagcttagctagccaaaccctcgtgc

SEQ ID NO: 3842 - DNA, 4332 bp, Oryza sativa
  Clone ID: PAT_MRT4530_1077C.1
tcatctcctctggaagttgaacttcatgatcgcaaaactgaagaggaaggcgaaggtcacggcgaagacgacgtgcaccacggccaccacccacaggaagttatgatggaagccaaagtaatcagtgacaaactgtgcaacagttctggtgtcgccttcgagcacatgttggatatcaccaaactgggaagcaactaatccatacaaagtccatgcaaccgggcaaatccaacagtaccacctccaccaaacagggattttcggtcgagggatcagatatcctgagaagaggttccacacattgtagaaagcggacgagatgattgctgctatgctctcatttggtgtcaaccctaccgccatcattccgtaaaatgtgaaatatagcagtgtgaagtacatgaagaacaagtaccacaagaacttggcaacagtccactcaaatccaatcattgagtataccagcacgccatatatcagagtctgaaccatgatgtatggtaactcaattgcaacctgtccaaatgcatacgggaaagctgaatacatgccagctgctctttctcggtaaaagactgttcgctccaccaccaccactggttgaacagaaccagagttttgcactccaatgtagagaactgcagcatacattgatcccatggcattgaatagatcctgttgttttttagttctcgttccaaggttccagaacattgttccaaacattagggcaatgacgatagtgaagagtaatctcactgcagtgtaggatggattcctccaatatgaccaattctgcttccacaagcaagctaggcactgtgtaatgaacgatctagagtactgcgtagggaagttgagatcagtagagccaggaggtggtgtgcttagctcctcaataagttccttgttcctttgatatagctctgactgcctgtagatttcactaaaatcaacaccgagcatctcctcctgggctgaagaggtcacttccaacatccatgttgctggattatatccatcttttatcctactaacgccatcaattccctcaaagtactcaatcagttttgaggaattctggcccactggaccaacatatatctcttcacctcctctcttcattaggaaaagctcatcaaatgcttcaaagatgtcaatacttggctggtgaatggtacaaacaacagtcctgccagtgttaacggtgttccttacggtcctcatcacaatcgcagctgcccgagcatcaagaccagatgttggctcatccataaaaataattgaagggtttgcaacaagctccacagcaatagtaagtctcttgcgttgctcagttgacaggccgctcactccaggaagcccaacaagtgctcccctcagagatgtgagctctacaagatccatgacctcctcaataaacatctttcttgcttctgaatcaacctccgagggtagccgcagccatgcagagaacacaagtgattcatatactgtcacatggggagaatggatgtcattttgctcacaatatcctgatatacgtgcaaaggtctcttgcttctttggatagccagatattctaatatctccctctatgtatcctccagtttttctccctgctaaaacatccatcagtgttgtcttcccggcaccacttacacccatcaatgcagtaagtacacctggcctgaaagaaccactaacaccctttagaagcaacaaacggtcttctgttatgccttgtgctttcattgcctctggcatgtccactgagtatcttacgtcgttaaaactaatagatagtggtgcaaatgggagcaccattcccttcctgcttgcgctagaatcagcgctgttaattccagagttttggtcagcaatatgggacaattccaattcctgcttcctagatttagtgtccttctgtccctctacaacttcaccggttaagttggcatgcttctctttcaatgcgtcctcagacattgatgcatgagagtcagtgaatggactcaaaactgaaagagctacagtgtagagcaggttaaagaggagagtgtatccaagcaaagcaccaagtccaatccagtaccacttagcttcagtaaagataccacgagattttagtacactaactcccaaggtcacattttctccaggaagtatttggctccaactgtgacccaaaaattcatttgtcgaaatagcattttgtgcatacgatagcggggatatccagtaaccccaaatccaccatttcttcacgtcaggtcttgcaaggataaagccacccaatgctgcaaaagccaacagtgataagggtccaaatgtgtgagacacaaccatgtctcttccgattccagcaatgaagcggaatagtgcagatgacatctggttgagtgcaagtagcagcagatactgcttgaagaacctgcttacactgggatcaaatccaatgacatagtatgttatgaaaacataaacaccaacttcgagaaatgtgataggaatctgaagaatccatgatggtatggtgtaggcccatgcaggaaagaagagaagatccctttgcttgaagaaaacaggtagtttcatgacagtcatggcaagctctgcgaaaccattaaacatgactgtgtcaagagcaaagtacaatgcccccagatagatcattccataatctctatcatgtcgcatgctggtacggaaaaatgtggtcatcacgatcaatgccattagagttagattaacagctttaaaaatgtacataaatgcattcctcttcatgagaagaagctctctatcgatagtggctttgagcaactccttcctgctgacaccatactttgaagtagccagagcagcagggtggctcctggtcctatcaaatggctcagaaagctcattctgtatggatcggcccacatggaaggaacggaacgcatctgcgaattgcttcactggcacaaaacggtatggtctgtcacgcctacaccagtactgcccctgatctttccttgatgtcacctcctgcaagaaatcagcaacaccctttctggcagggcatctgaagcccatgaactcaaagaactcaagcacatgttcacggggaccctggtacacaacctgcccgtcagagaggagtataatgtcatcaaacaagttgtatgtttcaggtgctggctggagcaatgagatgacagcagttccgccaaggatgtggatagtctgcctaagggaattcacgatctggtacgtggttgagctgtccagtccagtggatatctcatccatgaacaaagctcttgctggaccaacaagcatttcacctgttgtgacacgcttccgttgtccaccagatataccccttaacatctcatttcctactaccgtatcagcacaaatatccaatcctaatatcttcaatatgtagtccgtaacaacactagattcttgtcctcccatagctgaggccttcatgtagatatcaatatcatgatctggcttgatgtttgctgccttttcccttcttgccaactcagtcagcatttcatatctagtgccaacgccttggcaccgcgccgagaaggccaatgtctccctcacggtcatctccccgatgtggagatcatgctggctgatgtacgccgcggtcctttccgggacgaactcgtgcatcccgtgtccattgtaggtcaccttccccgagaccttgaggtccttgtcgagcttccctgccaacgccaggagcaacgtggtcttgcccgagccaggaggtcccagcagcaaggtcatcctccggggcttgatgatcccgctgacgtcatggaggacggtcatcggctgcttcttgttggggaggatgtggagcgcgttcccgattgcctcgacggtgttggtgacggagttgaggagggtggggaggccgcggttgccgacgtggacgtcggcctccacctcgaggttctcgaaccgcacctcgatggtggggtagtcgatccccacgcggtccatccgctcccggagcttgaggaggaaccgctcgtggtcgtcgtcggcggcgcggaccagccgctcgatcagcgccctgctctccctcgcccccagcctccccacgtccacctccaccttctccccgccggcgccgccgtcctccgacgacaccgccaggatcccccgccgcacgcggtcgtacgtcggcagccgctccagcgccgcccaccgcagcgcctcctcgtcgtcgtcctcgtcctggaaccgcgacgacgaccgcgagaacacgtcgccgccgctcctccacatcgacccttccctcctcaggctcgccat

SEQ ID NO: 3843 - DNA, 139 bp, Oryza sativa
  Clone ID: PAT_MRT4530_10780C.1
ttgttacgcgtgggcgcgagcgcccgcctattttatttaacggaatttggtaggcaaggttgcgtctattttgtggctaccgacccttcttgacaacaaatttttggaagaatgatgaattaacttttaacttggaagg

SEQ ID NO: 3844 - DNA, 447 bp, Oryza sativa
  Clone ID: PAT_MRT4530_10781C.1
atggggcatgtagagtcagactcttcagggcttgatagcatcatattgaactataacataatatctatgacatatctgttacatgtaaacggattggatagcctactgaaattatatatttatttcttacgggtggaactacaggagggaacagatgacacggtcacttggagatggtcttctaacgggacatactcggcaaactccgcctacaagatacaattcgttggaagtattcaagataataggtcggattttttctggaaagctaagactgaaaataaatgtaaattcttcggttggctcatgatccataggaagattcttacagcggacaagctccttctccgcggctgggataacagccgcatttgcccactctgtggagtggagccagagacggccactcatctactcatggattgcacctttacaaagcaggtctag

SEQ ID NO: 3845 - DNA, 885 bp, Oryza sativa
  Clone ID: PAT_MRT4530_10782C.1
aattggaaaatgttttaatagtctcttttggctttgggccgaaagtcggccgaaaaccttctctctctctccccggcccaagccggcccgcagccgcccgcccgcgcgcgcgttcgccgctgacaggaggggcccgccgcccctttccatttccggtgaaattgattgaggggaaaggatccctgtgatccactctaccttttcccttttggaaacatcgtctaaatcgctttggaaattcgcggattcgatctcgaatcggattcgtctctctctcccgaaccctaatcttttccttcgcgtcgccggtcgccgtgggccttcgccgccgcctttcaacccctataaaaggacccccggtgtctccgctacccgtcgccaccctcgccttcgtctctcgccgtcggtagcgccctagccgccgtgtagcctcgcgccgccgtgcgtcgccgccgctccagccgtgcgtcgccgtcgctcgggaaggccgccgtcgtggtcgtcgtcacgtcgccgtcctcgtccgccccttcgccgtcgctgaagatgccgccgccttttcctcgacgccgtcgccgtccgttgctcttccgccgtcgttttggtcatcggtgagttcgccgcgtcacgctctacgtcctggtgccctccgttcgcgtcgccgcgccgtcgttcgccggcgagtttgcaagcccaagccgccgccggtggtgacgtcaccgctgacgtcatcgggaccgtccgccgtgagccggtcgtggaccaatcgatctcggccgtccgttttggatcaagtcgatctcggccgtccgttcgcgtgaaccgccgccgtgcgcccggtccaccgcaaaccctagcccgctgacgcaataaatccctttttcc

SEQ ID NO: 3846 - DNA, 259 bp, Oryza sativa
  Clone ID: PAT_MRT4530_10783C.1
ctggccgccgatggagcccgccggcggcaaagccggcagcgggcagggaaggcggcggtgaggccttcttctcttcgtggcgtctccctcctcagcgcaaaggacgaagatgacgaagctccccaccggcgtggtccgtggcggccacggcggcaaggtggggaggaggcggcggatccggagccccaatggccggatctggccctccctcgcctggatttgcgtggtggcggcccgaggatgtcacaccccaatctga

SEQ ID NO: 3847 - DNA, 2087 bp, Oryza sativa
  Clone ID: PAT_MRT4530_10784C.1
aggaaaagggtgtacacgttttattcagaaataattatcaaatgtacaatcgagttttccacgaaggaatatgcaaaagctgacatacaacgattggtagattacacacttaaaacagccatatgcctgttgaggcttcgtgaatcaggagagcctctgaccaaaaaaatgccgggtaaacaaaaacgaaagagaacagctacaaccttaaaatggaagggagtagcgaacagctccaagtaaaggagtattactccgagttgaagaattgcagtagcagtgaataagttatgtcaaacaccgttcaaatgcagtgctgttatttgaggatcacatgtccacctttgttcaaagctgtcatcaatctttaagaatctctgtttcctgtgatgtcatcagggaatgtgcataatctcctgcccaggttcattccatcatctgtttgcatgccctaaactaaaccagatcagattggcttagatcttacttgtgaaagtccatatctgatgtatgacattactcaacggtcactccgacatttgattctagaggaactgttatcttttggtctcggctgcgtacaaattctcaatggattgtgcaccctgtttggatgaatcgatccaaaagggtgacaatgccaccaccttcccaataattatcagagtaggagagactagatcctccgacttgacttcattcacaaaatcctttaacatggcgaataccatgcgttgttggggggtagtgccacgctcaactgcaacagccggtgtatccggtggaagaccatgcttcatcaacttgggagcaagagatggcagtgttgacaaacccatatacacaactaaagttgtgtcaggatctgctgcattctctgccacatatagaggatctggcccaccatttctagagtgcccagttaaaaatctgacactggtagcaacacctctatgggttagtggaatgccaagttctgctgcaattcctgaagctgatgtaattcctgggataacttcaactcttattccttgttgttgaaggaaatccatctcttctccaccccttccaaagaccagagggtcgccgcctttcaaccgcaccacattggcaccagcctctgcgaagcttagtagcagctcatgaatctcttcctgggtgcggctgtggtatccggccgtcttgccgacgtagagcagcctggcgccctccccgaccaaatcgagcacgtcgttggagacgaggcggtcgtagagcaccaagtccgccgcctcgatggcccgcaccgccttgagcgtgagcagctccgggtcaccgggccccgtccccaccagcgccaccctcccgggcccgccgccgccgccctccccttccgcccccctccctctcgacgcccgcagcgcctccagcagcctcctcagctccggcagctgcagcgcgatctcgtcgtcccggcgacccgaagaagccgccgccgcagccgcagcagcggacgacgacgacgaatcgccatccgaggcggcgtaggaccaggcgtcgcggcggtaccgcgaggaggatgtggcctcggtgaagggcgaagcagcagcggcgcagatgatggcgtgagcggaggaggagggccgtgcggcgagagcggtggtggaggcggttgacgcgggaatgggggcggggagaggctggaagcgcggtggtcgaagggcgagcgccatggcgatgccgggatagttgtggtgagctgatggccgtggcacttcttatacggcgagggagcagcaggaaggaggaggaggaggagagctgaagccgagcggcgtggctcgtcgacgtcggggggtgcggttttggatgcgcgaaggggtggagggaaaggggggaggaagagccccaggaccaggagggagacggctggattgaaaagtggcggcgaccttgtggagcgccgaagggccaggttcaatgaaccgctgcggcacaggaagggggttttccgttgtgttgtttggggcgaaggaggcagcgaaagccaagtgggagtgcggctctcggctgtggggcgcgctgtgcgtggctgccgccgggcatga

SEQ ID NO: 3848 - DNA, 2847 bp, Oryza sativa
  Clone ID: PAT_MRT4530_10785C.1
atgtccgacgccgacggcttcggttgcgagcaccgccgaccctccaagcgccgccgcgacgggcccgatcatgccctcctcccggtgtcccgagaggtgctgatgggccaccccgatgaccccgccgccgccgccgccgccgtgggggcggaatcctcctcggcctcgtcatacctcggggttgtggcggccgccgcgtccgcctccgcctccgcggcggggggtttctcctgcggggcccacttcttcgtgcgggccaccgactcgaggaccgtgtcgatgcacgcggcgtggggggacaccgtgggcgccgtgctcgcgcacctcgccgaccgggggtacggccgcgacctccgcctcgtctacgccgggaggcagctcgcgccggagaccgccctcgccgacctccgcctcccgccggactccacgctgcacctcctctcccgcctccgctccaccccctacccggacgcgtggcagctcgcttcctacatcgcctccaccgccgccgccgccaagtccgaccccgcccacaccagctccgccgccaacatcaacgagctcgtcaaggagttcatcctctgcgcgcaccgagccaacatgcggcagcgccatgatcgcgactcccccctcttcgatgcccaacccacgggggaccacgcggcgcagtacctcgagattttccgccaggcgggcgcccccttcgcgctggttcgcctctacgccgctaatccctcctccgcctcccaccatcacgcggagaacgccatcaaatgcttcctcaccatggatccttcggccttgccacccgacgtgctgccggtcatggcgccggtgctgcttgaattttgcgggttgctctctttttctgtgggcaagagggatgaactctatatatcatcccgttctatgcttgcaacagtgctcagcttgccttctgggcttcccccttgcatcaagtcaccttccaagctgatcgagcaggtccttccgtttgctgaagaaatagtgggagtggttatggacgaacttgcatcactggatatgactgtgtcatccaaaaaccttgaagacctctcaaatttctttaaagtgctgcgccagcaggcactccgttgggttcccaatggggggccattgcccaagaatctgtataacagtgagcgtgggcataatgacacgtgggtgtggaagttgcacgaaatgtcaatgaacttattgaacagggtggatgagtgcttgaagaggttggaaatggatctgtccttgtcatcggagaacagaggggtcaatataagtcaatctcgatgggttgcccggtcacatatgctggtcatgctgacacaactagattttatatcgatgatttatgaggatttggcacataacctacggcttgtgttgctggcacacagagatcctctcaatgccctcgtgcgctgttccaagaggaatgagcatctccactggcttgtgaagcataaagacctcctttgctttgaatcaagaaggaatttagtcttgatgatgctacctgagggaaaggatgaatacggggagcttcatgagatgttgattgatcggcaacacttattggacgagtcctttgaatacattatacaggccagacccagtgagcttcgcagtgggctatttatggagtttaagaatgaggaagcgacaggccctggagttctgagggaatggttctgcatggtgtgtcaagctcttttcagcccgcagcaagttctcttctcgccttgtcctagtgatcgacagaggttcttcttgaacggaacatctgctgtggatccactgcacctgaaatacttcatattttcaggacgaataattggattagcattgatgcatagagttcaagtagggatcacattggaccgcacattattcttgcatcttgctgggagaagtattaaattggaagatatttctgctgcagaccctgtcatgtatgcaagctgtaaaagaattttagagatggatgctgctgttgttgatggtcttgaactaacattttcccgagatgttcatgaattagggtctcgaaggactattgagctttgctcaggagggaaggatctccatgtaaatatcaggaacagagagctttatattgaccttcttattaagagtaccttcgtggattccatatcagttcagttaacccatttcgtgcgcggatttagtgacattctagttgatccggaactccagaaagtattttttgagtttttggatctagaagacttcgacggaatgctagggggaagcaacaaaactataaatctggaagattggaaattacatactcaatataacggctacaaagaaaaagatcgccagattatctggttctggaaggctgttgagagcttgtcaattgagcaacagaggcagctgctgttcttttggacttcagttaaatatttaccctcagatggttttggtgggctggcctcaaaactgtacatatataaggtatctgagtcagctgaccgtctcccatcgtcacatacctgcttttaccggctctgcctgcctgcttatccatccttgaaagtgacgagaaaccagctgcagaagatcacacaagagcatgcttccatttttcatatactttctggagaagtgtggtgggagcatttgcatcgtgctatgctcacaagctctggaagccagttaaggcttaaaccatgtcataaagtaccagcaggcagcagaaattttctgggaatcagccagaaaccggtgtctcagcagctgacaagtgatatggaccatactctgcctgaacatatggattccaacgatgtctttggtatatga

SEQ ID NO: 3849 - DNA, 542 bp, Oryza sativa
  Clone ID: PAT_MRT4530_10786C.1
atcaagccaacatcaaaacatatatattcataatgtaatgttctgttactacgggttaaaggcatttacgcagagcctaattttacagttcaatttctgtgcaatgtccatgctagtcagatgccaacagcaagatcagtttctttgtttcagagctgatattgctcaacccccatctcatacaagcgcgaaagcagcctcctctccagcttcacgccggccaactccgtctccctgatcagcctccggcacctgcccatcctcccctccgccgcgtagcctccgttcaggccgccgtacatgtcgccggtcgggacgaacccggcgtccttcatcctcgccaagtaccggacgcccctctcgtggtcgcgcatcgccacgcacaggttcaccagcacccggtacgccggcaggtcgaggaggccgccggcgtgccgctccatctcccacgccagggacagcgcctcccggtgccgcccgtcgcggctccggttgtgggtcaccgccgtgttcctcaccaccgtgggcctcccgccggtgtc

SEQ ID NO: 3850 - DNA, 295 bp, Oryza sativa
  Clone ID: PAT_MRT4530_10787C.1
ttcttcaggcaccaaaactaactttcaagaaaccaatagggagcatctgtatttctggccacaagtttattggatgcccaataccatgtggtgttctaataaccaggttgatggatatcaatcatgtaatgtccacaaacattgagtacatctcttcaaatgacacaaccatagcaggaagcaggaatggccatgctcccatctttttgtggtatgcactgaagcgtatagggtacaatggtctttgcaagacggttgaaaattgcttaaaaaatgcccagtaccttgcacttcg

SEQ ID NO: 3851 - DNA, 504 bp, Oryza sativa
  Clone ID: PAT_MRT4530_10788C.1
atggtacttatagaggaccatcatgaaggcgatattctcaccgtcctcctgcttctcataagcaccagggaccatgagtatcgatgggtttctcttggaacactcaagagaactcaccggccgccgtcttggccgcggcccccttcggcgccgcccgcgccggcgatggtggttcgcgacggcagggagcgccctctcgtaactccgcctaagtcgcacggcgagcggattcctggcttgagagcctgggaaggggatggccgcctcaggtggaccccgcgcgccggcgccggccgctggccgagcgacggaggaaggtgcgtcggcacgcagtcttcggcgggcggctgcaggtgcagaggccggcaggcttcggccggcgagaggagggcggcgacagacacggtcggaggccacctcgccagcgccgccaaagccgccgacgcccgcgggtttccccctagccgccctgccccagcttcccgagtcagctcatcgccgtga

SEQ ID NO: 3852 - DNA, 2236 bp, Oryza sativa
  Clone ID: PAT_MRT4530_10789C.1
catggtcaataccgctagaaagaaaaattgattgttacagtaaaatagtagcacagatgaattcaatgaaaatgaaccttggctgacacttgcaaccaaaaaaaacaaacttctccctaccttggatcattacaagttgtggagaagctcacactaacagacagaagtaacttctcaaaattctctaattggaactagactctcagcataattaaatagatgcaaatcccttgcttccttctccaaatatggttcatagcaggtgaagtctgaaacctttgaagctaattctactattctacaggtttcgatatcatacctgtagacctttttgaatgccagcagcaacattttttcacgaaaaacaattaaagggggtctttctacagggtacttcataacaacatcaggtggaatctgtataacatagcgtcgagtccattcaaggttctgcccaccactgcagttccaaatctccagcgctagcgtctcactgaaaaagcaagcacaacacagttcaccctccacctctgtgaaacggacagactttacattggatggaggacacggaaacaaactgaacttctcatcagtcaaacagaatcggaggaatgcattaggtggatctgggcaaagtgaactacacactatccagtagatggcgcctttcacatggactggagttaaagcatcaattggatatggtggatcttcagtttgcctccatgcattagtgcccagagtaagcacttcaaacttgcagactaattcttgtgtttcactatccctttgatagaaagatctagccaccttgtatttgttgctgtgaggatcaaacccaaatccagcccttgtgcctgtgcaaatgttgccactgacttttggtaggaaaacaatctgtcttgttgaagggttacagatcatcatttcgaggttcatggtgggaatgaggagtaaaccattacagtgcacagggcgagtccatacaccaatgcctagcggaaagttctgcatatggaccagttccattgttttacctccatggtacttatagaggaccatcatgaaggcgatattctcaccgtcctcctgcttctcataagcaccagggaccatgagtatcgatgggtttctcttggaacactcaaggtgagcatcagtgaaacacgggctggatatcatggcatgccaagccttgcacacagacttaaatcggatgagagacttggatggcagccatgacaggatgttgaacatcacatcatcagggatgtaatggggcatgaacctcgaccaagagttgataacaatgcgcatcacctttcgcggccgagtagtcaccagattgtttcgctgccatgacaacaatctctcaagctgatcaagggagaaaaactgaatcttgcggccgccgtcttggccgcggcccccttcggcgccgcccgcgccggcgatggtggttcgcgacggcagggagcgccctctcgtaactccgcctaagtcgcacggcgagcggattcctggcttgagagcctgggaaggggatggccgcctcaggtggaccccgcgcgccggcgccggccgctggccgagcgacggaggaaggtcggtttgcgtggtcgcgtgaatagcgagcgagatttggggattctcgaggaggagaaaggaaaaggtacaccgaaggtccctcaacttgtcacgtcctcgaaaccgcaaaaccagatatacggggtccattaactcgtggccgtcgctggtggagtcgcggcggacgatgccggcggcgcatggctgcttcatcccgaaccggatggcggagcttgacctcagcacgtcgcgcctcgtcgtccgccgcaccgggaccgtcctctccgggcacgagtgcacaactcgccgctgtccgtccatgcctgtgggaacacggcctcctcctcctgctccgccgccgccgccgccgccgccgccgcaccgccgactgctcgccgccgccgccgggcaccggccaccgtcgcgcagccgcgccctcctctctcctgcctcgcctgctggcttcggcccctctgcacccgccgctttgcctcacccagaagaagagaagaggagaaagagggagggtgatgacgtggattaccctgacatgtggggcccacgtgggtctcatgctgattcaacagacacgtgggataaaaccgggataaaaaccaccgagggaccttttgtgtccggttttgattag

SEQ ID NO: 3853 - DNA, 315 bp, Oryza sativa
  Clone ID: PAT_MRT4530_1078C.1
atgcagctcaactcgaaagcaagaactcgttgaaacaaaacgaaagtaaagggtggcgatgcgccgagattgtattgaacgtgactcaatccatgcatggcaatccatatgaagcactttaacttaacccgatgtcgtgtaacaagtcatattgtcggaatcggctaaccttgtccgactcgcactctgccaatcctgatcgcggccgattcggactttagccgattcttgctctgttttcggaacgatctccttcttggattccgcttcggttttaccttcacctccgatacttgaattactaaatttggttgt

SEQ ID NO: 3854 - DNA, 154 bp, Oryza sativa
  Clone ID: PAT_MRT4530_10790C.1
cctgccccagcagcagcaaagccctggctccagacgactaaggatggagagggccaatggggtgaagaggagaggatcaaggagccatgacgcatgggctgtttgtcgcatccagccgccctacgtcagctggtcgttcaatgacgtttactag

SEQ ID NO: 3855 - DNA, 302 bp, Oryza sativa
  Clone ID: PAT_MRT4530_10791C.1
ggtcggattcccggtcgaccacgcgtgcgcccacgcgtacgattctcttctctctttccccgcagggacccagcggcgcccggcaaaccactcctctcccgctaagggagccgccgctcgggctcaggaggacgctcagggtttgcctctaatgctcactacccccctgcctatcaagatagttcaactgttaagcatcccattgctttcaacaattctatatgtgactaaataagaaatataggtatgataccattcttatgctattcaaatttcaatcgctttatcaagacattgtgttc

SEQ ID NO: 3856 - DNA, 133 bp, Oryza sativa
  Clone ID: PAT_MRT4530_10792C.1
gagagagataaacccgacgcttccaagtatctgagggaaatgtgcgtcaccgaacagcacatgcttcacgccatggcccctactacaaccacactgtgagagttcaccctgatcaaaggcaacagctcagcac

SEQ ID NO: 3857 - DNA, 223 bp, Oryza sativa
  Clone ID: PAT_MRT4530_10793C.1
ttgacaggttagatgtgataggtcaagggctaagttataacttccgaaccactattgtgctaaaactgattccaggactccgccaatggtagggagtgggtactgggaggaacctgacatcctggggaggctcccattgcaagaaggtgcgttaaaagcgaaaaacactcaagcttgacccaaattccggccaaaggagaaacaaccaaactgttggggcttt

SEQ ID NO: 3858 - DNA, 234 bp, Oryza sativa
  unsure (1)..(234): unsure at all n locations
  Clone ID: PAT_MRT4530_10794C.1
ggacggtngtnccagtcttgctttgctttgttttgtttgtttgcttcctcctatcagatgagtctatggaagcatccggccgcggccgagacgncgaggtggtggagacggtggtcgagctgctcgcncgcgtncgggggatggtgcctccgncgctgggcgcggccgncgnggcggagggcttcccggggcgntggaagacgatcgncgcgaagtggaaggggctcccggcgt

SEQ ID NO: 3859 - DNA, 1615 bp, Oryza sativa
  Clone ID: PAT_MRT4530_10795C.1
cccacgtgtccgtcaatgggtcctttcatccgtcacatactagcttgcttgttcaattcaatcgagcagtagctaattgcatagtgatcgatcgatctgtatagatggtggtggccggcaagaagcagggacggcattctttttctgcatcatcatcgtcgtcttcgtcttcttcttgttcagtagtgcagctgggtcatcatcagcgcccacagggtgaggaccctctcatcggcatcaaagcagcagcagcaggaggaggaggaataatgagaaagggcccgtggacggagcaggaggacgtgcagttggtttggttcgtgcggctgctgggcgaacggcggtgggatttcttagcaaaggtgtcaggtttgcgcggcggcgggtgatgagcatatgcgtgcgtgcatctaatctatcgattaattgttgatgatgtcgatcagatggatggatgcatgcatatgccgtacatagtagatttgatgatagtaactgacataaatataatgtatgcgtgcgatcaacgctggttgttggatcgtccgtcgtgtgtatgggtggtgtgtggctgatgcaggtttgcagcgcagcgggaagagctgccgtctccggtgggtgaactacctgcatccagggctgaagcgagggaggatgagccccgaggaggagaggatggtggtgcagctccacgccaagctcggcaacaggtggtctcgcatcgccaagagcattcctggccgcaccgacaacgagatcaagaactactggcgcacccacctgcgcaagctcaagctcaaacagcaaaagcagcagcagtccgacgaccaccacaacgacaacgacgacgacgacgaccgcaactcctcctcctcttcgtcctcctccaacagcaacagcaacctgcagcagcagccgcagccagaggatgagtcgtcggccagtggcagcctgcaggcccaacatcatgaggaccagcaccaactgttccttcatcctctctggaacgacgacatcatcgtcgacgtcgactgctggagcagcagcaccaacgtcgtcgctccgccgccgatgcccgcctcgccgctctgggatatcgatgacgccttcttctgctcggattattcgctacctctctggggatagtatatatcatccatcagccgccaagacgatgacgactacatcaactcgatcgatcgatgcctcctaatcatgtgggagtactcagctcatctcaattgttacatccttgctacagctgctaattactgtaattactagcttgcatatagggatcgacggaggaattaatatatacatgttagtaactcgttctatagcgcaacttgcagttgcatctcaatctctgatcagtactatataaatatatatatatgtaacagctgctagctatagctagctgcgtacacatccatatgaatgtgtgtgtgttcatgcttgtactgcctcttgtagtatatgcacatatacgtgcaagtgcaacagacggctgctggctgatatattttgatcagcgcgccacgtgcacgtgcatacgtttcttcatttctggcaaattcatatgtatcatgttatacactgaactgacccc

SEQ ID NO: 3860 - DNA, 465 bp, Oryza sativa
  Clone ID: PAT_MRT4530_10796C.1
ccccaaggttggtgaacaagctcaccccgaggacaaggagtccctcacctccgctgtcgacaagactgtctcttggatcgatgagaaccagactgctgccaaggatgaatatgaaagccacagaaggaactcgaaggcatcgcaaaacccgatcatgatgaagatctacggcggcgagggtggtgccccgggtgccggaggccctgccccaggtgccgctggagctggtggcgacgacggtcctaccgtggaggaggtcgactaaacggctcgcccctccaagactttcgacatgcatcaccattgaggcgtttcgattagaatgggttttctggcttgctttgtttttcttcaaaattatgatgcaatgacccggggattgacaaaagcatcctgtaatgtagcgtgcctcttttcgaggctatggaacttcaaatttcttcaacttcaaaaaaaaaaaaaaaa

SEQ ID NO: 3861 - DNA, 506 bp, Oryza sativa
  Clone ID: PAT_MRT4530_10797C.1
gaagcgtggaccagcataggagtgtggagctgaccagcagaggaccgtcagcgtgaccagcagcagggacaagtaaaaggtggtggggagtgaccacccgagtaaggagcacgggggcgggaagaattcatcactatatccgacgtcgagacatcctggtgaatttgagggaagattagttggcaagagacttgtggatactaagtatgacacagagatctacacctaaggggcataggagaagacacaagggacggcgcaggaggcgtagctcttcttcgacgtagctcttcctcgatacatgtatgaccctatgtggcgcccccgaaccttgtgggtccggcggccacagtactgtacctgtgcaccccgtaccagtcccaggatacacaagctggtacacacagaacatcggtgatccacacttgcttaatttgtgccgaattgtgctcaagtctctatacaccaatgatatgttatgagttcaaaaaaaaaaaaaaaaaaaa

SEQ ID NO: 3862 - DNA, 241 bp, Oryza sativa
  Clone ID: PAT_MRT4530_10798C.1
gcagccactgtacaccttttccgccaacaacacggagcccccggaccgaggggagcgcgcgacgacgacgcagcgaccccgccgcaacaccgaggagggggccgaacgaccggaggacgaccgaaagccaacggcggcaggaaaacggacggcggagagagaggcgcgcacagaccgcggaggagcgagaacacaacaaccggaaacagaacgaggcgccgccccacggaaaacggccaac

SEQ ID NO: 3863 - DNA, 315 bp, Oryza sativa
  Clone ID: PAT_MRT4530_10799C.1
atggcgccaatcaacaacggcatcgcgagcgcgataccttcagccacgctcgcggccctcgacctcaacgactacaactgcgtcatggacgtcaacgcccggtccctggtgaccctcgacctcgacgaccgtgtcatagccctcgacctcaacatctcgtcaagcacgcgcacgatggaggtggtcggcggctttggacctagcgcatactccacatcgaaggcggccatcgtcggcatgcccgctccaccgcctggccgctccatcccgcccgtcgcttgctctggccacatacaggggagagatagaggatag

SEQ ID NO: 3864 - DNA, 363 bp, Oryza sativa
  Clone ID: PAT_MRT4530_1079C.1
atggcggccgtgccgtgggtggcagcggcggtgaggaggtcgatgcaggaggccgccgccggcgccggagccgtgtcgtacgcgcaggcgcagcaggggagccccgcggcgcccgggccgcggtccacggcgaggtcggtggagacgctggtggtgatcgtggcggcgatcgtgctcgtcgcggtgctcgcgggcgtcgtcgcgcgggcgtgcgggggacgccacgtggcgccgagcggggaccgcgacgtcgaggggtgggtggagcggcggtgccggagctgcctcgacagcgggctgccgccgccgccggcgacggcccagcagccgcagggatcgtcaaaggcgagtgacgccaaatag

SEQ ID NO: 3865 - DNA, 1833 bp, Oryza sativa
  Clone ID: PAT_MRT4530_107C.1
atggccgccgtccttcccttgctcgccgccgccctcctcgtcctcttctccggcctgcatcccgccgcctccaccgccgccgccggcggcgaggcggccaccgtggttgtcaaggcggcggcggccgtctcccgcaccgacgacaacttcgtctgcgcgacgctcgactggtggcccagggacaagtgcaactacggcatgtgcccctggtacaacgcctccatcattaacctggatgtcaacaacactattctgaacaatgctgtcaaagcgttcaactcgcttaggattaggctcggagggtctcttcaggaccaggtgacgtacaaagtcggcagcaactacggcgattgccggagcttccagcgagacgacggcggcctcttcggcttcaccgacggctgccttgaaatgaaccgatgggacgagctcaacgtcttcttcaaaagaaccaacacgacggtgacgttcgggctgaacgcgctcaagggccggaggaaggccgccggcggcaaggacacgctgtactccggcgactgggacgcccggaacgcgctcgacctgatgcggtacaccgccggcaagggctaccgcgtcgagtcgtgggagctcggcaacgagctgtccggcagcggcgtcgcggcgagggtggcggcggcgcagtacggccgcgacgtggcggtgctgaggaaggcggtggagcgtgtgtacggcggcggcggcgaggtgccgaaggtgctcgcgccgggcgggttctacgacggcgcgtggttctcggagatgctgcgggtgtcggggcgcggcgccgtcgacggcgtgacgcaccacatctacaacctcggctccggcaaggacagggacctggcgaggaagatgcaggacccggggtacctcgaccaggtggagaagacgttccgcgacatggcggccacggtgcggggctccgggccgtggagctcgccgtgggtgggcgagtccggcggcgcgtacaacagcggcgggaagggcgtgtcggacaggtacgtgaacggcttctggtacctcgaccagctcggcatgtcggcggcgcacggcaccagggtgtactgccgccaggcgctcgtcggcggcaactactgcctcctcaacaccaccaccttcgtccccaaccccgactactacggcgcgctgctctggcaccgcctcatgggcccggtggtcctcaaggcggcgaccaccgccggcggcggaggttcgccgtacctccggtcgtacgcgcactgctcgagggagaagccgggggtgacggtgctcctgatcaacctgtcgaacgcgacggcgttcgacgtgtcggtggccggcggcgcgctcggcgcggcgccgtgcggcgggcggagggaggagtaccacctgagcccgctcggcggcgacatccggagccaggtggtgctgctcaacggcgaggcgctggcgctcggcccgggcggcgagatccccgagctccggccggccgtcgtcggcgacgggtgcgcggcgccgctgcgcgtggcggcgcgcggcatcgcgttcgttaggttcacggaattcaaggctcccgcatgcgcggcctagccgcctaggcttaattagcacgtgctagtaatcgcgaggttcgtagattatgcagacatgaacaacatttgcattgtatcatgagtttaatcgtttttgataactctgagaaatggagacgtggttatcagctttgcttctggtttgatcactgtaaaattattaaagcacattctgcaccgatcagtgaaggcaagtcagtgagatttgatcatttctaatagagattttttttacttgagt

SEQ ID NO: 3866 - DNA, 289 bp, Oryza sativa
  Clone ID: PAT_MRT4530_10800C.1
ccggtccggggttcgcgccaccgcgcccggagacttgctgtgtcgcttaaatgacgacagaaatgtgcgtgctttgtttgagcgagctctgagcttagtttctcctgaagaatctatagagggggggaaacgatttgctcaatttgagcaaacatacggggatttgtcaagcatgttaaagggggaacaaaaaaagaagggggctttatctaggacatactgagacgccttatctgtcttggaaaacacactttatgacgctggttctcgatacacctatatggatctt

SEQ ID NO: 3867 - DNA, 333 bp, Oryza sativa
  Clone ID: PAT_MRT4530_10801C.1
atgctgacgatgggaaggaacagaggaggagcggtggcggcctggatggaggtggagacggcggcggcctggatcgcggttgctcctcggctggaagaagaccaaggcggacgagggaggagcgcgcgcgggcatcaacgacctccccaacgagctctacgacgtcgcctgggacatcatgctcatagacgggtcatccggatggaacccgacctcgtcggggcagatgctatccatcgcatcgccggcagcggcacgccgtcgctcggccacttcgtggtccgcccggacggccgacgcgacacaggcactggatgggtaattggggattaa

SEQ ID NO: 3868 - DNA, 198 bp, Oryza sativa
  Clone ID: PAT_MRT4530_10802C.1
atgtcgacaactacacacccggacagggaggacttaagtgatctcgagggctgtcaccacctctacacccatctcacacctactgtgctcaagcttagagtgcgtgtgagaagtgaagtgaagaactctattcataggacaggtattggcggcatagaatttgcatctaatagctgccaacaaaccccccacacttag

SEQ ID NO: 3869 - DNA, 283 bp, Oryza sativa
  Clone ID: PAT_MRT4530_10803C.1
tcgtatccctccacgagaaggacgacctcgtgggtatccgccaccaccgccgccgccatcgtggaggaggcggcggtactgatggagttcgtggcgttcgtcacaacacaacacacgccgggcacgccggctgagccagaggctgaagcggggggcgcggcggcgggggcagacaccggcggaggcgaacacgccggtcacagccgtgggctgcaggggcggaaccaatggagccggaaggtccggtggacatctagcaccttgggcccgaaaggcgtcggga

SEQ ID NO: 3870 - DNA, 124 bp, Oryza sativa
  Clone ID: PAT_MRT4530_10804C.1
gccgagattatttggatcatcaaatggaccgacaaggatgggaatgaagtgggctgtgattgtgagtttgtgaccgagaccttaagcttatccatctacgcatctccagaaactcccaatggag

SEQ ID NO: 3871 - DNA, 184 bp, Oryza sativa
  Clone ID: PAT_MRT4530_10805C.1
gggggggcgtcaaaaacaacttaagatttatttattcttaagtgcttgttgatacaatatcaacatggatggtacattgccggtttcttttgaacaaacattaaaacaccgaatccccttttgggccttttgccgattctagcctttttttgggaggacattgccaaaaacaaattttgtcaac

SEQ ID NO: 3872 - DNA, 241 bp, Oryza sativa
  Clone ID: PAT_MRT4530_10806C.1
gcagtttagagggactgtgtgagtgccaagcaggtgaaaatgtggattctattgaaggctatgtcagtttcatactgtcatgtgtagcaggggcaacattatgacagtgtatgaaccaaatgagtgtcagtcatttccttgctggccttgtatggttgcatactttgacatctaccacactgaaatgccagtcagttttctcattttcagattgtgcctgggtcggcttctttcacattga

SEQ ID NO: 3873 - DNA, 456 bp, Oryza sativa
  Clone ID: PAT_MRT4530_10808C.1
aaacaaagcatatatctatctggcccatttacgcaaccaatggccacaaaatcttgttcctattacacagttgcggagagctcacatgccaatctgcatatatcaggattcatgacacactgcgcaccgtgtgcgctgggtaatacataagtatttttgtcatgtgatcaggtactaccacttagcagtactgtccgacgactagcgcccgggagaatctgtccctgtcataaaccagctcgtacgtcagatgactccgtgtaggaagcagtgaagtcgtcatcttgcctcacctgcacggtcagactcgacatctgctaccttctgacactgggcttggaagaggcagaagataggaggtgcgttcacagagagcatgaagttctctacagtggccgccatctcgaacagcgacacctggccgaccagcatagcgctggtgcccaccagcgtctg

SEQ ID NO: 3874 - DNA, 578 bp, Oryza sativa
  Clone ID: PAT_MRT4530_10809C.1
gccaatatcagcgtgcagtcgcctgtcctgcgtgaccagactacagagtcgcccttagccgcaagtgatacactgaggtgtacggtacagagctacgccagtactcgagcataccgcgcaagacccctatcttgccaatacaggctagtcgttttcagatctgtagacaacataccaagtcctggtcaacatctccgcggctggctggcgccaaccaatctcacctactcaggcacattaacattgttcaggccatagtcgcacgcagactacaatctccagcagtttgtgtgatctctactttgattcggaatctggctcatagctcaagctactattggctctttagaccgtggcccattcctcagattgatggtatctagccctagggtaactcatggtgcagcccacgtagccacttaccacccttggcggtgtcttgtaatgagttttaacagtatcgtggcttcggcagttataaataagctcagatatcatcatatgtgacatgtgaaactttgggtgatataaatagcaataaagcttgtctttcatatttaatcaaaaaaaaaaaaaaa

SEQ ID NO: 3875 - DNA, 942 bp, Oryza sativa
  unsure (1)..(942): unsure at all n locations
  Clone ID: PAT_MRT4530_1080C.1
cccacgcgtccgggaaacgcccgcacacgccgccgaccacctctccgtttccttggatctttcagcttcctgttcctcacgagatcgagaaggggggaaaaagaaaacgtcggtttttagtctcgtttgcctcgatcctctcgttcttggttggtcggcgccatgagtaacaccctgcttcgaatctacccttccgagctgaagatacccttcgagctcaagaggcagaattcggggatcctggagctcacgaataagaccgatcatcatgtagccttcaaggtgaaaacgacgaaccctaggaagtactcggtgagaccaaccaccggaatcgttctgcccagagggtcttgcggaatcacaatatctatgcaaccactgaaagagatccctacggattataactgcaaggacaagtttctcatccaaagcgcagtggtataggatggctcacagtagtgagacattcacagttccttgggccgtctctttgaacaaagctttattgagtaattatggatatgaaaacccgacgcttcaacaagatctccctcctcttaagcagacaaggacgacaacgaaattgatttccttgattccgctgttgacgatgccctggccatgctatctatgcttccggctcctatgggcggggggcttgggtgcgcctgactagctcccacacgtacccgccgtgtccctgatttcgccccccccggctgcgcctctctttcgggttcgctgggtcgcctgctggttccgctccggaggtcccgggcccgcccctcgcgtccggtataatatacctcttaaagaatggggagagaaccattcattgtaggatagacaaataggcgttctatctctngaattgttcatatataataaacctctggttcattatacacacacgtttgcttgtaaaaaaaaaaaaaaaaaaaa

SEQ ID NO: 3876 - DNA, 512 bp, Oryza sativa
  Clone ID: PAT_MRT4530_10810C.1
ccggccgggaatccattcgtcgccgccgccgccgccgcccccgcccaatctcttcgcctccaatctccaccacatggccgcagccatggccgccgcggtcgccgcccggcttcctccggccgccgctcgccgggcacgtcttgaagccaccaccccgagctctcccttcgcagtcgcagctccccgccgtgtcatggcgccgacgcgccgcccgcgactgggtacgcgcctcgtcgtggtttccgcgcagtccaacttctccagagttgttcaaacagcatggaaggttggtagggatgctgttgaggcaggaactactctagtcccaggttcggttccacggccagttgccaggataggtgttacctttgtcgctttgtccattgccctttttcttctcacgtctgttgtctccaccgcattcttcgtatcggccatgatggggcttatatacttgggtttcctggctatgaacccaaaggagggctctagggtggatgaaggagccaatt

SEQ ID NO: 3877 - DNA, 592 bp, Oryza sativa
  Clone ID: PAT_MRT4530_10811C.1
atggcgatggcgatgggcctcctcgcgaagaaccccaagataccaaaagagattgctctgcacttaattgggccatcaaaggtgaagaaagaaaccatcaagaatatcatcagcctcacaattgccgaatatgtccaaaaggaggacctcgatgcatcaaaaaatctgaaggttctacagacctatgaggagcttgaagcagcattcgaacctggaaaagagttttgctttgatgcaacttttcatttacagtaggttaatgcagttaaggactcgggatttagatagccattagagatgacccctgcaaccaaaggggcttccagtgccagctgatgattaatagcacaacctacagataaacttattatctagacaatgatgcatacgaacactttttagtcagtacaaagtgaaattatgttgcctggctatctgtattcttgtaaaaacaacatgtttttagattagcaaattttcttgcagtcctcgttaagatggccgtgtgcacctttgcatgtagaggccgggggattataagttttccattattataaagaggaactttcttccaaaaaataaaaaagaaaaa

SEQ ID NO: 3878 - DNA, 480 bp, Oryza sativa
  Clone ID: PAT_MRT4530_10812C.1
tcacttattcaaccaccatcgcagaccggggagaatcgatcggaggttgaaggtccgttctctctcttctttgctcattgatccagtgattcctaggtgtgtctgcttgactgcttctaggtccttgcttgttagtgatcgcctgacgttaattggcttaccggagaaagacctgacccaacagcgcccgtggcccgtggaacggtcaccacgacaaaagccaaaaagactcgcgtaaacatctataagaccagtaattcctcggaagccacggtcgaggcgactccagaaagcttcccctccgcggtccgctcgcctcctcacggcgccaaagcagccaggaagaagaagaaccacgctgtttctaggacgattcctggaacagccaacttctgaacctctatctgcaagactgcaggtaatttgcatgctccatctgatcaaatctcttcgcctcctctcctggcttaaatttcccat

SEQ ID NO: 3879 - DNA, 276 bp, Oryza sativa
  Clone ID: PAT_MRT4530_10813C.1
ggcttgccccgggagttccgccccgtttcttttaggggggccatttttcttttttgcctaataaatatcaattctgtgtttaatagaatatagttttccgttggttgaaactttaatcttgggacagttaaccaaaaattttaacccctatgtttttattgtgagccctggcgttctttaagtgggggtgcctttcttgccatttttttaaattaattgccctttttccaaggggaaaatttttttggtcaactcttttaaagaatgtgttttttt

SEQ ID NO: 3880 - DNA, 429 bp, Oryza sativa
  unsure (1)..(429): unsure at all n locations
  Clone ID: PAT_MRT4530_10814C.1
atggcggcggcggctcgacaaggcggaggacggcggcggcggcggcatgggagggatggcggtggctcgatgaagaggagggtcgggcggcnnnngnncngcnaggcngaggaacggcggntcgncgacgaggaggggcgacggncgaggcnnctaggcgacgganccggcggangggggggcccgcggggagggagggagcgccgggagcggcgacgcacggaggaagggagcaccggcgcacggagctgcggagccggtgggcggagggaggagtggtggccgccgccgcccctcggcaactacctccgccgtcgccgccgccggtggttttcatcgtgccgagccgacgctgccctccgcagccaccgccgccgtggacagtgcgtcattggcggtggcgcgtgtgacgccaagcggctcaagtga

SEQ ID NO: 3881 - DNA, 330 bp, Oryza sativa
  Clone ID: PAT_MRT4530_10815C.1
atggcgtcatcctccaatgttaacaatggcgtcagtgttctcttcctcttcgctgttctcctaattgctgcgtctcagctcgccgccggcaccaactcgttcctgtacggtgcatgcaagaccatcgccggcggcagcgagctcctcagcgtcacgttctgcatcgacgcgctcagctccgacaaccggagcagcaacatcagcagctacaaggaattcgcggtgatcgccgtcgacctcctcacggccaacgcgacgagcaccaagtctgagatagacggcaagctccggaacggcagcggcgacgccgctgcgacgcggtgcctctag

SEQ ID NO: 3882 - DNA, 284 bp, Oryza sativa
  Clone ID: PAT_MRT4530_10816C.1
aaggccgccccctcttacatcaggcagctttaatagaacatagactgccctcacagaccaacacaagtcttttctgcacactctgtcctcactcgtgcgatcctgggaagaatttcccggtcggttacccatcccgaaattgctccaggccaagcatgcttaacctcaaagttctttggagatcggcttccgaaaaagaagttgcaacttgttggtatgagtattctattaatccttttaggccctaggccgggatgtcacatttgatatcagagccgaccctt

SEQ ID NO: 3883 - DNA, 654 bp, Oryza sativa
  Clone ID: PAT_MRT4530_10817C.1
ccggccgggctcttcttcctcctcctcgagacctcggcacctcgcacgccacgcttctcctcctcttcctatcccaatccactcggcgacccccctcgccgtcgccgcgctgcgccggcgagcgccacgggagcagcagccctcgccgctccgcggctagctagctcgtctcctcgtccgcctcgcgcctgctggagatccgccccccgacccccgtgatttcctaatgatttgtgcaacaattgtaagcgtccaggacattttgctagagattgtccaaatgtggctctttgccatgcatgtgggcttccagggcacattgcagcagagtgttcttccaaagatctctgctggaactgcaaagaacctggccacatggctaacagctgcccaaatgaagggatatgccgcaactgtggcaagtcgggtcacattgcaagagaatgcagtgctccaccaatgctgccaggtgaaatgaggctttgcagcaactgctacaaaccagggcaccttgctgcggaatgcaccaatgagaaggcctgcaacaactggtaggaagagtggccatcttgctcgtaactgccctaacgagcccgtctgcacctatgcaacgtgtcaggacatttggcccgagagtgccccaaatctgatgct

SEQ ID NO: 3884 - DNA, 1312 bp, Oryza sativa
  Clone ID: PAT_MRT4530_10818C.1
cttcctcctcctcgagaccgcggcgcctcgcacgccacgcttctcctcctcttcctatcccaatccactcggcgacccccctcgccgtcgccgcgctgcgccggcgagcgccacgggagcagcagccctcgccgctccgcggctagctagctcgtctcctcgtccgcctcgcgcctgctggagatccgccccccgacccccgtggaaggaaggaagaagggagggttgtaacagcctaacaggttgtgggagtcttggaggtgctggttttgtggtgtggtgttcgcagtttggttggagcttggagatttagaaggaaggtttgacgatgagcagccgcagcccgccaccaaaggaccgcaggattcgtactgagcgtacctcataccgtgatgcgccatacaggagagacagccgccgtggtcctagcagatttcctaatgatttgtgcaacaattgtaagcgtccaggacattttgctagagattgtccaaatgtggctctttgccatgcatgtgggcttccagggcacattgcagcagagtgttcttccaaagatctctgctggaactgcaaagaacctggccacatggctaacagctgcccaaatgaagggatatgccgcaactgtggcaagtcgggtcacattgcaagagaatgcagtgctccaccaatgctgccaggtgaaatgaggctttgcagcaactgctacaaaccagggcaccttgctgcggaatgcaccaatgagaaggcctgcaacaactgtaggaagagtggccatcttgctcgtaactgccctaacgagcccgtctgcaacctatgcaacgtgtcaggacatttggcccgagagtgccccaaatctgatgctatcaatgagaggggtgggcctcctcccttccgtggtggatacagtgatgtggtctgccgtgcttgcaatcaggttggtcatatgagccgtgattgcatggccggtgcgttcatgatctgccacaactgcggtggtcgtggtcacatggcttatgagtgcccatctgggaggcttatggatcggtttccccctcgccgtttttgagtgattttccaagtgctcaatcagatgactcttcgttgggaccggcattatgaataatcatatctcgtgctttatgccttaagaatgttagtgtatttcagatacttcagttttcatagtttgtcagcttacttgtatttgtcggttctgctgtttaactgcgatactcgttgatcggtgaggatgaattccagatgggatacttgttttaattcctaaaaaaaaaaaaaaaaaaaaaaa

SEQ ID NO: 3885 - DNA, 519 bp, Oryza sativa
  Clone ID: PAT_MRT4530_10819C.1
aagcaggcacgcctgcaggtgccgggacgcaatacagcggtcgacctacgcgttcggtgttctgcaacaatgaagaacattttcatctttggtgttcttgctataggtgcaagctgcgccactccacaattcgatgtcttatgtcaaaacattacgcacatacaaagtgcaaaaatctatcctgctacaccaacaggggctgaaacgatataatgaggcactataggcaccaaggatagcataccatgtgagcaaccttattgcaataagcctgcattgcaactgctaaacacccaatttcttgcaacatataaagctgcaaactcatcaatgtgactaccaggacactaaggctgtacaacccatatcgcactcagctacaccattcagcagccagcaatctgtacattgaccggaatctgtctcaagctcaagcactcgcggctgttaacttgacatctacatatggaatgtactcttggtgctatactgcaccagatagcattaccaccactcggc

SEQ ID NO: 3886 - DNA, 488 bp, Oryza sativa
  Clone ID: PAT_MRT4530_1081C.1
cacgagcacctacttttggttctctcgctgcgaatcctccgcaaccacagggaggaggagatttctaagcaaaagtcactaaactggtggaacttggattcgaccgggcattcctaatccaagctcttaagttgttcaacgggaatgacgagcaggctgctggtttcttgttcggtggttagaggcttgtaatgatgatatgaaagagttctttctattgctcacgaacctttctagggctggaaattttttacacaatgttggagggagatatcaccattttacctgttgggcctttgtgaaactagaaatcttttcttgcccatataagcttttgtggttcaaacgatggctcatatttctccctccatagaaaacccattttcttgccttcagttccccgttatccaaatcccgtggactttcataccaaatgcttgtccatgatgtgaaattattggccttatatatatggtccctacatgtga

SEQ ID NO: 3887 - DNA, 717 bp, Oryza sativa
  Clone ID: PAT_MRT4530_10820C.1
atggaggtccggcgacgagcggtggcctccgagagcgggcggcgacggcggcaagcctacggcgagcagcggcggcagtcggggcggcgccagctagctactggaaggctactcgcactactgcccgaagctaaggggaggagatggagcgaggaaggggaacggaaggctaccgtgtcgggacgtgcgctgggagatggccgacggcgcggggcgagctcttcggcctcaggccggggaaggggaggaaggagggtgcccggagtcctgcgtcacacgcccacgcacgcaccggttccctcggtgtttggcgacggacggcgacggcaagaacagtgggacggcggcaatggcgtggtcgaggcgaggagcaaaacgcgattgattgggatggggagggatctcagcttgggttttatagggtggggaaggcggtttgggggaggaaccgacatagggcggttgagggtgcaaggatggcgagctggcgcggtcaagaacgcggctggcgctcacgggcggcagaggaggtccagctcgggagggaaaaaggaaaagggcagggtggaaaggaggggttcgaccatgccattttggggagggagagaaggatgggagcgcgagctctggctccacgttttggacgcaagcgcacagaggtgggggcaagcggcagggcggcatgggcggctgcgtggcgcaggctgccagggctga

SEQ ID NO: 3888 - DNA, 2030 bp, Oryza sativa
  Clone ID: PAT_MRT4530_10821C.1
ctacccctcgaagcaggagaaaggaaggagaggcggcgggagggaagtcgcacgtcgtcgtcggggtcggcggcgcacgtcggaggcggaggcggaggcggcgccctccctccctccctccctgtgtcttcccccactcctcccaaaacccgacggccggcggcgcggcggagggctgcggctgaaggagtctgagagggcggcgcacggcgggtaaccacgaccgaaggtattattttcccaagccccttgcccgtggtcgtggctgccgtcgtcgctgtcttctgaggccgccgccgtcgcccgcaccctcgcccgcggccttggctgccgccgtcccgcaccccactcgcggtcgtggatgctgtcgtcctcgtcctccctggccgccgccattgctgtcttccgcggccaccgtcttcgcctgcagtcatcccgccacggctgccatcgctccatcctcgtttgcgtccgtccccgttcatgttcgccaccgtcctcgtcctccgcggcagtggcccacgtccgtctcgccatccacgcccgcggcggccatcctcgtccaccgcggccgctgccatctcctgtgcctgtctcaccactctcgctcgcgccgccgcttccgtgtccgcccctgctgtcgctcttgtccgccatgaccgatgttgccgtcaactgcatccgccaccctcgtccattatgcccggcgtcgccgctgccctcgtccatcgcgccgttgccgtcgccctcttccgccgccgttgcaattctattccagtattccacccgcagctcgtcctccgcgctcgttgcgtctatctgccgccgctgcggccattgtccacagtagccactgacgttgctcttttccacctctgccacaaccgtcgtcctcttccgccctagccgccgcaggtacaccgtcattcctgccagcattatgaaggccgccatgatggcaccagtaagtgaagcggtaacaatgtaccctattccagatagctgagaggccacggcaaatgtcatggcagcaatagctgcagaaaccaccagcctcaacgcggccttgctgttggccgccttggcaaacaccccagcataagcgacaagaacgatagtacccagaaaaccaaacgtcacgaccttggcgtactcaggaccatccttaaaaagaggccgcgatgcagcacataaaggtaaaatactagctaatattgtctgcaaagtttgtgcaacaacgacccggtcatctggagtcacaggagttggactagcttctcgcgcagaaaatatattgggagtggcttgcagtagcagatcaatatcgatggcaatgtgctcctccccatgagcgaaaggagcgccgccacctgcaccacctctagcgaaagggtgtagtactcgttcccctgatgagctgtggccaagtcgtatctcgttctgctgacaactgacggccatagattcctcgcttcggaacaaaacgtgccggccggcatctcctcctcctggcgatgagccgaagatatcacgacgcgttcctgagttgtgaccaagtgtacgtggccgtagtatcggattgagcgcatggagtaccgccataattgtcttataaaccagctggcattgttcatcccaaatgcctacgggcatagggtaaacgaaggtatttagtaatagctttctcagcatcatcaccaacatgatcgccaagcggagatgaaacgctatggagttttctcgtcgacgagacgacgacgcaggatcgtccgtcttctctcagctgggtcggccatctccatggatatcaccctctcccctctcctcaagtttttgcagaaacactcaggagtctcggagtagtagagtgaactcaacttttgcttgcccgaactaacggagtagctaggctatgaatagcacaggaaggctaacgcaacgcaaccgctaaaagcacgcggaagaaatacctcttggaatcagagctttagatcataccgatagatggcaggcctagataaaaatttaag

SEQ ID NO: 3889 - DNA, 329 bp, Oryza sativa
  unsure (1)..(329): unsure at all n locations
  Clone ID: PAT_MRT4530_10822C.1
ctccacgtggccatcnncccccatccatcccccactcctccgctactcgcaccgcaccgcaccgccgattgatttggagaggaaaccccctcctcttcctcctccacctacctctcctccttcccagccagatccgcctcctcctnctccnctgctccctncnagatctcacantccatctngcgagcgcgncgacggggacagctcgtcacnntgncnagatccaccgtctcgncggagtcggagagaccgagnggngggtggtgggtgaggaggatggccgtggggaaggagggcggnggcggcgntggnggngaggggggtatgtn

SEQ ID NO: 3890 - DNA, 678 bp, Oryza sativa
  Clone ID: PAT_MRT4530_10823C.1
aacgggccctgcccttaagcgaccattgcaggctgatttacacctgcgcatcctgccaaataatcttgcttgcagtgttcacaatagcaccaactgtagttgagcggccattggagacactaaccatggaaaagtcatagggttaaataaattcacctttgggtggagatctctgcgggagatttggtcatattaataccactcctccagttagatggtactatgaacgttcctgatctttcaacctccagttgctgaagtaaaaaaatcaaataagccgtaacaacaaccttgttgcagtaactttgtaccctacactctcctttctttcataatgaatttggctggtgatttttctggccaaacaaaagaataaatgatctccctcatttacaagagccaggtagacgggcatcaagaattagcaaatttctgctccacacgctgcaaggatttacactctgcaagatgctgtaaaaccctggagacttcacagcaaactgactcagttgcatattggtcaaaaaaaaacttgtatctaaatattatctcgaactcctcttgctgaaattcattaggaaggatggtcctccaattcactgcttctccaacagaacaaaagccataaagaagtgaaaggaaggtgataggattcggcacatagcccttttcctgcag

SEQ ID NO: 3891 - DNA, 687 bp, Oryza sativa
  Clone ID: PAT_MRT4530_10824C.1
atggacgggcacgtccggcggctgctgaaccgcgtgtcgatcgccctggcggccgtcgccaccgccgcgctgctgcagctcttccgccactcgtcctcctcctgcttcgtcggctcccctgcctattcgtccctatcgctggcgcccttcccgcgcacctcgtgcgacgctgcgtcccgccgcgtcgtcgaccccaacctccgcctcgccaagctccggtcctcgccgcggtggcggcgccgcagcgcagccctctccacatccgtgttcccacgactccgccggctgcgcctcctccgcagatcgtcccgcgtcctctgcgtggccgcgggcgcggggcaggcggtcgacgcgctccacgtggccggcgttggggacgccaccggcgttgatcttgttgacttccctcccctggtaaggcgcgcggacccgcacaatctcccgttcttcgacggcgtgttcgacgtcgtgctctccgacgaaccgatggcgctcaccggcgcgctcttcccgtcccggttcgtggccgaggccgagcgcaccgtccggtggggcggcgcaattgctctcgccatcgaacggcatatcgatctctctaccgtcgcctccctcttcaaaaagtcacgcgtggcggcggcttggaatgctaccttggatggctcagcggcgaccatgtcattcgagtaa

SEQ ID NO: 3892 - DNA, 492 bp, Oryza sativa
  Clone ID: PAT_MRT4530_10825C.1
atgagaggcacaacaacaccctcgatagggagagcgacgctcgaaagcgtcattgttgctggcccggcaaagaccgggctaggtttttacccgccacccaccgcctgcctacccgcagctgatgcaccattgctccaccaccatcaatcctctatcagcgcatggacaccgctgcaccggtgcccctcgccggtcagcctccgcaccataccggcctttgctgccggccacggctccacatgccgagctggcctccgctatctgcaacgcttcctcgtaccaagccggccttcgccatcggctggacctccttgcgctacccgccgccttaagccttctcgtcgtacccgtcattcagccgacagcgttcccagccagcacccagcttcttccatccccgccgttgtctcctccttccgccaaaggcactgcatgggcatggccaccgtcaccgtcgcgtcgtcacatcctcccaccaagctattgccttag

SEQ ID NO: 3893 - DNA, 444 bp, Oryza sativa
  Clone ID: PAT_MRT4530_10826C.1
atgtcattttcatcgtggaacctcaccgaggccacatcggctattcacgacatcacggtgaacggctactctgccaccaagtccggcggtgaaaacgacttcccgtccaggcgactcaccgtgggtggttacgagtgggagatccgctactacccaaaggtgttcatcacacatggcgattaccgtattgcgttcaggctcgtcttccttggacctgcaggggcgagaggcgtgaatgcgtcgttcagctgccgcctgatggatcaccgctccacttggacggaggcacgttggcgtgatgcaagcgggaaccagcacgactgcagggctgaaactgggtcacgcaaatttcacctcgccagggagagctctgactgggttaagctcattaaacaggacgatctggagaggagcccggctattttagcttgtgattctgaatga

SEQ ID NO: 3894 - DNA, 4488 bp, Oryza sativa
  Clone ID: PAT_MRT4530_10827C.1
atggagaggggggagacagcggctcgagaagagggcgtgccgcaggcgacggcctcattgctacataatgagctttcttcgggaatcgaggtgcaagctcaagagcgtgtaggtcagcaacgattaagcgggcaaactaatgatttacttctctcgtttttgttgttactattcgataggattgatcccgatgcggtgtttagggtgtgcgttcagtttggtcaatttacagctaaacttgttgatggaacttgtgttcatgtgccacgaaagtgcttggaatgggttgtggactatcagcaatgcactttggagagcttggagaaggaccttgcagcaagggtaacatggggcaagtgccaacaggttgtgatgagtggatatgacatgaccacgggtgaggaaacaccgtttaaggacaatatggatgtagtgcatgcattgtttgttaggaaaagtgataaaaagttgtttctgtatgctgatgtggaggacaagcatgatcagttggttactaattcatccgtttcagaggtaaatgagttatttatggatgaggttgtgacagctagacatggtgatgaatcaaacaatctgcctgacattgattgggatggattggaaatagctcaaattccacaagagcaagttcatcaccaagtcattgattgggatggattggagatagctccaattctagaagctgatgtaggttcttcagtgcctttgatgggggaagatgacatgtatgcattcgttggacttagagctgaggatgagagagctgaacaagctaggctacaagctgaaaaccaaagggattctgctcctaatccagctgcagatgttgcccaaggggacttaaaccttaacgaggcagagatagatgttaatgatgtggttcctggtgaagctggagttttctatgatagggatgatcctccaatggaagttggaagcttatatataagtatggttgagtttaggtcagctgtgaggcaacatgctataaaggggcaatttgagttagggacagagaagattgacacagagaggtttcggggctattgcacagctgagggatgcccatgggctattgtggcaaggttacagcctgatggaaaatctgtgagggttactttgaacagatttccccatcattgtacatcaaccgcgagagttaaaaccaagatgtcatcctacaagtgggtagcagaaaaggccattccctttctaaagaaggacccaaatatgggtgcaacaaagctacaagatgagttgcaaaccacacacaaagtcacagtgggatactcaacagtttatgcaggtatgcaaaagtctatagagcaaatatttgggacgtgggaagagagctttgcatttttgtttaactttaaggctgagattgagttgaaaatgccgggaaatgttgtggagatagatgtacaggaagatggtgatgggatttattttcacagattcttttgttcattcaaaccttgcattgatggtttcataatgggttgccgaccttacttgagtatagactccacggcacttaatggaaaatggaatggtcaactagcttctgcaacatctatagatggacacaactggatgtttccagttgcatttggattctttcagagtgagaccactgacaactggacttggtttatgcaacaacttaataaggcagtaggcaatcttccaaccttagctataagctcagatgcttgtaaggggctagagaatgctgtgaagaatgtttttcaaagggcagaacatagagaatgcttttggcacttgatgcagaatttcataaagaagtttcaaggtccagtgttcgggaacatgtaccctgcagctaggtcttatatgccagaaagattttatcattacatgaataaaatttatgaggcaaattcagatgtgaagccatacttagaaacctatcacaaattgctttggatgagaagcaagttctcagaagagataaaatgtgacttcatcaccaacaatttagcagagtcatggaacaaatggattaaagatatgaaacatcttccaattgttgagcttgcagatggtattaggtcaaagacaatgaatctattggctaggaggaggaagataggtgagaaattggatggtgtgatgctatctattgtggtttgtcaactcaatgcaatgactagagaactgggccacttgaaggtagttcaaggtgatagagaccaagctgaggtgactgagatcactgctgaacatcagattattagacatgctgtcaatctagtaaaccatacatgcacctgtagagagtggcaagtttctggtaaaccatgcccacatgctttagctctcataatatcatatagaaaccctaacatggctgattatttagatccttgctattcggtagaaaggtataagcttgcatacgcaggagttattttaccacttccagataagtcccaatggccaaaagtgaatattggttttaagttgttgccacctcttactaagagggaagttgggaggcaaaggaagaaccaaatagtcgggtgccttgataagggcaaggctaggagcaaaggcaagtggcaagttcaatgtaagagatgtcttgccatgggccataggtcgacgtcgccaaaatgtcctttgaatggaacgaagaaaaagccaagtcgggccaaaaaagggagaccacttagtgaagcaaattgtgcagcaagtactagcatagaaggcacacccaaaagacagaaggccacgctgctcaacctggggtgcagccagtacaacgcgaccccgactgccgccttcctcgccgccctcaactccaccttcggcgaactccgcgccaacctctcatctggtggtggtggtgaggggggtgggttcgccacggccgcggagccgcgcgccgccgcgccggcgttcgcgatggcgcagtgccgcccctacgtcacgcgcggggactgcgtcgcgtgcttcgacgccgcggccacgctcctccgcgccgcctgcggcgctgccaacggcgggcgcgccattctcgacggctgcgtcgtgaggtacgagagcgcggccttcttcgaccaggccacgctccccgggaacacgcaggtgtgcaacggctccgctgtcgccggcggcgggttcgcggacgcggcgcgggggctggtcggtgacctcgtggctgccgtgcctcgcgccctggggctcgccgcggcggccgcgggcgccggcgtgtacgccgcggcgcagtgtgtggtgacggtcggggagggtggctgcgcgcagtgcctggaggtggccgtgaggaacatcgacgggtgcccgcccaattccgacggccgcgccgtcgacgccggctgcttcatgaggtactccgataagccgttcttccccgcgaatgcgaccgtagacctggcgccatacttgcgatctgggaaatcagatcggaaaggagccatcataggaggaattttaggaggtgtggccttcctgttccttcttggtctattagctttcttgtggacctggcggtctaggaagctgttgaagcctcgtagaggagatatacttggagcaacagaactgcagggtccaacaagtttttactatcaagatctgaaggttgcaaccaataatttctgtgaggaaagcaaacttggagaagggggttttggagatgtatttaagggtttgctgaaaaatggaaaaactgtagctgtaaaacggttgacagtgatggaaactagcagggccaaagcagattttgaaagtgaagtgaagttgattagcaatgttcatcatcggaatcttgtcaggcttcttggttgctctagcaagggctcggaatgcctgcttgtttatgaatacatggcaaatggaagcctcgacaagttcctcttcggtgataaacgtggtacgcttaattggaagcaacgatttaacatcatcgttggcatggctcgtggccttggatatcttcatcaagaatttcatgtctgcatcatacaccgtgacattaaatctagcaatgttcttcttgatgatgagtttcagccaaagattgctgatttcggtttagcaaggctcctacctgatgatcatagtcatctcagcactaaatttgcaggaacattgggttacacagctcctgaatatgccatccatgggcaactctctgagaaggttgacacatacagctttggtgttgtcgttttggaaataataagtggcaggaagctcaatgatgcaaggctggatcctgatagccagtacctacttgaatgggcctggaagctttatgaaaacaacaacttgattgaattggtggataaatcattagacccaaaagaatataatcctgaagaggtgaaaaaaataatacagatagcccttctctgcactcaatcagctgttgcttcacgtccaacgatgtcagagcaacaagtggatgtttacttgtga

SEQ ID NO: 3895 - DNA, 1797 bp, Oryza sativa
  Clone ID: PAT_MRT4530_10828C.1
atggatacacttaagaaattctcattgtcgacaagtgatgctcgtggaccggataagttgagtattgggagtacaaagagagtagatggaacagacgataccgacgagatcgtagttgatggattcgacgagatctcccggcgacttggctccgaatactctggcttcgcaagatacatctctttccaatgccacacatcccggagccaatggaggtcgagatggttctatctagagctcaaagaacttgaaccggttcttgtcatacccgaggttcagccggagcattccgagaactggacttctaaacctccgttgacaccctctctccaagcctttgtcaacgctgtgagcgaccttcgagagcaaggattgaccggctatgaagtcattaaggactttgtcagcggtcggatccaaccgctacaagcccgtgctcaccccgtgttcgactacacgggagcagaggatataactcgaatctcttcgcgggatctccccgccaacatcgtggcgcagcgggtcaaggaagtcttgatcagtccttcctctacggtcgatgaaacaccggctccgcgttgcggcaagtcggcagtctacaaggcggctgctatcaatgttctgccgttgacggacgttatcggcccccttgtcaaccaccaggcctccgcctcgttgaaggacaaggatgccgacgaagtcgccaacatcccctccgttccagccatcgcaggaggcagcgggacccagaggaagccttgggcgaggtcgagcgctcccgccggttctcgacagaaatctagtggctccgaggtcgctcctgttgtcactgagtccgccgggcctgccgtcgcgcctgtggccgcgtcgtcgcccgaactaacaacttggtccgatatgatggccgagtgccgccgcctcctcgagaacacttctcgggaggtggcggcccagatggatcgcgcggtggcccgtgcaacagcgtcggacggaaaggtggcccggctggagattgaactcgaagtcgccaacgacgaccttcaaaagatgaaggagatcgtggccagtaacaagatgcagcaccagggcttggagaagaagatgaacgacctgcaggaccacctcttctccctccgcgactccctccgcaagagcttcataggccttcaccagctagccttggcgtgtggtgtgatgtcttctatcccgacgcacctcgacgagacgtccttgacgttggcgttgtcggagctggcgggcgagatggaggtcatcccgtcgcggcatactgccaaggtctcgaaggaaatctccaacgggattcacacagggcgtgtcacgtcctcgccgtcttttattcttcatagctgtgtggattccgaggatgtccagcaatgcggatgtcccgatgtcgcgatgatcgacttgccctctttgggcgatatgcctgctcccgatgtcgttacggatgcggttgtgctcggaggcgtgggcgcggcctctggcccgtttagtccgggcatagtcgggctccctcgcgagaactcagatctcgaaggtgtcatcgccgaacgagacaaacgcatcgcttcttggaggacaaagtttgaggtcaccgaacttgggctatcgctcgtggtcgtgaaaaaagacaaggccgtggaggctctccgaggtcgcgaggtctggatgaactcgtacctcaagagctgttgtaatgccatggccgacatctaccaccagctgagggtcgatcgcgcggaccccgaggagaacacgacgggctacttgttctag

SEQ ID NO: 3896 - DNA, 159 bp, Oryza sativa
  unsure (1)..(159): unsure at all n locations
  Clone ID: PAT_MRT4530_10829C.1
gaagaagattgcctacaccttattcattacagtaagatcgttacacatttagtttacttntngttgatctgncactcatnatactgttgnngnccacnanaagtaaactaaatgtgtaacgatcttactgtaatgaataaggtgtaggcaatnttcttc

SEQ ID NO: 3897 - DNA, 1642 bp, Oryza sativa
  Clone ID: PAT_MRT4530_1082C.1
actctgtgaaaggattctggaactcacccaggaccatactgcaggtcaaatttacactcaaccacatttacaagcaaacgtgtgtgtataatgaaccagaggtttattatatatgaacaattcagagatagaacgcctatttgtctatctacaatgaatggttctctcccattctttaagaggtatattatacttcacaagaacggaagacaaccacctataatgaagaaatatatttctaccaagagaaacagaaagaattgatcagccagagggacaaaattctgcaaaacgatgcgtatgttttgcagctattctggctaaacattgcttcccgccattaagtatccaatgaagacgaagaacgcaaagacaaaaggcacaaacagagctgtgaaacccccatcggtttatgatctttaatgtctagttcaatagtaagctctaaggaatattctgccaacgagcaatgcttaaagataataacctcgtcatgtgaagcttgcgatccagatgtatatcccttccttgatgcagcatcgaacgtagatggcatttgcacttcatggtccacatctgaatcaagggaatcaatctcatcctcttcttcctctggcacaggggagggaggattggcagggatgtagaccaccctcagcttgaactcctcgaccaccttgcctgcctctttactgaacatgtcactgtgaatgtccttctgcgttgtgccatcctctaccacgacgctttggatgagaaacttgtccttgcagttataatccgtagggatctctttcggcggttgcatagatattgtgattccgcaagaccctctgggcagaacgattccggtggttggtctcaccgagtacttcctagggttcgtcgttttcacctgttcttttctttttggttctatatctctgtctgactcagcgtcgaaacgtcgaactcttcttgccacccttaccaaaataacagtaccagcttgttgctcaatttctgaacaccgtggccagccaccagcttgtttcccacattgtttgattggcaatatcgccctcaacaacaaagagctgagccaggcctcgaacaccccgaggcaagccccggcgacgacgtcgaggacgtagtgccggccaagaagcaccctggacgccgacgtggaggcggcccagaggaagagcgcctcgcgggggaagccgccggccgcgaggaaggcggcgacgaggaaggcgcgggaggagtggccgctggggaaggaccagtggtcggcggcgacggccacgtacatgtccgcggcgttgtaggccgggcgagggcggcggacgatgagcttggcggcgccgacgaagaggatgtcgagcacgaggccggcgacgaggccgacgaggagaggggataccttggaagaggtggtggtggagatcaggaggagggatatgggcacggggagccagattcggccgtcgccggcgacctcgagggccttgaggaggaggcggggaaccgggaggaacagggcgtggaggcggagggacacggccgcgtccagatccgcaagtccgccgacgaggggagacttcgccggcgccgtcgtcacttgggccttcgccggcggcgaggtggatgcgggagccat

SEQ ID NO: 3898 - DNA, 1614 bp, Oryza sativa
  Clone ID: PAT_MRT4530_10830C.1
atggaggttttccgtggtgtggagtttgcggcgctgcggctctggccgtgtggctcattcctccacgccgacgaggacgggaggtctgtctaccacggcagcgtccgcgacggtgacgcctggttgcccaacgcggtgtgggctgtcgaggagctcgtcgccggggcgtcccatacgcgctacgtgctccttcgcggcgcctacggccggtacctcggagccggagcccccgacgcccgcgaccgcgaccaggagcgctgcgcctgcccgctcccctcctgcccgctcccctgctgctcgctccaggcggcgcagcgcgaccgagatgatgctgagcccgacgacatcatgtggcggcctatcggatgctccggcacggacattgccggcagcgtcgtccttctgcaggacaggtccgggcgctacctgcgagggaaccagggtttcctgtctcgccaccacggcgtctccgtcgacgtcaacatcggcaacgagatgacgttgcggtgggaggttgtgcgcgttcgagtccccactcgtccggagcgaccgatcgtgcctcacttgccgtgctggccccttctgaatagggagatccaattcgtgactgtcgatgacgccgataacttcggtttcggttcggttcgattcactggtcgatcggtggatctcctgagagaggaccttatgcgacgtattggttacgacgacttcaccatgtgtgtccgggccggccgccatgggcggctcacccctctgttcattgacctgcctcacagccgggagacactgtgcattgttcttatcaggcccaacaccccagtgaatgatcggttgctaacatcaattctgaaagctgaggatgatgctacaaaggctgctgctgtggagctgcagcaccggcaagaattgctgtgggagagggaggaagcgctaagagtccggacggagacagcacttcggcgatgggaggggaggcttcaggggagggaaagagcaaccagagtccgggaggacgcgtcgctgcagcgctggatggagggtctggggaggagggagctcgccctgacgcagcgagaggagagggtgagcgggatggaggcaacacatcgagcggctaccagcagagataaaccctctgcacctctactgaagaaggaggataacatctgggagaaaaggcagatgtcattgagtatttcccttctgactccattggcactcctattctctgtacggccactcatacctgctgaatatgatcattacattttgatggccttcattgccatttggggattgggcagcctggcttttcaatttggattgtttggatctaattctggtgagaagtccttcagccgcttcgtctttattagtttcactgccctggtcctatacactcttcacttggagatgatggaagcgaagggatactctgcagcacctttgtcaccattggcagatgtcagtaatgtcaccctgttcccagtggtactggatgatcaaacttggacagtgattttctggatctactttgtgctcgtgctttccggacatctgtatgcttgggctacggcttacatcacagggtctgacaaagatttggagtag

SEQ ID NO: 3899 - DNA, 810 bp, Oryza sativa
  Clone ID: PAT_MRT4530_10831C.1
atggccgggtacaccgaaattttggacaccaaccatcacgagcacaaggtgtgcttggttcgcaaggacgaacctttcatttgctctggctgcaaagagctcggcttcgagctccggtacgcttgccacactgcgggctgcaaccatcagtaccacaggtcctgtacactgcagcctctcaacactcgcgtgccagctcccttctacaagcacgacttcttcttcttcaagtcgttacttaagtatgacttgtatttttacatatttgtacatattttgaataaggtgcgaggttacgtgtactactgcccggacaagaaggtcagcctgcacccttgctgcgcagatctcccccgcgtgataaccaccgagacggtgcagctgaaactggagaggaagatcaccaagaaatgcggcatgtgccacgagcggaatcaggggagcttcagcaacccatgggcctacgcctccagcgagaagatgatccagctgcacgtcgcctgcgtccggaaagctctcgtttcgcagttcgagtcgaggctttacggcgtgcaaaagccgaagatgctgctgccgccgccgcctgctgctggagcaagcgctgcttcttcaactagtagttcgactgccattgtggaatgcaacagcttccccgtgctcgaggtggataagtaccggaggaaatcggccgggttcctcgatacgttcaggcggatcgtcagggcagtcatggccatggtctcggcggtgatcaccgggaaccatttggagatatacatggctttcatagaattcttcaaaccgaactga

SEQ ID NO: 3900 - DNA, 291 bp, Oryza sativa
  Clone ID: PAT_MRT4530_10832C.1
atgaactccagagtccacctgttgaatggcttgcaaaccctatcgatgtgaaacttcgagctggatctcaccgtacctacgaagaatagctctaggccatctcgaataaagacctggctttgtgccgacttctacgtggctactatcatttatgctccctctgcttgaaggatactcagctaataggttgctgatggtgaagagtgcatctagtgatgctggaaaatgcattgctaacaaagctcagaactgtttgtgtatgtccattcaccaacatgctagatgcaacgt

SEQ ID NO: 3901 - DNA, 647 bp, Oryza sativa
  Clone ID: PAT_MRT4530_10833C.1
tgcaggaattcggcacgaggggacggagggagtatcatcatagctgatattaaatttgatcctactgcaacatatcatcaaaatagtcttctaaaggttattttgttcactaattagcagatgatttactgtatctttttcaatggaatagatgagtaactatatcataataacatctctggttacttgccacttagttatcagcatattcactgtgtggtagctacactctaaaaatgggaacatctctgtttgtaatcagatgaatccacaggatattatttacgtttactggtttaggtatggcttaatgtagacaatgtctcatatttagcatgatttcataaaatattgttgcatcacatgaaaattcaggatgaaatgactaggaactactttacagaaaggatcgaggattggactaaggtgatggttggtgatgaacctgtgttacaccagcaaaaagcacaagaagtttctttttgatcagcatacaagtgtatattttcatgagcctctgaagcatctccagctaaacttttccagttacaggcagtcataaatacattgtttaaacaatgatctggtttgtattcgtcaggtccatgcaggcctaaggaagagggctcgctattaatgtcagtgct

SEQ ID NO: 3902 - DNA, 264 bp, Oryza sativa
  Clone ID: PAT_MRT4530_10834C.1
atggcaatcaggaaaaatagaagagtcaaaacagagcttaacgacaacacctggctgtcatcctttagacagataacagatgttgaaactcttcatgagctagtacaacttggaagtttactcacacaaatcactctcattgaaactggggaagataatattgtgtggacaagaaatgctgcaggggcgcttttgaagactctgatcatctattcagaggatgtgatctcacaaatcagatctggcaatcaatctcaacgataa

SEQ ID NO: 3903 - DNA, 576 bp, Oryza sativa
  Clone ID: PAT_MRT4530_10835C.1
atgggcaccccgcaggaccgtgcgcctacaccttatgagaatgataaggcgctgcacttcctgcgacaccacctctgcgccacgctcaagaatgagtatatgggattgcggagcccactcactctttggactgcactaaagaagcggttcgagaaattgaagtacaccatcctgccccaagcagagcaagcgtcatacaaggagtatgatgagatgatcgacatcatgcaggtgtctgggtctcatgatgaggttctccataagaattttgtcttccagccacctggcaagagtgttggtcttgaagtcaatgctagaagttgcaagggaggcaagggcaagaaggaagccaagccagctcgcaatgacaagccatatggccagcaggaccagacatgctacaagaatgccaaggcgtccgcagaggcacacatggttgaggctcacagtacggctactccctccaccactactccacttgacgcccttgcagctgcagcaagtacaacaaatgaagaggccgtcacacaggagcagatctttgtagagctcaatactctggttgattccatttga

SEQ ID NO: 3904 - DNA, 1543 bp, Oryza sativa
  Clone ID: PAT_MRT4530_10836C.1
tctcggcgggtacaccatcttttcattccatattccttgtcgagatccaccgaccgttctcgaatggtcgagaaagcgcagagtatagtcatttgtctctgcatgatccgacaaggccttatccgctctgggcgtccccagccgaagttcccttaggttcctcagaggccttgtcaggatagcgtaaagggacatgaggataggtttcaactctaggtgtcgtcatggtgagggatctctgggtaaaacacttggcgatattatgtacctaatatcaactttgttggagtagaggtaatgggaggatcgctacaccgctagtcgaaaaccagttgtagccccaactcgaccacattggtcgaggaccatgtagtagtcataactcaaccactagaagtggatgtagtggaagaaattgctacaccgctggtggagaaccaggtgtagccttaactcgatcactagaaataaaggtagtgggagtatcgctacacttctggtcgagaaccagttgtagccttaactcgaccacgagaagtaaagccagtgggagtatcgctacaccactggtcgaaaaccaggtgtagccttaacttgaccatggttcgagaactagcgagtagaattatctctcgaacacaaatggaagttgcggtgcgagaaattgctacgatttactggttcgagaaccagcgagtagaattatctctcgaacaccaatgaaagttgcggtgcgaaagattgctacgaccttttctcaaataacccagccatagccggtgctatgagataggtcgtcggtcttcgttggtaggttgggtgtgacaactctgcatttgtcgagaacgttctcgataatgaggtgttcttaaccacaacctactcgagtgttcaattgttctcagctggcagtgacacggcaggaattttggcgacagcatcgtggcagaaaacactgagttgaggttctgcgcgatggtgacgacgattccgatttcgtcggggacgtattccggtcgtgttagatctctctatagccgaagtcgtcgagtagcttgttgttggagaatccatctcttgaacccatctcgtcgaaatcaatccgagtagtccttgtcgtttccatgtagaactctggttgtctttccttatccaaaactgcctccatatcactccgtccatccaatgtggcatccgtcaatcggtccatgcaagcgccatcgttcgtccatcgggcggggagcagcttgtcggtcctccccgcgtgcgccgccagccgctgagttccttcctgcacgcggcgtcggctgccgtcgaagtggacaaagaaggagtcggatttcccgcgctgccgacgagggcattcatctcctccggcgcgcactcgccgctccggccgcgcagcacgcacccaacggccccatccgcggctggacgactggacctcgtcggccagcacgctgcgtgtgaggggaccccgccggccaatgccgtgcgcgaggagtaactcgtcgatggcggccgaacatcccaatgagcccat

SEQ ID NO: 3905 - DNA, 921 bp, Oryza sativa
  Clone ID: PAT_MRT4530_10837C.1
atggctcgcaagaagatcgtcctggaccgcatcgccaacgacgcgacgcggcgggcgacgttcaagaagcggcggcgcgggctgctgaagaaggcgagcgagctggcgacgctgtgcgacgtggacgcgtgcctggtggtgtacggggagggggacgcggagccagaggtgtggccgtcgacggaggtggccatgaacgtgctgcggcagttcagggcgctgccggagatggagcagtgcaagaagatgatgaaccaggaggacttcctccgcctccggatcggcaagctcaaggagcagctgcgcaagatggaccgcgacaaccacgagcgggagacgctcatcctcctccacgacgccctccagggacgcctcggcacctacgagtccctctccgtcgagcagctcaccagcgtcgactgcctcgccagcgccaggctcaaggtcatcaccgaccgcctcgtcgagatccgcgcccccaacgaggacggccaggtgctcgttcccccacctcctcctcccccgccggcgctccccgctcctcctccgcctccggcgccaatgcttcctctcgcgccgccgccgactcatgttactccggccatgccgctgtcttctatgccgccgccggcgttccacgggatgaaccaccaccaccaccagaaccacttcatcaaccatggcggcaacgaccagaacgcctggctcatgaacgtcgccaggaacggcggcgacctcggcgccctcgtctacagcgccttcgccagcagctcctcctccaacaccggtggcgccggcaccagcgccgccggcgccgccgccccgggccctgacatgatggatctcgccaacccggacatgccgggattcgggtgtccctgggacgacgattctgcggggccatctttccctcccatgtaa

SEQ ID NO: 3906 - DNA, 2823 bp, Oryza sativa
  Clone ID: PAT_MRT4530_10838C.1
ttaggtagccagtgtggtccgaggacaattgtcaactgagcaggccaggatgtcccggtaatcgcgtgagattgtgaaatgatcatacacattgccgtcgcggctcttcttgtactcgaatagcatggatgaatgattgaaagccgtgagcttcacgaagccgaagtcaaagtctgtgtagtgactccatttgatctttgaagtggtgaattctgaaaggctggcaccaccacctccaacgaccacatgcgtcgtcgctttgaatgggccgttgtagtgatccgaagcgttaacgacacactgaccctgataaactggacatgttctttcatagctgtgaacatgaccatagaaggcaagatcaactctgtacttttgtaatagctcctctattgtgtctcgccccatcggctccccaaatgtaccctgttcttcatagtaggagcaggatgagtacccaagaacgcggtgagcaaggaatatgagccatggctgcttctgcctgtcgacagatgataggcattgctcgatgaacttgtactgctcggtccctggcctccagtcctcttctgtatgggcaatgcagaacctgaacatgccgtagtggttctcggcaggagtgtagaatacagtttgagcaggaacaccacattctcctccggaatcaaggtttccgtagaaagaaccagttccaggccaatccctctcatgattaccactgccaatcatgtatggcacagtcgaagcaatcggttcgatctgtgcagtgaactgatcccactgcgacaagtaaccatttatgtagcaaatatcccctgtgtatgcaaccatgtcaatgttttccaggtctctgatgatctggtaagtagtgttcagtgaacctggctggaagtcattgaactcatttgaaccatctgcctctgcttcattccaagacttcccttgtgccaaacgtgggtaaacaggcgcctttggatttgcaaatgcgaccttgtttgagactgcaattagcttcggcttcaataggccacctgaaaagagtgcaaatgagaaatcttccctctggttgatcaactgaagcttcaggtagcccttcccagacttattatagccatcattattgaagtttgcaaattggtacttgataggtgccgtgcatagcaccgggggacgctgcctcttgttttcaggctcacagattgcagcactaaaattagctggagaaaacactccaatccagtcgtcattggaggggcttggatggaagaactctacctctacccattcactgttctgacccttcagtccaagaacccaaggcgatgccttgacatgcgccgattcgttgacggcaaggaccgtcctctcgacagcgatcctcgacagcggctgctcaccggggtgcgccgccgcgcagacaatcagccatgtggccaccacccaaagcatattcctgtcactccttttctggtactcaaacaataaggatgaatgatttaaagctgtgagcttgacaaaaccgtagtcaaagtccctgtagtaactccatttgatatttgaagtggtgaattctgagtcggaggtaccagcaccagcacctccaacgaccacatgtgttgtcgcggtgaaaggaccactgtaatgatctgaaccactaacaacacatttattctgatagactgggcatgttctttcatagttgtggacatggccatagaaggcgaggtcaaccttgtacttctgccaaagctcctgtagtgattctcggcccatcggttcctcaaatgtaccctcttcttcataaaaggtgcaggatgagtacccgagaactcggtgcgcaaggaatatgagccatggctgcttctgcctgtcgacggacgataggcattgctcgatgaacttgtactgctcagtccctggcctccagtcctcttctgtattagcaatgcagaacctgaacatgccatagtctgtcgcataccataattttgcacggttctcagcaggagtgtagaatacagtttgagcaggaacaccacattctcctccagagtcaaggtttccatagaatgaaccagttccaggccaatccctctcatgattacccatgccaatcatgtatggaacagtcgaagcaattggctcgatctgcgcagtgaactgatcccactgcgacaagtaaccatttgcatagcaaatatccccaatatggacaaccatgtcaatgtttttcaggtctctgatgatctggtaagtagtgttcaatgatcctggctggaagtcattgaactcatttgaaccgtctgcctctgcattctcgaggccaccagaaaaaagagcaaatgagaaatcctccctctggttgatcaactgaagcttcagtttgcccttcccagacttactataaccattattattgaagtttgcatattggtacttgataggtgctgtgcagagcattgggtaatactgtggaacaccataagcctcacagattgcagaactaaaatcagcaggagaaaacactccaacccagtcagtattggaggggtttggattgaagaactctacctctacccattcattggtctcacccttcagcccaagaaccaaaggggacgccctgacatgtgccgactcgttgacggcaaggaccatcctctcgacggcaatcctcgacagcggctgctccccggggtgcaccgcagctgcggcccaaagaaccagccatgtgaccaccacccacagcctcttcaaattcgagtcgaaattggtgtgggactggaattcagctagtctagaaattagatcatttacatccat

SEQ ID NO: 3907 - DNA, 473 bp, Oryza sativa
  Clone ID: PAT_MRT4530_10839C.1
ttttttttttttttttttttttttttttttttttttttttttgggtttgggtttttttttttttttttttttttttttttttttttttttttttttgtgggaggaggaaattaaaaggggggggaacccgggggggggaaggaaaaaaaaaaaaaaaaccaaagggggatttactgggggggggaggctggccccgggaccaatttagttgggaagttaaattggagggggaacccaaggagggaaggctccgcaccccaaggcaggagggggggggagacccaagggggaaggggaggggctagccgccaataggaggacggaggccccgggccggccaccggggccaacccggaaatgccggaacgggagccggaagaaaaccatttgtaggctgcggggggaactggaaagccaggcgaacccaaaaaaaaaaggtatcgggaagaaaaaaggtaaaagaccggagggcc

SEQ ID NO: 3908 - DNA, 555 bp, Oryza sativa
  Clone ID: PAT_MRT4530_1083C.1
atgagatctccggccgccgcggagttctccgacgcgctgccatctccgacctctcccgccgcgacgccatcccaccccagctccggccgccacttctacctcgccgtcgaccgcctccagttcaagatgaggacgctcttggagctcctcggcgtcgtcgccgaccgccgcggcgcgctgccgatcgccgtcggcgtctcctcccgcgacgagctcgatctcgtctgcgccgacgtcgccagcctccccttcgtgtcattgtcgccgctgtacagcgatcaggctgaatcagagcgagcatctgttcttgacaagttccggcaagcaacaatccaatggaatcatacaaaagctgctgctgctgatattgcggatagtcccaagactgaaagctcactagaagtttcaattgagatttttcaggaagcttacttcagacatggaatcgtgattaacatggttgttggtggcgaggtagccactctcaaggctctagaagaaaccagtggtctgcttattgcggagatgccaatacatgtttcggagatattatga

SEQ ID NO: 3909 - DNA, 2184 bp, Oryza sativa
  Clone ID: PAT_MRT4530_10840C.1
atgccgcatgacctcggaagcctccatcgccagatgctgagccagggggaacccatcctcagattcccctgccagatccaacgccattggtcaacgacctgccgtagcctcatcctcctcctctccctccacgacttctgccgcgtccccctccccccgctggaggacgcgacggggcgatggtggatctgctccctgcctgaatcggaggcacaatataaccacatcttctgtgtcactcatatgggagattggtatgataaactttcacaatcttttagggatactgcgaaggaagtattggcaaaagcggatattgatccaaatgttaggtgcttcacaagaagacagatgaaacgcatcacaaataactacagcactaccttgggaagaggagggttttctgtggtgtacaagggtatgctcgacgatggccattcagtggcagtgaaacaatataattggagaacacagaaaaaggagttcacaaaagaagtgatcatacagtcccagtgtagtcataggaacattgttagattattgggttgttgtgtggaggcagatgctccaatgctggtgactgagtttgtcccgaatggaaacctttctgaacttctgcatgggaacattggtcagcttcctgtctcattagagacacgcttccagattgcattggatgtagcagaagcagttgtatatatgcattactctcaaaatcatccaatccttcatggagacatcaaaccatcaaacatacttctaggcgacaagtatgtggcgaagctatgtgactttggaatatctaggcttctctgcatggacaatgatgaatacacggggtttgttataggaagtatgggatacatggatccagtgtaccgtgagactggacgactaagcccaaaatgtgatgtctacagttttggggttgttctgttggaactcatcaccagaagcaaagggattgatgatcagaacagaagtctagctagagtttttgctcactctagtatagatgaaagatataaactatttgacaacgaaattgtaaccaacgagaatgtggacttcatacaggaaatggcaaaccttgcacttgattgtttgaagtctgaaatagaagatcggcctcaaatgaaagaagtcttggaacatctttatagtctcaaaaggaaaatgttggaacaggagaggaagattgcagagttgatggaagagagaaggattgcagagttgacagagcgaagaactgtggcatttagggaaatcaaggccatattgcaagatattggttttgaaagactcgtcacaaaagaaaaaatagattccatcgtaggcaacccgaaacaggtatcaacctcagaggcattttcaggaaaaagtagtgttctcattcagcgtgccattggcaagatttgcatgggacatttgaaaaacattcgatttatcgtgataaagatgtctgttgaggctgatgagatttggaaagagatgtttctttatgagatgatcaagcaatctagaattgagcattgcaatgtcgccaagctttttggctgctgcctagatcatgtggatgccccagtattagtttataagtcgactctagaggatccccttgctcacctgcactcacttaatgtggttcacggcgatgtcagaactgccaatgtagtactggatgtttattctaaatctaagctcgaaatgcctgggataactgcatttatggcaaagattgcaggttatggaacacaaaggctcctttccttggataaggccaagcatgaaatatttctaacagagaacatccattacaaggatccacacttcctcaagactgggctcatggctaaggaatatgatgtatatggttttggcgtggttcttgtggagctcttcgcacagaacatggtgcaaatgcatgacgtaaacatggtgctcaaagaacttgatggcattcctgctagatgccatcatcttaaggaaattaagaaacttgcttcttggtgtcttgcatccaaggtgacggagaggccagcaatggacaaggtagtacgatgccttcgagctgtcttgacaaacctgcaaaatcttcatgatccctgcaactgcaagtcaatgtataataagtctgcgatgcagtccgagcaaattaccagtgccaagtctgccagtagctga

SEQ ID NO: 3910 - DNA, 1245 bp, Oryza sativa
  Clone ID: PAT_MRT4530_10841C.1
atgggccggctagctatccgtccgaatcggtcacgactcacgtggctgagagagaacaagaacacccaccccatctccgtcaccaatgcggtctcgcgcgtcctcgctgctcacccgggacccttccaccgcgtcgacctgtcctgcagcatcatggaggcacacctcccggagctcgaccgctggctccagctcctcgccgccaaagccgtcgaggagctcgtcttcgtcaaccgtccctggcccatcaacctgcgcctcccggccacgctcttcagctgcacatacctccgacgcctctacatcggcgtatggaggttccccaacaccgctggcctcccccaatgcagcaccgccttcccgcacctgctggagcttggcctttgctgtgtactcatggaggaccgcgatctcgaatccattatctccaggagccctgtccttgagatactcactgtggttctcagccagaacgtagtgcgcctccgctttgtcagccacagcctacgttgtgtgcagctcggcttctcctgcgtggcggaccttgcagctgtggacgccccatgcctcgatcggctcttactgagcgatatttgggccacggaagggagaaaattctcgacgaggatcaagatcggccttgcccaggggttgaggtcactaggatacctggagccagggcgacacttgctgcagatcggcaccaccaccatcaaggctagaacaagagcaaccccaagtaccatggttccaagcgtgcggatcttagcattgaaggtgtactttggtaccctcaacgaagcccagatgttgtgcagtttcctccagtgctttcccaacgtcgaaacgctgcacctcaagtctgacaaagctgacgaactcaacaatgccactggggagcacaaggccatgttctggaagggagctggtgaaattgaatgtatcaagtcacatgttaaaaagatggttttcgatgagttccaagggaagcagagtgagcttgccttcatcaagtttgtcatggagagggcgcaggtgctgcaaaagattgatattatttccaccaatgcaagttgcacaactttggagaagaataagctggttttgaaggctctggattctgtaaaacctgcgagtaaaaattgtcaagtagtgtactcgacacatgcccttctcgaagaaggcggcagttggagcttccaaagagcatctgatttatctcgtagtgatccttttgagttttga

SEQ ID NO: 3911 - DNA, 714 bp, Oryza sativa
  Clone ID: PAT_MRT4530_10842C.1
atggcttgccatcaaaggtctgcaagcgtgccttccagcccttgctcaaatgataccacaattgagcagcagctccagaccctaaacacagtcgtctcttcaccatcagcaaccatcgacacgatgtgcgatggtttgaggaagcttggagatatctacaactccattgaggagctgatttgcacacctagtaaccaagttagcctttgccagaagctgcaaaggaagttggtggaggaagagcttggacggtcactcgtcttgcttgacctctgcaatgccatgcaagaaagcttcatggagttgaggatgagtgtacaagagatgatgttggccatcaaaaggggagaagatgcgtctgctcaagtcaaggcatacatccggctagccaagaaggcgcggaagcaattcaagaaggtcagcaaaaagactgcttctgataagatggactgtagggtggtaaagctactagcagaagcaagagaaatcaccgtctcattgcttgagtctacatcctgtttcctgtcgaagaaaattgagacgcctaagtggtctcttgtctccgccacattccagaagagcaaagtcatgtgcgaagaggagcaattgcaggaattggagctcactatcaaagaccttgagagtggagcagaacttctgttcaggagattgatccagggcagagtttctcttctgaatactcttagctcatag

SEQ ID NO: 3912 - DNA, 462 bp, Oryza sativa
  Clone ID: PAT_MRT4530_10843C.1
atggcgttaccaacaatagaattcgtcaatgaccgcgatgtgatggtctcaaataatacccaagtaaatttttctttgttggttccgcagccgaaccagcaactggatggttttagccggtttgggctggttctagcaaatttgagggatgctgagttgaaggttcaacctctaacactggccatccagaatattaagatttctttcacatacacagatgagctgagttggagattggttcatggtttacctgaaagtgtgagaggatggagcacccgctgcaatgctgcactagaggagatgctcaacctggggggcctttcttcaaaggcaaaggcctgggagaagcgagtgaagaagctgaacatcagtaacaatggtgtgtacccggcggcatccgcgaagaagcacaggagtagcgagatgttgagaactctgtcgttaggagtagcgagatgttga

SEQ ID NO: 3913 - DNA, 603 bp, Oryza sativa
  Clone ID: PAT_MRT4530_10844C.1
cattgccttggcacaacatcaatttcccatcgggcaggccggctgtttggtacgggtatttgccattaaaaacccggcacggcggcgggctgggcggccgctcggcgtgtccacgtcagcgattatgtttgcaaaaaagccctccagttttctgtaattacatatatgcccctcgcgaacagttttttagagaggagaatccgcggataaggacctatatgtaaaagtggaacacgtagggcctttttcgcaaaatagcgcccactacctaacaccccaaaccctatccgttgccgcccgcaccctctccctctccctctctagcgccgccgcctccgccacccctcgcgccgccatcttcgccatcgccgtcgcctcgcctccgccacccctcgcgccgccacctccaccatcgtcgtcgtcgtcgctgtcgccacccctctcccaccgccgtctccgccatcgtcgtcgccgtcgcctcgcgccgccacggccgccgccgcctccgacttccccgtcgcctcgcgtcgtcgtcgccgtcgcccgcccccgccaccatctccggccccccaaagcctagctgccgccgcccgctcgttccga

SEQ ID NO: 3914 - DNA, 1011 bp, Oryza sativa
  Clone ID: PAT_MRT4530_10845C.1
atggcgctgccttacaccactcattgctccaccctcttcccgttgattttcttgaaagtgacacgactcagaaacaacgaagggttctgtattggctaccactactgccacaccatcaccgacgcattcggcatggcccagctgctcgacaccatctaccgcctcgcgcgcggcgacggcgatcccctcaccaatccaccggtctgggagagggagcgccttgtcgtcgcgccgtctgcctcgccacgcatcacccactatgagcacccggcgtatgagccgctgcccatctcatcctccgccgcggcggcccaggacgacgtcgtgcggatgacgccgcgcgagcagatggttacccgctacttctacctcggcccaacggagatggcagccatgcgtggccatgttcggtcatcggccaccgtcttcgagctcgtcaccgccgcgctgtggcggtgccgcacggcggcgctggagtacgcggccaagcagcgcgtgcgcgtcctggtcatgtcgagcgcgcgctggagctggaagcgcgacccgccgctaccacgcggcttctacggcaacatgctcgtgccgcagatcgccgaggccaccgtcggcgagctgtgcggcttgccactcgcccacgcggtggagctcgtgaggaggaggaagttcgccgtgacggacgagtacatgcggtccatgctcgacatgctggcgcggcgtagtcggccgttcttcaacctagactggacgttcgtggtggctgacgccggtggccttggccgtagcatgggcgaagcggccactgccacggtcggcaggtgggagcgtgttgggggcggcatcacggcggccggacaggtgattgcggcgagcctatatagctgctatgagaggtgcaggcggggagcaggagaggaagccgccgtggtgtccatgtgcttgccagcgccggcaatggagaggttcgcgcgggagatcacggtgtgctccagctcagtaatgagcgccatctag

SEQ ID NO: 3915 - DNA, 424 bp, Oryza sativa
  unsure (1)..(424): unsure at all n locations
  Clone ID: PAT_MRT4530_10846C.1
ttttttttttttttttttttttgaatcctttgatgcacagctgttgtgtctagtgaatatttacatgagttattgaaattacanttctcagtgctttactgattcatatttccctgataaaatttgaagtgtaacaaatgggcattagtttgctgatttatactcttggtaaatgagcactatctccttgaattgcaaatgtatcttacttttaatgccctgagttgttttgctgtatcncttaaatgagaattcctttttcccnctgttgatgtagttgttgcggatgtaattgatctntagaatttcctccagagtgtattttggatagcatcatccaatntgaatgcgggtattgggttaactgctgcttaaatatgattatattttcctaaaaaaaaaaaaaaaaaaaaaaaaaaaaaaa

SEQ ID NO: 3916 - DNA, 648 bp, Oryza sativa
  Clone ID: PAT_MRT4530_10847C.1
atgtcggcacggggacaaggcgaggcggcgccggtgagcggcgaggatgaggcggcagggagcgggtgcggtcgtggccgccgccagcgaggacggtcgcggggaggttgcgaaggggcgtgcggagttcgccgaggggcgcggccgccgtcggtgaggatggtcacagaggggcgcggatcttgcggaagagctcatcaacgacggggaaggagatgccatggccactcgccgacgccgactcatcttctccccgtcctctcgacgctcgccgacgcctcctcgtcctctcgccgctcgccgaactactccccgctatatgctccccacgcctggcatcaaacgcaaacgcatcgggagctcctcagtcatcgacgacgacggcggatccacgcatctcgccgggagctcctcagacaccagcttcaacgttctctccgccgcatctcgcagaccgacgatgcctcaccgcgccccccggacgcggacctccgcccggtcagtggcaatggcgatggtccaagtgcgcggccgcatcgggaagcaggccacagccttgcttgcacggtgcacgtcggcgtctcgctggcgcggcggccgcgcccgctccccgccgccttatcctcgtcgctcgccggcgccgcttag

SEQ ID NO: 3917 - DNA, 831 bp, Oryza sativa
  Clone ID: PAT_MRT4530_10848C.1
atggctggaaggacgcgtgtagaggtgaagcagaagaagaggaaggagttccaagatttcaagaagaagataaggagacaattgaacaaactcaataataaatatgtccatacaaatgtcagagagttcagcttaagattgacagccgccaaaaagtcaggaacaagtcaccttattaatcacatagccgaatcatgtccagctattgatggtgatgctagaatcaacttccttgcaacaattaagaaacagactagggaaggtttcgtgtttgttcccaagagaagccgggagctaatggtcagattcttcattcatgcagaggtgccattcaagaaaattgaggatccttattttttggagtgggtggagtccatgcagccaactttcaaagttgtggggcgtcaaacacttcgtgatgatgcctttaacttgtatgagcgaatgagggaagacttgcatgctgaaatacataatcttgattcgcacgatggtatgaagataattaaacctacaatacacaagctacaagaagatgttgaggacgatagtgagagtttcgatgttttggactggtggaagagacatgctcaaaaattcccggtattgtcatctatggccagagatttcctagcaatacccctcagcactgtatcttccgaatcagcattcagttgtgggggcaggatacttggtgacacacgaagtttgttaacacctgaaatgcttgaagctctcatttgtgcgaaagattggttaattaaagccaacgatcctttgatcaatattccaggtgctgaaggtggtgaagtgaagaagatggaaaggtga

SEQ ID NO: 3918 - DNA, 1257 bp, Oryza sativa
  Clone ID: PAT_MRT4530_10849C.1
atggcccgccccaagaggacgaagccgccgccgccgtcgcgcaaggcggagacggcggcggcggcggcgcagcggccgtcgtcttcgtcgtcgtcgccgtcgccgtccctccccgaggcgctgctgctcgcgacggtgtgcatggtcggcctccccgtggaggtgcaggtccgcgacggatccgcgtacgcgggcgtcctccacaccgcctccgtcgaaggcgcatacggtgttgtgctaaagaaagcgcgaaagatcgctaacgggaatgataatgccaatattcctctgggagcttttgtagatagtcttgttattcacccagatgatctcgttcaagtcattgcaaaggatttttcactccatacaaaagatgtgtgcagaactcctgtttgtgataccgtcgcagccagtgcatatgtgaagcctcaaacttcacatgtgaatgtgtttccactaaaagaggttaagaagtgcagcacgccaggtgaggagactaacatctccattgggagaagttctcctgatgtgaaaatctctcctccagccacagttgctaaaactgccacgccgagcaaaaccattgctaaggaatccaaactcaacccttgtgctagggtcttctctccttcgtttgcaagttccagaccagtacttgcagctgcaccctctgttaacccaatctacatctcaaactctgtagctggagttccaaccgggttacctgtatttgaaactaactcagtgccaggcggttcatccctgtccagcaaggctgttcattataataacctggctgctgcaaactatgctatttcacctcaatatactcagtcaaccatggggcataatgtgagcaggctggatcctgctagaattggcacaccttatcatcccatgcaagttggacctgcttacattagccctagtcctcagcctgttactggtgggaaatttaatcatgttgtttatgtacacccattttctcaggatgtaatgcatggagcacctgttatgccccaaggatggtctcttcctgcaccattgaaatcacatcaagctagcctccagaagttccaagaaactctccaggcacagcccctgtatatgtaccccacctatcatggcaactgggaacctgccattggtggtaccaagccctgcaccgcttgtgcagccattccaggccgttcgtcccatcatggtacctgctgcaagcagcatggttccaggcaaatacatgtaaacttgtcatag

SEQ ID NO: 3919 - DNA, 717 bp, Oryza sativa
  Clone ID: PAT_MRT4530_1084C.1
atgcctccgatttctcgactagatccgagatatcatcgcgccaggggactacatgagctgaatcggttaatgtccctaaggcgggagcagcgccgtctccaaatcgaaacctatcaatttcttgctcaatgtgctaaaagaaaggaatctccctgccaacaagataattctcaatgtgtgaagagaatgagatattcaggtccggaccttccagaggacatatggcaccatatacattccttgttgccactgcaagatgctgcccgtgctgcttgcgtgtctcaggcttttctacgtttctggaggtgtcatcccaacctcattttcagttggaaaacgatgggtttgaataaagtgccacataaaaagggtgggatagttagagattacaacaacaaagttgaccgcataatgaaaaatcactcaggaggtataaagacatttagccttgaattacatcctttttccaatgccaacacctattatcatctcaatagttggcttgagattgctattacatctgggattaaagaactcactctcgtgttgacttcaaatgaggaaaagtacaatttcccatgctcacttttatctaatgagagtggcgactctattcagtctcttcgacttgttcattgttccttctgtccaacagttggccttgttagcttgagaagcctgacaagattgcatctatcttgtcacgtcccgaactag

SEQ ID NO: 3920 - DNA, 2064 bp, Oryza sativa
  Clone ID: PAT_MRT4530_10850C.1
atggtggggcccacgtgggccccacatgtcagccttataccttctttcctctcccctcttcatcctcaccctcttcccgcaggcgagcgaggcgggcagccggcggcgccctcggcgacctcgcgcgccaccgccgcactccacctccgaaccgccgcctttctctcccttcctcccccggccctcgccggcccaccgcctccatcctcctccccctgtgccgcctctgcagcagcattgggaggtgaccgctttgggtgtagtttggatggatggaaatggattgaggagtttaatgggctggactggttagggtggaggtggaaacggtttggattggattggtttttggtttctgatttttggatccaaattggattcagtccatggatttctttggatgcactagacagtccagtgaagcagaagaagaggaaggtgcgtgcgccgccgggcgctggcgaggatgtcctcctctggcggtccggccgcgtcgccaatctccctaagaagcccaagtaccacgacgagttccaagatttcaagaagaagataaggagacaattgaacaaactcaataataaatatgtccatacaaatgtcagagagttcagcttaagattgacagccaccaaaaagtcaggaacaagtcaccttattaatcacatagccgaatcatgtccagctattgatggtgatgctagaatcaacttccttgcaacaattaagaaacagactggggaaggtttcgtgtttgttcccaagagaagccgggagctaatggtcagattcttcattcatgcagaggtgccattcaagaaaattgaggatccttattttttggagtgggtggagtccatgcagccaactttcaaagttgtggggcgtcaaacacttcgtgatgatgcctttaacttgtatgagcgaatgagggaagacttgcatgctgaattacataatcttgattcgcacgatggtatgaagataattaaacctataatacacaagctacgtgagttgttgaagcatttagattcttcagtatcaagaatgcaagatttcaattctatggcaaactcgaaaaatcttccttcgaagttgagtttttcttttgatacaccgactagatggaattccacctataaaatgattgtagaaggattaatgtacatatctgtcctggatagctatgcaaatctacatggtgaagttgcacctactgaactagaatggcagaaagttgaatcaatttgtgcttttcttaaagcttttgaagaagctacattatcggtgtcagcagataggaaaccaacagcacataggttcttgcccttggtgctacaaattcgtcatgcattgaatgaccctgattggcagactagtgatattttaaaggtattggctgcagctatgctctcaaagtttgtcaaatattgggacagtgggtttaactctgcacttgtcattgccacaatgttagatccaagaagaaaaggagattatttgaatttcttttatgagaaaacatctaacagtgtgacagagattgtcaaaaaagtgggttctgctgaagattggttgaaggattattatgaaaaatacgaagggtttgtaagaagaaatgatgaacacatgctttcacattcttgtgaaggcagcaacagtgttggatcacctgttcttgggaaaagaaaactcgaggaagagtttgctttatacaagtctcgaaggagaactgcacggcaaacgaaatcagaatttgccatatatttagaagaagatgttgaggaggatagtgagagtttcgatgttttggactggtggaagagacatgctcaaaaattcccagtattgtcatctatggccagagatttcctagcaatacccctcagcactgtatcttccgaatcagcattcagttgtgggggcaggatacttggtgacacacgaagttcgttaacacctgaaatgcttgaagctctcatttgtgcgaaagattggttaattaaagccaacgatcctttgatcaatattccaggtgctgaaggtggaaatttgtcctga

SEQ ID NO: 3921 - DNA, 465 bp, Oryza sativa
  unsure (1)..(465): unsure at all n locations
  Clone ID: PAT_MRT4530_10851C.1
tgtttttttttttttttttttttaaaaattaaaatgccttgtataaagggacgggggagtatcagcgtatctcctctccaccctcgcagtccaaaccgagcaagatctcccctgtttctctctctctctcaactgtgaactctgaactcaatccaggagatctctccatcatgtgttaatctgcatctttgtctccatccatctctgccgcactcaatcacactgcaactgcaactgcatcaagaatccatccatcctttctccctgccaataatttctcaagaaaaaaaagaagaaaaaaactgtcgtctctctccgttgatagcgaccttgccttgcgttgtctccggcttcttcgcctataaatcatcgncttcctcctcctcttcgcttccaaaatcctcgagattttcttgttgcattgcattgtggaggggagaggaggaggagagattagggagtact

SEQ ID NO: 3922 - DNA, 3231 bp, Oryza sativa
  Clone ID: PAT_MRT4530_10852C.1
gggggtccccccgcgccgcgcgcttcgcccccccccagctctgggggggacaccgagggtgcccagctctccgccgctgtgcctcgctcctctcctccgaggtttggggaagctacttctgaccatggcaggcaccctgctccagccggttgccctcggaacaacttttgcaggccgtgtaagtggtcagcgatggaagtctcatggcacaaggaggcctccctcaatgttggcgatgtccttgagccgcccagttaagatggccgcatttgtcggtctgagatcggtgcatagcttctcagtcacgcctgtcaccaacttcagatcgacggttgcatcttacagatcaagacggggaaggcgtgctcgctttgtaaccagatcgatgtttgagaggttcactgagaaagctattaaggttataatgcttgcgcaagaagaggcaaggcggttgggccacaactttgtcggtactgagcaaattctcttgggtctgattggagaagggactggtattgctgctaaggtgctcaagtcaatgggcataaatctcaaggatgcacgtgtggaagtggagaagatcattgggaggggcaatggtttcgttgctgtcgaaataccattcacaccacgtgcaaaacgtgttttggagctttcattggaagaagctcgtcagctaggacacaactatattggatctgagcacttgcttcttggactgctccgtgagggtgaaggtgtagcagcccgtgtgctcgaaagccttggagccgatcctagcaatattcgcacgcaggttatccgaatgattggcgagactacagaagctgttggtgcaggagttggaggagggagtagtggcaataaaatgccaacacttgaggagtacggaactaatttaacaaaattagcagaggagggaaagctagatcctgttgttggaaggcaaccccagattgagcgtgtcgtacaaattctgggcagacgaacaaagaacaacccatgcttaattggagagcctggtgttggaaagacagcaattgcagaaggccttgctcaacgcatttctactggtgatgtgcctgaaacaattgaaggaaagaaggtcattacccttgatatgggacttcttgttgctggtacaaaataccgtggagaatttgaagaaagattaaagaagctgatggaagaaatcaagcagagtgatgagataatactatttattgatgaagtccacactctcataggagcaggagcagctgagggtgctattgacgctgctaacattttaaagccagcattagcaagaggagaactacagtgtattggagccaccacacttgatgaatacaggaagcatattgagaaagacccagcattagaaagacgtttccagcctgtaagagtgccagagccaacagttgatgaaaccatagaaattctcagagggcttcgggaacgatatgagatccatcataaacttcgttacactgatgatgctctgatttcagctgccaagctatcttatcaatacatcagtgatcgtttcctcccagataaagcaattgatttgattgatgaagcaggttcacgtgtaaggcttcgacatgcccaggttcctgaagaagctagagagcttgacaaggagctcaagcaaatcacaaaagataagaatgaagctgtccgtagccaggacttcgaaaaggctggagagttacgtgatcgtgaaatggaattgaaggcccagataacagctctcattgacaagagcaaggagatgagcaaagcagagactgaatcaggggagacagggccactggtcaatgaagcagatatccagcacattgtatcctcgtggactggtattccagtagagaaggtatcaagtgacgagtccgataagcttcttaagatggaagagactttgcatcagcgtgtcattggtcaagatgaggctgtgaaagccataagtcgctccatccgccgtgctcgtgtgggcctcaagaacccgaacaggccgattgcaagcttcattttcgcaggtccaaccggtgttggtaaatccgagctcgcaaaagcacttgcagcatattactttggatctgaggaggccatgatcaggcttgatatgagtgaattcatggagaggcacactgtatccaagttgattggttcacccccagggtatgttgggtacacggagggtggacagctgactgaggcagttcgacgcaggccatacacagtcgtgcttttcgacgagatcgaaaaggcgcatccagatgtattcaacatgatgctccagatcttggaagatggaaggctgactgacagcaagggaagaacagtggacttcaagaacacacttctcataatgacttcgaacgtcggaagcagcgtcatcgagaagggtggtcggaagataggtttcgatctcgattacgatgagaaggacagcagctacagcaggatcaagagccttgtcgtcgaggagatgaagcagtacttccgccccgagttcctcaaccgtctcgacgagatgatcgtcttcaggcaactcaccaagctggaggtcaaggagatcgccgagatcatgctcaaggaggtctttgacaggctcaaggccaaggacattgacctccaggtcaccgagaagttcaaggagcgtatcgttgacgaaggcttcaacccgagctatggtgcgaggccgctaaggagggccatcatgaggctcctggaggacagcctcgcggagaagatgctagctggggaggtgaaggagggtgattctgccattgtcgatgtggattccgaggggaaggtgattgtactgaatggccaaagtgggttgcctgagctttcaactccggctgtcactgtgtagtagttcatatatactgcagagtgttaagagatgcagtgcttttcattcagatatatttctgcatagttagcaacttagcataactgtatatatagtatatacaaatcaaaggaggaggaaacaccagctgattcctggtttcaaaaaaaaaaaaaaaaaaaaaaaaaaaaaaaaaaaaaaaaaataaaaaaaaaaaaaaaaaaaaaaataaaaaaaaaaaaaaaaaaaggggcggccgcccgcgatctaaaactagcgatgaccccggcggcggcggcaagggaggcaagggcaagggcgggaagtccgccgacggccttggcacctgcacctacgtaaaagctagg

SEQ ID NO: 3923 - DNA, 201 bp, Oryza sativa
  Clone ID: PAT_MRT4530_10853C.1
atggctactatagatacaatcgttgctcatatcatggatgaacaaggagatatcaagatcaagttctccatgtgctggaatccgatttagccacatgctacactgctgacttcaaacggctgccaaatctgcatacgacctccattttcagcccatgagtacttgatggaaagctctcggagtcctctttccaatggatcc

SEQ ID NO: 3924 - DNA, 782 bp, Oryza sativa
  Clone ID: PAT_MRT4530_10854C.1
ggcacgaggttgaggacgaacatagacaacccacattccagtgacatattaaacccccatggtggaaggatcacaagggccaatagccagaatttcccaatactcaatatcatccagatgagtgccacccagaatcgttctcccaaaataatgcccttgcttactgcctcaattggacggtataacggcacacaccggtgatgtacggtgaccgcctggcacaagggcgcatcccaggtgtgtggatcacccgtggtaggatgtgtctttgatggtgagcttcaccagacagccagatcttgttgatcccacaagaactttgcagtggtgtgtgaaggctcgtacgtgaaggatttgcatgggttatcacttcaagacccaatcacaaatgctggtcgatagtcaagatcgccagggaaggcctccattcttcggtgctctacaccgttgacgtgcgtcgccaaatgcttataggctttccaagggaggactctaggcagtgtaaagttcaaccgcggcgatgagatggctgtctttgctcacgaggcgtgggccacacagccagtatgcctgagtggccagatcaaccgagaagtaaactaaatgtgtaacgatcttactgtaatgaataatgtgaagaagatcgcctacacctctttttccataaaaatatcaataagcaattactaagaacatgataatactctcaaaaaaaaaaaaaaaaaaactcgagggggggcccggtacccaattcgccctatagtgagtcgtattacaatttc

SEQ ID NO: 3925 - DNA, 682 bp, Oryza sativa
  Clone ID: PAT_MRT4530_10855C.1
ccaccagaatcgttctccaaataatcgcctgcttactcctcattggacggtatacgcacaccatcgtgatgtacgtgaccagctgccacaagggcgcatccaggtgtggatcaccgtggtaggagtgtctttgatggtgagcttcaccaacagcagatcttgttgatcccacagaactttgcagtggtggtgaaggctcgacgtgaaggatttgcatgggtatccttcaagaccaatcacaatgctgtcgacagtcagatcgcagggaaggcctccattcttcgtgctctacccgttgacttggtcgccaatgcttataggctttcaagggaggactctaggcatgtaaagttcaaccgcggcgatgagatggctgtctttgctccgaggcgtgggccgcaacagtatgctgagtggcagatcaacgagaagtaaactaaatgtgtaacgatcttactgtaatgaataatgtgaagaagattgcctacacctctttttccataaaaatatcaataagcaattactaaaaaaaaaaaaaaaaaaaaaaaaaaaaaaaaaaaaaaaaaaaaaaaatggcaggctttaaaaaaaaaaaaagctaactgtcggccgctttaaaggatacaactttattattgtgtgaattcaattgaaattagtttactatattttaaaactaaat

SEQ ID NO: 3926 - DNA, 694 bp, Oryza sativa
  Clone ID: PAT_MRT4530_10856C.1
ccatacccccaatccagtgaacatattaacccccatggtgggaaggatcacaagggccaatacccagaatttcccaatactcaatatcatccagatgagtgccaccagaatcgttctccaaataatgcccttgcttactcctcattggacggtaaacgcacacaccggtgatgtacgtgaccgcctggccaagggcgcatccaggtggtggatcacccgtggtaggagtgtctttgatggtgagcttcaccaacagcagatcttgttgatcccacagaactttgccagtggtggtgaaggctcgacgtgaaggatttgcatgggtatccttcaagaccaatcacaatgctgtcgatagtcagatcgccagggaaggcctccattcttcgtgctctacccgttgacgtggtcgccaatggcttataggctttccaagggaggactctaggcgtgtaaagttcaaccgcggcgatgagatggctgtgctttgctccgaggcgtgggccacagcagtatgctgagtgccagatcaaccgagaagtaaactaaatgtgtaacgatcttactgtaatgaataatgtgaagaagatcgcctacacctctttttccataaaaatatcaataagcattactaagaacatgataatactctcaatggaggttacaattgagaacaaaaaaaaaaaaaaaaaaa

SEQ ID NO: 3927 - DNA, 559 bp, Oryza sativa
  Clone ID: PAT_MRT4530_10857C.1
tccagagttcccaatgcgcaatgtatcagagagcccacagatcgttctccaaaataagcctgcttactctcattggacggtaacgcacacacggtgatgtacgtgaccgctggcacaagggcgcatccagtggtggatcaccgtggttaggagtgtctttgatggtgagcttcaccaacacagatcttgttgatcccacaagaactttcagtgtgtgaaggctcgacgtgaaggatttgcatgggtatccttcaagaccaatcacaaatgctgtcgatagtcagatcgcagggaagccctccattttcgtgcttacccgttgacgggtcccaatgcttataggctttccaagggaggactctaggcgtgtaaagttcaacacagcggcgatgagatgcctgtctttgctccgaggcgtgggccacacgcagtatgctgagtggcagatcaacgagaagtaaactaaaggggacgtcttactgtaatgaataatgtgaagaagtccacacctctgtcccataaatccacccttctagacagatatctccaaaaaaaaaaa

SEQ ID NO: 3928 - DNA, 4113 bp, Oryza sativa
  Clone ID: PAT_MRT4530_10858C.1
tgtctgtggcggctatcttcgtgtccctctccctcctcctccccctctcctagggtttatccaccaccacctatcgcctctacctaccacaagaattttttttaccatctatattccacccctgccttctttgccccccgtacctcctggaattttcgccttcttgggatccaatccgcgaggagggaaagaaggcgggtttagatcgaactgggacggagggaggaggaggaggaggaaccatggcggccgttgctcctggcgctggcgaccaggctactgacatgatgcagaagctgtcgttggagagcaagaaggaaggcgccacccctgacgctaccaagaagcctgccgggatgccctatggatctgcaagcgccggcgatgcgcagaatgcggcgtcgccggtggacaggtcgatcactcccctgctccaggaggccgtgaatgccaacatcttgtatcagaccaatggatatggaccctcagcatattactatcctactggttatgacggctcagccaatgaatgggactccagatatgctgcccatgatggaacggagatgcctcctcagagtgtttatggtgacatgtatggatatggctatgctccctatggcccatatccttctggttctcctgtcccaactgttgggcatgatggccagtcatacggcgcacagcattaccagtaccctggtcaatattatcagcaaccagctccaaccaatgcaagccatggcgtcaatgctgtcaattctcagtctgagatgccctctgttgctgctcaccaggcacgtgttccggttgaatcagcaaaagctagtgccaatgggactgctaatgggatggcaaatactaacagtagttcattagcacgtaagcaaacccatcaaaatgtatcagtattaaacaatggttcatatggaggagggactttgcaaggtggaccatctgctaacaattatggtcacagtggtcttcattctccagttcagtggtatgatgggccagtctactctaatgggcatcagagatcaaatactaattccacatcttatggttctaactcgtattcagcaaaaaatcagagccagcgcccaactgcaaacctcatgggtatgcatgcacagataccttcgtcgggaatgggtttgacatctcctagttatcataccaggatgtacccagacaacagattatatgggcagtatggtcagtatgggaacgcacttaaaactgggcttggtttcggatcaaatatgtacaactccagaaataatggacggtggggaattgttgatagcaagtacaagcctagaggtcgtgcatcttttggttttggcagtgagaaccaagatggcttcactgagcttaacagaggaccaagatctggaggattcaagcaccaaaaacagtttggaccttctgtcactattgctgtgaagggccaagccctcccctcagtcgggaaacaggagaatagtgccattccagataagggccaattcaaccaggaaggttttccagtaacatacaaagatgcaaagttctttgttatcaaatcttacagtgaggatgatgtgcacaaaagtataaaatacaatgtgtgggcaagcactcctaatggaaacaagaagctggatgctggataccgtgaagcgcaggagaaatccagtgaatgcccagtcttcttgttcttctctgtaaacacaagtggccagtttgttggtgttgctgaaatggttggtcctgttgattttgagaagacagtggattattggcaacaagacaagtggaatgggtgttttccaatcaagtggcatgttgtcaaggatgtacccaacaacatcttgaagcacattacattggataacaacgacaataagcctgtgacaaacagccgtgacacacaagagggctctcttgacaatgcttcacatgaaaaggagaagaatgcaattgatgggaaatccacagctcagaagcaggcattgagcaaggagggcacccctattgtcggcgaaatgctgaacgcctcaaaatctgcagttgaaagcagtgtaacaaatggcaattagcgcgatatattttctgcgttaattgccacagccgagcagtcagattgtgcaaattctgaaggttcgcggcgtggctgagcgatagctacttgggttgggacttggcaactaaatttcgtaacagactttctataggcttggtgcctggggagtgggtcagttcttactttgattttagctcgtgtgactggttttttgcgtcgttaggtctcatatattactcttatgacatcgggttttatgtaacccttatcctttttgttttttttagccttttcatctattgttattgttagcgaagcatccaaatttcgataaactaagtgaataactatggcttcgcatgtctaccattcttccattgtgccttggcctccttctcttcttccaagtgtccatggcacaattttcatttgggggaagcccacttcagagcccacgtggatttaggggagaccaagatagtcgtcatcaatgtcgttttgagcacctcaccgcccttgaggcaacacaccagcagagatctgaagctggattcactgagtactacaacattgaggcaagaaatgagttccgttgtgccggagtgagcgtgaggcgcttagtcgtcgagagcaagggcttagttttaccaatgtatgctaatgctcacaagcttgtctacatcgtccaaggtcggggagtgtttgggatggcactgcctggttgtccagagacgttccagtcagttaggtctccctttgagcaagaggtggcaacagctggtgaggctcaatcatcaatccaaaaaatgagagacgagcaccagcaacttcaccaattccaccaaggtgatgtaatcgcagtgccagctggagtagcccactggctatataacaatggtgattctcctgtggttgctttcactgtcatcgacaccagcaacaatgccaaccagctcgatcctaaaagaagggagtttttcttggctggaaagcctagaagtagctggcagcagcaatcgtactcataccagacagaacaactgagcagaaatcagaacatctttgctgggttcagcccagatttactttctgaagccctgagtgtgagcaagcaaactgtgttgaggctccaaggcctgagtgacccaagaggtgccatcattagagttgaaaatgggctccaggcactgcagccctctctccaagttgagccagtgaaagaggaacaaacccaagcttacttgccaaccaagcagctacagcccacctggttgcgaagtggtggagcttgcggccagcaaaatgtcctagatgaaattatgtgtgcatttaagttgaggaagaacatagacaacccacaatccagtgacatatttaacccccatggtggaaggatcacaagggccaatagccagaatttcccaatactcaatatcatccagatgagtgccaccagaatcgttctccaaaataatgccttgcttactcctcattggacggtaaacgcacacacggtgatgtacgtgaccgctggccaagggcacatccaggtggtggatcaccgtggtaggagtgtctttgatggtgagcttcaccaacagcagatcttgttgatcccacagaactttgcagtggtggtgaaggctcgacgtgaaggatttgcatgggtatccttcaagaccaatcacaatgctgtcgacagtcagatcgcagggaaggcctccattcttcgtgctctacccgttgacgtggtcgccaatgcttataggctttcaagggaggactctaggcatgtaaagttcaaccgcggcgatgagatggctgtctttgctccgaggcgtgggccgcaacagtatgctgagtggcagatcaacgagaagtaaactaaatgtgtaacgatcttactgtaatgaataatgtgaagaagattgcctacacctctttttccataaaaatatcaataagcaattactaagaacatgataatactctcaatggaggttacaaattgagaacaaaaaaaaaaaaaaaaaaacacacaaccc

SEQ ID NO: 3929 - DNA, 306 bp, Oryza sativa
  unsure (1)..(306): unsure at all n locations
  Clone ID: PAT_MRT4530_10859C.1
cgcgagctccctctcctaaagccctaaccctagcctccaagtcgtcgtcctccggaagcttccggcctccgccgccgccgcagcgccatggcctcggagacggagacgttcgccttccaggggagatcaaccagctgctgtngctcatnatcaacacgttctactccaacaaggagatcttcctccgcgagctcatctncaactnctccgatgcgttggacaagatcaggttcgagagtttganggacaagagcaagctggatgctcagccagagctgttcatncatattgttcctgacaagggct

SEQ ID NO: 3930 - DNA, 423 bp, Oryza sativa
  unsure (1)..(423): unsure at all n locations
  Clone ID: PAT_MRT4530_1085C.1
gtccgtgtcgcaacaacggggctcagnntttgctgcnnagccatatgcatcatgtgcagggagcaggnaacanggnacanngtgccaatcaagaagaagcgttntcaagaaagggacantnntcagcanagtcaatatnggaagtggctggctctaatcgtgtttggatgagacctttgtgcnccctgggggctggggcgggaacatcgnttaatctctaaccgtgcctgatccataccaatccagggagctggtaagggttnccaaatctcaaccacccngaatttccccattcttagtcttgtccagntgagtgctgtcttcgtncctcttttcctgattgcgctcctttcaccnttttggagcctcnacgctncccgcgtcgtgtgtttttctcgnggccgtgcccgggtttctgttgtc

SEQ ID NO: 3931 - DNA, 690 bp, Oryza sativa
  Clone ID: PAT_MRT4530_10860C.1
atggccttgctcctcccgctcatcgtaatctgcatcgtctccggcgtcaccgccgacgccaacgccgacgcgccaatgacgcggacgcatgtcgccagcctaccgggtttcgacggcgccctcccttcccgcctcgagaccggctacgtgaccgtcgacgaggtgaacggcggcgaactgttctactacttaatcgagtcggagggcgacctcgggagcgaccccgtcctcctctggctcaccggcggcgaccgctgctccgtcctcagcgccctcttcttcgagatcggcccaatgaagctggtcatcgagccgtacaacggcggcctgccgcggctgcgttaccacccctactcgtggacaaaggtggcgaacatcctgttcgtcgactcgccgatgggcgccggcttctccttctcccgggaccccaacggctacgacgtcagcgaatggttcgatggccatcctgaatatctcgcgaatccgttctacgtcgggggggactccatggccgggaggttcgtcccgttcatcacggagaagatctccgaagacattgaagcggcggttagaccaactcttaatctgaagatgatattggagcactgcaaaggggaggactacgacaagcccaagaatctgatttgcagacaagctatggctaggttcaacgagaacgcagagttttaa

SEQ ID NO: 3932 - DNA, 402 bp, Oryza sativa
  Clone ID: PAT_MRT4530_10861C.1
atgggcgccgacgacgaccggcggcgacggaggcaggcagccaaggacgacgaaatcggccggcggcgagctgagtgttgggctgcgagcccgccacgaagatcaacgtcgtgggcctgcgggcacgacggtgaggaggtgaccattaaggagctgaagccagtggagccgctgccatggactggcgcagagattagcgacgtcttccaaagagtcctgcttcctctgcagccatgccgtattagagacggggctatcagggcttcgtctgcttccacaagtggcggccaacggcccgacaagctacccgccgcaccctcgcgctcctacccaacgcgcggtagaaacgacgggactgttgtgggttcaactgggagtggatctgggagaagcccacactag

SEQ ID NO: 3933 - DNA, 375 bp, Oryza sativa
  Clone ID: PAT_MRT4530_10862C.1
ttgtagtgctggcaacacactgccacaacgccaaaagtgggcaccaatggtgaaaatgatgaagacagtgcccctgagcttgatggagactaacacgtggtggattgttgtgcttgcgcctgtggtgaaaatgtacccaggaacttgggagaaaatgatgactggccccactgggatggatgatgacgaatgagaaaggagaaagaaaagggatggaacttggatgatggtgtgaaaatgtggtgatgccggtggcttggaaatggttggttgactgggaaactggatgcatgcactggactgcggtgtggatcccagccgatggagacctgcccgagtgtgatgcctgtgggctaaaaaaaaaaaaaaaaaaaa

SEQ ID NO: 3934 - DNA, 118 bp, Oryza sativa
  Clone ID: PAT_MRT4530_10863C.1
tttggtttttgaaagatcaaggttcttttttagaactctaatgacggtcattaatttcccagattctgtcattgtcgaacctccagggcatcctttcgcgtgcaattccttgtccgga

SEQ ID NO: 3935 - DNA, 360 bp, Oryza sativa
  Clone ID: PAT_MRT4530_10864C.1
atggcaatgtggcgctcatgtctccacatgccgcatctcaattaccttcccaaagaccggctgaggaaaggaaaaaggcggcggcggcacggcttaccagcggcgacggcaatggcggcggcgcacggtggctgcgacggcggcggtgcacggcgactgcgacggcggcggggaatgcggcacggccaaggcgcggcgcggcgcggcggcgtcgtggcggcggcgcggcggctctatgcgacgacgcggcggtgtcgaggcggcggcgtgggcgagtagggccacgggtcccgtcgcgtggtggcttggcaccgacttgcgcggaggtacagactgcagatctgctcgctgtttcccgca

SEQ ID NO: 3936 - DNA, 936 bp, Oryza sativa
  Clone ID: PAT_MRT4530_10865C.1
atggtgtcctggaaggacatctacctcgttcttgaagcgacagttccactatatgtagctatgatactggcctacctatccataaaatggtggaagctgttcaccccagagcagtgctctgggatcaacaagtttgtggcgaagttttctattcctctgctctcttttcaggtcatttccacaaccgatccttatgacatgaatatcaagctcatatactcggatatcctacaaaagtcgcttgccttgctgggatttgcagccatttccaaagcatgctgtgcagagaagtttgactggctgattactggtttttctttatcaacacttcccaatacactgattgttggcatcccgttgctgaaaggaatgtatggtgagcaagccggcaaactactaagtcagatagtagtcctccagagcctaatttggtacactcttcttctatttttgtttgaacttcgggctgctaatggaatggccaccactacatcatctgaaactacaggtttaatttgggcactggtcggcttcaggtggcacataagattaccgttgattgtcagcaattctataaggatgctctcggatggagggctgggaatggcaatgttcagcctaggccttttcactgctctacaaactaaaattatagcctgtggagctaaaaggatgctactagcattagccatcaggttctttctaggaccagcactaatgggtatgtcttcttatgctattggaatgcgtggagtattgctgaagatagccattgtacaggcagctctacctcaaggaatagttccgtttgtgtttgcaaaggagtacaatgtccaagcagatattctgagcactgcgataattgttggcatgatggttgcagttcctgtggcgctggcttactactttgcaatgatcatcccagctatcaaataa

SEQ ID NO: 3937 - DNA, 1172 bp, Oryza sativa
  Clone ID: PAT_MRT4530_10866C.1
ttcttcactgatgcgtacgacctcttctacatttccctcgtcaccaagctgctcggccgcatctactacaccgacgattccaagaacaccctcggcgcgctcccgcccaacgtgtcggccgccgtcaccggcgtcgcgctctgcggcacgctcgccggccagcttttcttcaaatggctcggcaacaagctcggacgcaaaagcgtgtatggtttcacgctgattctgatggtcgtgtgctcggtcgcgtccgggctctcgttcggaagctcggccaagggcgtcgtatctacgctctgcttcttccggttctaactcggcttcggcatcggcggcgactacccgctcagcgccaccatcatgttggagtacgcgaacaaaaaaacgcgcgggccttcatcaccgccgtgttcgccatgcagaagtccgggatcctcttcggcgccatcgtcgcgctcgcggtgtcggcgaaattccggcacacgtacccggcgccgtcctactccaacaaccacgccgcgtcgctcgtcccgcaggccgactacgtgtggcgcatcatcctcatgttcggcaccgtcccggcggcgctcacctactactggcggataaagatgcccaaaacggcgcggtacacggcgctcatcgcccgcaacgcgaaacaaacaacggccgacatgtccaaggtgctgcacacccaaattgaggagagcgcgaaccgcgccgagacggtggccgtcggcgacgagagctggggcctcttctcgcgccagttcctgcgccgccacagcctccacctcctcgccaccaccaacacgtggttcctcctcaacatcgccttctacggccaaaaacctgttccagaaaaacatcttcagcaaggtcgggtggatcccgccagcgaagaccatgaacgcgctcgaggagctctaccgcatcacccgcgcccagacgctcatcgcgctctgcggcaccatcccgggctactggttcaccatcgcattcatcaggatcataaacaggttctggatccagatcatgggcttcgccataatgacggcgttcatgctcggcctcgccatctcataccaccactaaacgacgccgggacaccacaccggcttcatcgtcatgtacggattcaccttcttcttcgcaaatttgggaccaaatgc

SEQ ID NO: 3938 - DNA, 411 bp, Oryza sativa
  Clone ID: PAT_MRT4530_10867C.1
atgcggcgggcgggagaaccagagaagaggagaggaggcggcgggggggcgcttacggttgctcgagccgaacatggctgcttccttggcaatgagggccgcggctgcggctgctgcggcggcgacttcttagtcctcctcctcctcctcctgctcctcctccccctcccctcctctgcgtcggcggaatcgccggcgggtagggtggctcaatgccggcgattaggatctgaagaggaccgcgcggcgtgcggtgggaggtcggcggcgacttcccgcggcggggagcgggggattcggcggcggtggcgacggcgactcggcggggatgggaaggaaaccggcgagaggaggcggagggaagcggaggcagagagggggaagaagagaaggtatatataccgacgctga

SEQ ID NO: 3939 - DNA, 352 bp, Oryza sativa
  unsure (1)..(352): unsure at all n locations
  Clone ID: PAT_MRT4530_10868C.1
aaacagaagaacgtgtgagttcatcatttattcatcatacatgcttccagataaaaggaaacacaaattatttagtaaccaaatcacacacatgaacagttttttactagctacataccagaagctatttggggggggggggggggcattttcanacaccncctactccattnnngatgtcggggttgcagaacgccgggaggctcgccgccgcgcgctcgatgtcccctctccggcagccgcggaacacctcggccatggggtgcccagcgttggtggcgccgctcttcctgttgatgatccttattgtgtggtttgggcgcattttaccttttctttttgttttcgttgg

SEQ ID NO: 3940 - DNA, 3805 bp, Oryza sativa
  Clone ID: PAT_MRT4530_10869C.1
atgggctgccgacgcgttcttgtccccgacgacccacatgaagttcacgccggagtccatgagccccatgccgagcttttgcaacctgctcgtgcgggaaccagtgagacgcgagaccgtgacaatttggtatcagagcttcatcctggagaagccacgctacacatcccggctacagctgcaagtggaggcgatggagaaggcaaggttctgatcgagatccaagagttgctggcggcgctgaatcgtgctcaaggcgagacgcaagccgccgttgtcaagcttgaccaaggcgtgagtcactggaggccacagatggagtcagtcggcgaacttcaccaacaactggatcttgtcaacaagttgaaccaaacttcttcaacgacgtcttcccctcgagttccgttgacagacgaggaaaggaaggcgccgttgctgcctacgccgccgattccatctcaagcggctgctgcggctgaaggcggaagcaagatggccagtggccgcctacaagttcatgaacaccggggaagggcactgggagtggcaaccaccctgggcccgactccggtcaagggtacgtatgaatctccttccacatctctgaaaaattttgagcaatttgagttcgggaatggggattgtgatggggatcagtttgggcgccagtataaccatagggttcctaaattagatttccctaagtttgatggttcagatcctgtggattggagaatgagatgtgagcattattttgatgtgaataacactttcccagggctttgggttagaatagcaaccatttacttctcaggaagagcagtatcttggttgcgttcctctaaggctcatgttaggtttccaatttgggagaatttttgtgtagcagtgtctgctaagtttgatagagacaagcatgaaacacttattagacaaatggacagcattaaacaattgggctcggtttgggagtattatgaaaagtttgatgagttgatgaatcaacttttagcttatgacccagatttgaatatgagatatctaactcatcgttttactgagggattgcttcgggagattatgaatgcagtacttattcaacagcccaaagatttggagacaacattggcaattgcttctttgcaagaggaagtaattatggaatctgctacggtgtcagcttcaaatctaaaaaagagtgactctgggttgcagttccgaccaaatcctgcttacaagagtgctttgcccttgcccttgccgcctaatcgtgggttatctggtggcagtatgatgcgaacagaagagcgcaaagttgctaataattctaagattggaaacagttctgacaaaatttctgttctgaagcttaacgcagagctcaaggattgtgttatatctgtgcagagaaatggtctcccactcataaatcaagtttctgttgatggcactgaagctgtagacagtcaagggttaatggcaatatcagttcaggctttgcatggttctgaatctgtgggatgtatgcgcatgttgggatatatacaaggaaaggaggcaattgatggtgtatttcctttaactgctaaaactatggtgaaagtggccaatggttcaatcctctcttgtttggcttatgtgcctaattgtgaatggataactcagggatgggtcttctgcactaattttaaggtcctcaatttgggaagctatgacatgatattaggaatggattggttaatgcatcatagtcctatgcaagtggattgggtaaagaaaactttgacaatttcttggaaaaatcaatctgtgacattacaaggaattgtgtcagaaattgagcaatgtgcacggctttcttctcagcagtttcagaagttgaaggacagacaagcaatctctcacctcattcagttatgtgctgtctctgaaacttcagaacaggaatccattccttctgtcgttcaacaagtgctttctcaatttgcccatgtatttgaggatccttctggattacctccttcaagaatgtttgatcatgcaattcctcttcttcctggagcaatgccagtgaatgtcagaccatatcggtatacacctgcccaaaaggatgagattgaaatgcaggttaaagagatgttaacaaagggaataattcagcctagttctagtcctttttcatcaccagttttgttagtgaagaaaaaggatggtacatggcgtttttgtgccgactaccgacatatcaatgctataactataaagaacaaatatcctcttccaattatcgatgagttactcgatgagttgtcaggagctcagtggtttaccaaacttgatctccgagctgggtatcatcagattcgaatgcagtcagttgatgaacacaaaacagcgtttaaaactcatcatggccattttgaattcagagtcatgccctttggtctcactagtgcaccagccacatttcagagttgcatgaacagcattctgtctcctttgttgagaagatttgttcttgtttttgttgatgatattttgatttatagcaagactcttcctgagcatgtcaagcatcttcagatagtcttgcagatcttgactacacatcagctcaaagtcaagaagagcaaatgctcctttgctcaacaaagattggcttacttgggtcacattatgagtcctaatggagtttcgactgatgaagataaaattcaggctgtcagcaattggcctacccctacctctgttaaggagttacgtggttttctgggtttagctggttattaccagaaatttgtgcgacattatggacttctcagtaaaccattaactaatctgttgaggaagggccaactgtacatttggactgctgaaactgaacaggcttttcaagctctgaagcatgccttaatcactgctccagtattatcgatgccagatttcaatgaaccttttattgtagaaacagatgcctctgataaagggattggagcaaaaggcactgaaaatggagctgctgatgctttatcgcgctgtccatctgctgataaagtgtttgaacttactgctatatcctcagttattcctaactggattcaagaggtggttgatggctatatgtctgatcctgaggcttctagtaaggttcaacaaaagattttggccaaccttcacactgcaccagtagggggtcattctgtttgtgaattcttgttctatctgtcagcaagcaaagtcagaacatgtcaaataccctggaatgttacaaccattacctgttccagaacatgcctggttctggccaaagttggagaagtggcttataaattggctttgccggccactagtctgattcatcctgtcatccatgtttcccaactcaagaaagctttggcgcccagtgaatcactgtatccttctttgcccaggattcagtcaagggatgatcctcatgttgtcacatgggagaatgctcaagagctgcgtcttcgttttcctcaatctgaagcttggggacaagcttcgtctcaaggtggagggaatgtcacggcggcaagttctctgaagctggattcaaatcaaactgcagcggcccagcctgttaggcgatccaagcgtgaggcacaacccagtatccgttttcctaagagtgtgtggacccagtagatagaggctgggccactgtcagggagagaggcttgttagtgcattactatataagccggcaggttagagagaaaaggggatcgaatcatgtaaacaatacaattcaatctaattccaatctctctgcttgttcttt

SEQ ID NO: 3941 - DNA, 296 bp, Oryza sativa
  Clone ID: PAT_MRT4530_1086C.1
gacccggatattaattggccgatccacgcacgcgaattcactaatcgatcgagacttccagttctcctgcttggtgttcttcttaccccctgtggaggtaacaagaactcaagaacaaggtgtttgattttgactatacacagaactgcggtcaggacaactctgcgtaagcgatactttgtgtgtgtcatgtgctcagggccgtgcgagccgtacacaccgccgctgcaccagcatcagaaggaggctacccttgattgcagacgtactagcttcttgagcctggcgggacctga

SEQ ID NO: 3942 - DNA, 497 bp, Oryza sativa
  Clone ID: PAT_MRT4530_10870C.1
cttttaaaataaattttccttttttttttttttttttgggggtttttttttattttttttggtggttttccccttttaacccacacaccaaaaggtttaattggaaataccttggtaaaaaaaaaaacctgaaccaaaaaccccgcaaaatgggggcatggaaaccaaaaaaaaagggggccccccgggacaaaccccaaatggggggaaaaatttttgaaaaaaataacccttgggttgacgggcccggggtttttggcgttggacctgaacccaccctttatggccccgaagggggggccaaacccctgaaaaaaaacctgggggacgttggtaaaccaaaaacaaaaggcccttttaaaagaaaacggggggtcctggccccccctggtcggggtccttaaaccgataaacaccatattttgccccccaggcccctaattggagttccaaaaaaaattgaggggcccccgcccccaaaaaattttttccccggg

SEQ ID NO: 3943 - DNA, 599 bp, Oryza sativa
  Clone ID: PAT_MRT4530_10871C.1
ctaatatataggagtgttaacctacgtcatcaccttaccatatatatttttttgatgttcagatgtttgatttaaaattgatcgacaagtttgcttgcacctaagaagccaatccgttgtcatcgtacccataattcataaaagtgttccatctatttgcttttacaaatttttctggcatttagaaaggtccatagtgtgagtgttatggttacggataaggcatatatacctcctatcttacgacttatagaatatacgtgtatggtataccttcacgtacacaggttgtatctatacacatagtaggaatccattacaaaatatgtaaattatctatacgagtcaagtgatttccaaagtcctacttgaagtcttacatagagatcaagatgattcacggtataaaagagacccctgggaaggggtgcaaggcatcgaatctcattgctaacacacccaccatagtttacgaagccggaatacacggagccaagtcaccgggagatctcgtcgaatacatcaactacgatcttatcatcattctaacataccctaataccctaatcatccggtatacgagtatcattcatcgacag

SEQ ID NO: 3944 - DNA, 467 bp, Oryza sativa
  Clone ID: PAT_MRT4530_10872C.1
aggaggaagagactacgccacgcccacgccatggcctccacctccgactccgacgaggccacctcccctgccaagaggagcttcacgacggcggcggcgggtgaccgcgagggtgacagcggcgggcctcggctagacggcggcggattagggttagggtttcttttttctttttttttttgtttctttttttttctccatgcggacggcttaagcgctcgcacacgaaaattggttttcacgtgcgggcgcgccacccgcacgtgaaaatcgtgattttccagacgactgggtgcgtgcaggccgcccacccgcacgcgaaaattggctagcccgcacggaaaaattggcgctgtagtagtgaaactttaaatttatcatggatccgagagatccgaagttgtgctgaattcatgtggaaaaaaaaaaaaaaaaaacaagattccacggatattttctctccccct

SEQ ID NO: 3945 - DNA, 602 bp, Oryza sativa
  Clone ID: PAT_MRT4530_10873C.1
catgcatttgtcagatgctgcctttcctgcagcacttgaaattcaggaagcacggaaaagcaaatcctgattgttccttcacagccaggtgcctgtgctccatatgatgacgacccataagcaacacctgttatattgataatcgtgtaacgtgcttcgttatctgaagcgggactcgacaatgaagcatccgcatgctggttttgtggcggtatggctcacaccatggcttgtggcatgccttcctgctgggaatgggttaatgtgctggatcgagatggaaccaattgttggatcagtttgcttgccaggtattactccctggcctatttcggcctggggatattgctgcgtcgccagcatcacctgcatcaatcagtgtggtggcatctatgttggagatgggacaacgatgattgacttgtgagtgtcatgattgatggaagaatgttgtatcatcttagtgggtatggggcagtgttatgttttgatccaggaaagggaaatgattgagttcatacttcacacccctccttggaaggtgagtttttgtaagttggatcagtgtactatatctaatatcccatatcatgttgagatcc

SEQ ID NO: 3946 - DNA, 2065 bp, Oryza sativa
  Clone ID: PAT_MRT4530_10874C.1
ggcgcggaatctcgggggtcgacacacgcgctctagatactgcatgatccttcacaggcaggggcctgtgctccataagatgacgacccataagcaacacctgatatattgataatcgggtaacgtgcttcgttatctgaagcgggactcgacaatgaagcatccggatgctggttctgtggcggtatggatcacaccatggcttgtggcatgccttcctgctgggaatgggataatgtgctggatcgagatggaaccatgaggcggatcagaatgcttgccagatggcggcggcggcggcggaggatgcggctgtgccctcgcctccgccgagcttgctgtcgctgtgcttggaggcggtggcctcccacctcaccgccggcgcggcgggcgtcggccaagagggtggccggtgctgcttttcagctgccactgctgctgttgggtttgcaggccctgctggagaaagacttgctataaaaagagctgggtctgaggctttcaaccgtgaatggcacccagtgctcgcacttcgttggccccaatgtgtggatccaggacgtttgcccagggtattactccctggcctgtttcggcctggggatattgctgtgtcggagagcatcacctgcattaatcagtgtggtggcattcatgctggagatgggacaacgatgattgacttgagagctgtcatgatctgatggaagaatgttgtctcatcttagagggtatggcgcagtgttatgttgtgatcccagaaagggaattgaggcagttacgcgaggtgtttgagattgcaaagtgttctttgcacagcagaaatttctggtttgttgcaatgtagcaagctggaaaagttgatgtttgtaagaattatatcagacctggaggttaatggtgtatgcatgcttctgagctgccatgcagagacattgctttctcttgaatttatccattgccagctttctccagctgtcatggataaaatttgtagtagtgtattgcagaaaggatcagtaaaccatgggatccagaacttcagtattaaatcatcacgtatttgtgaaagcaatcctctaaacatctctgccggcttattagattttctgtcaatgggaaagtcattacaattgctatcacttaacgatactaagatgcagccattatttgctaaaataattgtccatactcttcttggatcatcaagtggcatacgaactcttgagatatcagaaaacaatgctggttaaagacaatggataaaagatttgcatgcttttcatcagcactggagtcaaatatttctttgaactccttgacccttcttaacctgaggggtaacaatttgaacaagggtgatattgaagatctatgcaaaatcctagttaagatgcctaacttgagagatttagatataagtgacaatccgatcatggacgaaggaatcagattgcttatttgttttatttcacggacccttcgcaaggaaaaatcactttcaaggttaagagcagagaactgtgacttgaccaatattggtgtgactgaacttcttgaatgcctttcatctgtgagtgaaccacttaatctgttgtctatagcggataatcatctgggcagttctgttgcagttgcattggcgaaatttttgggttcaggtgtaagggagctaaatattgaagatattggctttgggccactaggcttccaaatccttgaggaagcattaccagcggatgtagccctttcccatataaatgtcagtaagaatcgtggtgggattagagccgcacgatttgtttcccgattaataaaacaagcaccaggccttgtgtcagtcaatgcagggtctaacctcttgcctcctgaatctatggaagtcatctgtgatgtcttgaagcagaaaaatacatgtaacctggagcggttggatctgatgggcaacatgcatttgtcagatgctgcctttcctgcagcacttgaattcaggaagcacggaaagcaaatcctgattgttccttcacagccaggtgcctgtgctccatatgatgacgacccataa

SEQ ID NO: 3947 - DNA, 461 bp, Oryza sativa
  unsure (1)..(461): unsure at all n locations
  Clone ID: PAT_MRT4530_10875C.1
ctctctctgccatgntgacaacatggcatctgttaagagtactttgcaagtccgttatcggcttggttgacagcttttaccgagaggacgtcagagggatatcatggcactcaagggataccgaccggctagccagatccaactctgaactatttactggcgcgtgagcttatgatacatcaacccctcgagcaaattgatcccgaccaggggaaccgcacaagtccttcctatgatgcgcaacactgactcccagagtctaatccgccacgctgaaaggaatcagggccgcctgagccgtatctacatagtttctgatgcgaagggactcatcggccggggtttctctgacacatgcgggcaaagcgaacataagctctagcggctcatagtgctactcgagcccggcgacaatgctattaaaggtgtgctgctaatggaagagcacaagcaattcttag

SEQ ID NO: 3948 - DNA, 456 bp, Oryza sativa
  Clone ID: PAT_MRT4530_10876C.1
atgaccgcttgccgaccggtagtgggccacggcagaccgacggtggccgaaggggatctagcggcaatgcatattgtggtcgatttggccatggattttttctcgccaacagtcatggaatcgttgatgctcgaggataaggcaatgcgacttgagatcctagaggtaagtaacgaagaatgtaggagggaggaggaggctcgggggatcgagaaggcggcaacagcgagttgccttcctcaactgctggagagggtagctcgaggtggtgacaaccattgttacaacggtcagtggacatgcctcttccctgtcgatctccacaaccattatcgtcgcctatgcatgctaggtctggagaggttggtggcgtggtggctttgtctaggaccagaccttctgcagcgatacatcatcgatgccaccggcgccgtctctcgtagtcatcctacctag

SEQ ID NO: 3949 - DNA, 1305 bp, Oryza sativa
  Clone ID: PAT_MRT4530_10877C.1
gcaggcgcagcatattagattataagactgtgctaggacgcagccgcagtgcccccctctctctctctctctccccgtcttcgctggctccggcgccgcctcccctcgttttccgagagagagagagagagagaggcaggcggaaggggggatggacgactacgcgcgggagatgatggagctcaagacgctcgtcacccgcaccctcgagaagaagggcgtcctcgccaagatcagggctgagctaagagcaagtgtgttcgaggccatagaagaggaggatagggtagtggagaatgatgatggtgggaatcccgctttgcttggtagctgcaatgaccgagctaagcagctgcatgcttcaccatcaggtaggttattaacagcacttgtaagtgaatacttggagtgggcccagctaagtcacacgatgaaagtttatctgcctgaatgtaatctgccaaaggacttctggaagaatgaattaaaggatttttctaacaaaagcggagctgaagggagcaggagtgctgaaagtggtcccatgcttctagatgttcttgaaggatatctcaaatatgagaatttgtctcaaacaaggatggctggtactggtaggagaataatcaattccgagtcggatccggctctaaatgctgaacataggaacacgaggaggccaccgtcgtcttcttcagttacaggcttgcctcctatgggaaggccaatgccatcgtcacagatgtcagaccgaagaggggggtcttcggcttccaatgcaaggaaggatgaatacaactggagatatgatgctgatgatatctctgaagaagtgttgcgagcatcaagtgctctagaaaacgtccagctagaccggaaagctcgcaatctgacgacttcttggaggcatccaggcgacggtgctgagtaaaatcggaaggtgggatgggtccaattcaccattgcgctgcttggacccccttgggccatttgtatcgttttggttgctgcggtgggattgtgcgcttgcgtagaagaatgctcagtgttgatcatgcctactgtactcctagctcatttgtttatgcaccatatatgggatttgatttctgctggacaatcttgttcttgtgcgtaaaaaaaaaaaaaaaaaactcgagacaaatattttcttttccttacaccgggtactcttgttacaacgtgcatacaaacctgccctgcagcagctgttctctccaaatccagtttcctgctcctcttgtaactcctttgagcagcattcacttataagaagccaacaac

SEQ ID NO: 3950 - DNA, 839 bp, Oryza sativa
  Clone ID: PAT_MRT4530_10878C.1
gccgggtcggccgaaggaaccggcgaccaaatttcattaagattgggaggaaaaaaaatcaaagtacaagtagttctcgcttgcaacgacaggaggctgtcgaattagactgtggcaggaaccacagcccggcaaactaaagaactggaaacgtcaacacaacagaaagaaaactaagaactgcaattctcgaaatagcctgcttctttccacactaagatctcttctttgatagcctctgctaactggttagggcttctcgatctttggtcgaaaacacgcgcatttctttccttccaaatctgccagcaaatcagcatacaagcgctgtcgaagtttgtcctgtagcacttccgaaaacatgttctggcctgcaaccaccactctgtcaggcatgtgttttcgctcccagggatggggaagtaagcactgatccattgccgcatcagtctccacacactcgaaataagcactgatcctgtagcaccctcgaagatatgtattccttgatgaagtctgaactcctcctgtattcttcgtaccgttcttcagggatggagatgaactggaggacgaacaggccatcctgtgccaggagagactcgcagcagccgaagaaatcgtccatgtattcatggcctaccccttcgatcatttcacaagatatgatcctgtcatattttcgaactgttggtatttgacggtagtcgcacagcaggaaagtcatgtggtcctctagaccagcttccttcacttttctctggcaatatttaagctgctcctcagacagtgtgacaccacccacgcgtccgcccacgcgtccgcccacgcgtccgcgt

SEQ ID NO: 3951 - DNA, 954 bp, Oryza sativa
  Clone ID: PAT_MRT4530_10879C.1
ggacgaaggagaggatcaatcccgcgcacgagcgtggagaagaagacggcggcggaggtcgtcgccatgctggatctgcagcgccaccccgacggcgggttcttcctggagaccttccgcgacccctccatctccctccccaagtccgccctccctccccgctataaggtagaccgttctgggagcaatgccatctatttcctgctgcctgctggagagattgctaagttgcaccgcatcccttgttgctgagacctggcactactacatgggggaacctctcacggtatttgaagtccatgacgatggacagatcaagatgacagtcgttggacctgatctacggcatggccaaaagccacaatacacagtccctccaaatgtttggtttggcgccttcttgacctgcgacatcgagtccttcaccgaagatggaagtgtatttgtcaaaacgccaggaagagaccctgaacttcactactctttcgtcggtgtaacctgtgctccagcattccagtttgaggacaacgaaatggcaacacgggagaccatgaagacacttgctcctaaagccgaagctttcatcaactaccttgttccttcagactgagtctgaaaccatcactccaagtagcttgctcttcgtgatgaactttatgtaccaagctactgattcagtactgatgtttactgcttgatctgagatctgttcaggactcgcaatgcagaaatcatgaggcctgaaccttgcatatatcatcactgtatcaaactggttgtttggttacatagttttgactctttttatgaaatattgtgattgctgacaaaaaaaaaaaaagaaccacttttcttctcaaggcctattctcatctgtcccattcttctctctgctcccaaatgtatcctctttggtaatcaacctctaatattgccctaaaaaaaaaaaaaaaa

SEQ ID NO: 3952 - DNA, 303 bp, Oryza sativa
  unsure (1)..(303): unsure at all n locations
  Clone ID: PAT_MRT4530_1087C.1
agggctatgtgctgacaatgatgtgatgggctgatgtgatgatgcacgaagatgaaatgtgactgccctgccagccatacgatagacatagtgccgttgtntggtgagtgttggtgacaatggtgtgcggaggtgtgaaaactgtgtgttgaaaacgtgtgaaaatgatgctgtgtgtgtgtgttgaaaaaaagaatgatannnagattgaatgtattatgtattagaaaaaaaataaacatcangcttgtagatttgcctcaaaacattttaaggctattataaaaaaaaaaaaaaaaaaaa

SEQ ID NO: 3953 - DNA, 780 bp, Oryza sativa
  unsure (1)..(780): unsure at all n locations
  Clone ID: PAT_MRT4530_10880C.1
ngagcgannangncnagcgaagagcgagaagagaggttggtgtggtgagcgacgatggcgatggcgtcgtcgtcgtcggcgtctgcggcggcggcgcgaggggggagcctggtggaggagtggagcgggcgcgtgaaggcgctggaggcggggttccgcaagtggatggcggagcagccgacgcacatcgaggccgcggtgaccacggccgtgggggcggtgcagggggcggcgctggggggcctcatgggcacgctcaccgccgacgggggttccccgttcccgacgccgccgccgccgccgcccaacgcgaacccgcaagccatggcgtccttcaagcaggctcaggctttagctggtggaccattggtgcaagcccggaattttgcagttatgactggtgcaaatgcaggcatatcttgtgtaatgagaaggatacgtggtggtgaggacatccagggcagcatggcagctgcttttggttctggtgctctgttctccatagttagtggaatgggaactcccaatccagttgcaaatgcaattacaactggtgctgcttttgcaatatttcaaggtggctttttcatgattgggcagaagttctcaaagccacagagcgaggatctgtactactcccgtgcaaggagcatgctgcaaaaactaggcctcgagaaatatgagaagaattttaagaagggtctactcactgatcaaactttgcctctccttaccgacaggcaagtcattgtttttgtttgtaatcaacaccatttctga

SEQ ID NO: 3954 - DNA, 403 bp, Oryza sativa
  Clone ID: PAT_MRT4530_10881C.1
ttcgaattgctcccactacacaaacacaagggactccccgagtaggtgaaggtcaagttaggattgggtgtgttcggccgtcaacggtaacgacgtgactcatcggttttagggccccaataatgataacggtttacgccacaaacctacgttgggtggatagagtctactataaaactacttcccgaaagtccacctattcttctagtatctaaacgaggttcgagctaagactctctgtgatgactaacaggacaaccaacgtggtagttcctgtcatatagtgtacgtggactacgatacattgatagtatatactatgcatcttattcaccccaaaatacacgactttaacaatagtacgtactatacgatttcgtcatacaataaccttttttttttt

SEQ ID NO: 3955 - DNA, 123 bp, Oryza sativa
  Clone ID: PAT_MRT4530_10882C.1
ctcaagctggcttcagatttcgatcagcttcatccttcagacaacagactggctgtttcacatagtctcatggctttaggaaattctgcaagggactcaagctcagttctaggcactcaacat

SEQ ID NO: 3956 - DNA, 303 bp, Oryza sativa
  Clone ID: PAT_MRT4530_10883C.1
atggccagacatcgagttcccaccagccgttctaccgcttgtctacatctccaacgtgttccaacagcagcagtagcaacagggcagcagaacgaatcaatctctgcgtgtaccacggcacaaaggtgccaccgtgccgcccaaaaccaagaccatggagctcgacgttgtcatgctctcccccgcactgggccccatggcaccatgcgcgtcatgcgccgcgcccggatcatcggcgacatgctggagcccggtttgtcggcgccgtgctggtatcaactctttacggtggctggagattga

SEQ ID NO: 3957 - DNA, 423 bp, Oryza sativa
  Clone ID: PAT_MRT4530_10884C.1
atgacggtggcgacctccgccgagcggcggcgcgcgaacgagaagcggcctgctgctgccgctagccaactacgctacgagaggcctccgcgtgaatccccgcccctgcctacctccgcgacatgccgacgaggcaggtggtggtggagggcttggcaggcgagacgggacccccacgctgtaccggcgacggaagaggcggagagggggctggccatccggcgaggcttgggcgcagggggaatgggggatgagcagtttggacccccttcgcggtcccagccggccaccgtctcgccggccaggttgacggcgctggctcttgttcgtcgaggtgacgcctccctctttctcttcgctgttatgcaatgctctgaccgacgcgtggttttgctctggatcattgctgcatttggttactga

SEQ ID NO: 3958 - DNA, 457 bp, Oryza sativa
  unsure (1)..(457): unsure at all n locations
  Clone ID: PAT_MRT4530_10885C.1
gtcccttggtctctttaataagtataatgagataccttcagtgatggcaatgaagattgtcagctgcttcttagcagtgatcttgatatgggaaattcctggtgtatttgaactgctgtggagtccatttacatttctgctaggctacaaggacccagagccttcaaaagcaaacttaccactgttgcatgagtggcatttccgatctggccttgatcgttatatatggattattggaatgatctatgcctacttccatccaaatgttgaaagatggatggaaaagcttgaagaatctgaaactaaggttaggttgtcaattaagggaaccatcattagtatttccttggtggctggctatttgtggtacgagtatatttacaaactagacaaaattacatacaacaagtaccatccgtacacatcatggattcctatcanctgttatatctcccta

SEQ ID NO: 3959 - DNA, 1345 bp, Oryza sativa
  unsure (1)..(1345): unsure at all n locations
  Clone ID: PAT_MRT4530_10886C.1
ccaaaaggccagaacgcccccaaaaccaaaaccattccccttcctacacctcgccacctcccgcacacctcgtcgccctcctcctccgccggcgccgccgccggancanaggctgcagttactcgaagggctggcaatggagggtgcggcggtggaggactcggcggcggcggcgcccgttgtgatggactgcgttcccgacacgcccacacaacacccaaacccaaaagccctcgcaccgtgggtgtctaatgggacgtgcccgcaaaaaagcgcccgcctctaccgggcccaaacccaggcaacacaaacaaaaagcctccgcagatctacagaggaaaatttcgatgtctctcctgaggaaatgagatcagtcatagaaattatagctgacacgggaaagttctggcatgattggagctttctcaagagattgctgtctctccaattgaagcaggtcttggctgaatattctgagggtcaagtggtgagccaagaggatgggcagctacagaattctttctctggggagacatactccgagcttgtcatctggctcaatgatgctctcttgaggttcgaagaaggtcctccatttacactgcaaaggctatgtgagattttgttggatccaaaaggaacatatactaaactgccaaagcttgctttggccttggaaaagaacctcctggtcacatctacaatgaccaagtgcactgatccatacccagctgctcatgtgtcaaatttagaagctacagtaatgacagagaacaccagcgctgttgaagtagaacctgaaaggctgccggaacatcctgcagcagtaccgaatggaaatgtaggaggtgatgctgatgcagaaatggctgatgcggaggttgaggagccatcgaatagccacgatgtcgagatgcaggaggacaagcctgaccagatttcaaatgttaaccctggtgctacctcagatgctgcagttactgcagaaacagttgatgctagtgaaaaatcatcagatccgcagacatgagcttacaacagagaccagaagccctagtgcatgtctcattagtaatcattgccacccttgattcagcaacttagctcgatgcagatggcagattgtgctatgtgacgttaaagtttttgtgggccatgataaacatggggtaggtgagtataacgaccattttaaatcctaaaaaaaaagaaatgtattttgagtagaaatggatgtgaaaaattttcactgattgtcgttccggttgtcaaaatatgttgtaccccaatgttagtcaaaggagttgtcggctccgttttgctctaaaaaaaaaaaaaaaaaaaa

SEQ ID NO: 3960 - DNA, 2020 bp, Oryza sativa
  unsure (1)..(2020): unsure at all n locations
  Clone ID: PAT_MRT4530_10887C.1
gtgggtggggttttttgctctgaaatatgaccagatgcacgaatctaccactgggtgtttcagtgactttgattttacagaaattccttgtacactttttatggctaaaagtctgcaaccaactattacttctaaaagaacgcaagggcgggctggatntgggcattactttccaaagggtggaaaacaatatcctcttcctatttggagtgcacttatctccatctgcaaggtggaactaggcgccgacggtcgacggatcattctaacaacaattcacaagcaaacttctaccgtgaacattttcttttcctggaactgcgccacaaaacctttctgttgtctagtatataatagatgcattgatttgtgttgtctgttgaggttcttttacctatacaatgggaatcttaagaagtacaattgagaggaaatacagacatacggagatggcaatcccggcaacaaaattttgatatagacgattgttatctctgctgggaataaaagctgacttcaacacacctgtcagctcaaacactctgtatgatataagaagatatattgctgtagcaagcataaagttgagcagtgggtaacccggaatgaaagagagaagccattttggctgcccgttaggcatgttagacctgagccaaatgtggatctgagagatataggtctccagagtaatcttgccaagccacgtgataggaatccatgatgtgtacggatggtacttgttgtatgtaattttgtctagtttgtaaatatactcgtaccacaaatagccagccaccaaggaaatactaatgatggttcccttaattgacaacctaaccttagtttcagattcttcaagcttttccatccatctttcaacctgaaaccatagcataatgaattgcatcctacataaacaatgatggagaagggcagaaggacaaagactatttggatggaagtaggcatagatcattccaataatccatatataacgatcaaggccagatcggaaatgccactcatgcaacagtggtaagtttgcttttgaaggctctgggtccttgtagcctagcagaaatgtaaatggactccacagcagttcaaatacaccaggaatttcccatatcaagatcactgctaagaagcagctgacaatcttcattgccatcactgaaggtatctcattatacttattaaagagaccaagggacccatataccataagagtaaacaaagtgtgcattgggcatatgtaatagagcatgtaatcattgtcaaggacaatgcagcagaaagccacaaaaaaattaagtctccacatcatctgagcaaatctggcaagactaaagtctttcttaatataatagtatgagaagttcccaaatccagtcatccagacataggcagcaatgaaaacacgaattgcattgtatatttcagtggcggcaaaatagtggtacattaaaaacaggacctgcatccaacctttccattcctctgtttgatggcgattaagatagagtatagatttccctgagaatgctgatttgtcatggtgcttcttaagtgatgttaatgctgatgctatgatgagaagaatgtataaaaacagaaacagatcacggttgtaactcttcttgctttctggaaatatgtttgtccgatcacaaatgtagaaataaaccagaacgatgccaaattctgccattgctctcagtacagcacgattttccagaaggaaagattcatccattgttataaaccttatgaggtttgcttttgtagaattgatccgaaactttgtagatggtgactttgacaggcctccttccagcaataccgttttatcatcttctttgacagttccattctccaaattggaatcggagtgaactttcatagacgaagattttctgtactccaggacttctgaatagatccatgcaatgagaacagggaatagaccaagcaaaaatgacacctggccggcggtgacggggccgaagacctccat

SEQ ID NO: 3961 - DNA, 966 bp, Oryza sativa
  Clone ID: PAT_MRT4530_10888C.1
atgggttcaatagtcattgaggggtggacggcatctgagatagaggaggctaggtcactgatcactagccccaacaacggtggcgaaggtggtgatggagaggggaacaagcagaagcattgcggacacatcgtgatggaactccatgaatggttcccttggaagaccataggccaggtaataggtttgtatatgaagctcaatgcggggaaacccatggttatgcatagcttgaataagagtgatgccaacaatagcatcggtgaggttgatcatgtgagtgccctcgcaaacggtaaccctgtgaggctagaggaacatcgacccatgttgaacaatgtgggcttagtgtttgattatccattggaagagatggagatggaaaatcaaacagatcaagagccgaagatggttgtagaggaggaggtgcagcctaaggagggattagtgatcaaggagaaagaggcgggggtgtcaaagattcacactaatagtcaacatgtgacgccatcaataaaaagaagggtgatttggacagaggaagaacacaggctgttcatggtggggctgcgcgtgttcgggcgcggcgactggaagaacatctccaagcaccttgtcaccaccaggacggcggcgcaggtctccagccacgcgcagaagttcttcctcaagatggaggcccgcggcgaggccgtccccccgccggccaagaggcgccgccgccgcatcaccggcgaccagcaggcggcggccgccgagcacgctgccgccctcaggcgccgcatgccagtgccaccgcctccgttcaaccccttcctcctgcccagcctcgtcgcgccggtgatgcaccgcctcctcccacctgggagccaggctgccggcgccgccgcctccggcagcggcggccagggagcttctcttcctcagatgccatggatcaacggcgccaatggcatggggcgctag

SEQ ID NO: 3962 - DNA, 318 bp, Oryza sativa
  Clone ID: PAT_MRT4530_10889C.1
atggtgaggaccgggactatgttcagggaggaacagaggtctagtgcggtcgggataccatgtgagaaggtgactagagtcagaattcttggaggtcaacttcggtcaacggtggggatcgggacaagacttagggaggagttgagatccagacggtcaaggataccgggtgacgaagttggatacgagatgatagcatgcatgtgtgcatggtgtatgcatgtccgtgacttggactgggaggagcagcagcggctcggttggatggcatgtccgaccccgagcaggaaatggcaggcgcacgggttcaggcggtag

SEQ ID NO: 3963 - DNA, 205 bp, Oryza sativa
  Clone ID: PAT_MRT4530_1088C.1
tcacgtacggctaaaagtcgccgggctcgccgggcggggcaccgaaattccggtgtcgcactgtcacacccgcccgccacgtctagcggaggtccggctgctcagcctatccgtgccggccgcctcgccgctggcgccggccgtcatctgcacgtccaccgtcacctacccggtgtcggcgtcggctgcgctggtggtgtactag

SEQ ID NO: 3964 - DNA, 315 bp, Oryza sativa
  Clone ID: PAT_MRT4530_10890C.1
ccggaaggggggagctctgcccttatattaaaaagttggtttcacactcccattcaagggttttccctggaacaaaaagcaactgggctttccccataaactccattgcttagcgaatttagttggcccgtttattttttggtaaatttcctgcaaatagaacctctggggggtacaaaaacccgcccaaaaaacatttgcctgggttccattggggcccaacaaagttttttcgaaattgttccagggcatttaatgataacctgagccctgattggaattttcgatgcctcaaaaaaccctactcttttttta

SEQ ID NO: 3965 - DNA, 440 bp, Oryza sativa
  Clone ID: PAT_MRT4530_10891C.1
atggtgaggaccgggactatgttcagggaggaacagaggtctagtgcggtcgggataccatgtgagaaggtgactagagtcagaattcttggaggtcaacttcggtcaacggtggggatcgggacaagacttagggaggagttgagatccagacggtcaaggataccgggtgacgaagttggatacgagatggtatacggtggatggacaccatgtgagagagatcttcgcaacgggcttcacgagatccgtgacttggactgggaggagcagcagcggctcggttggatggcatgtccgaccccgagcaggaaatggcaggcgcacgggtaggttgcggctgtgtagttcttcgatttgtgtttctccaggttcaggcggtagggaggtgatccgaccggcggcgacaggactacgtcgagatttccatcgatttgagg

SEQ ID NO: 3966 - DNA, 1394 bp, Oryza sativa
  Clone ID: PAT_MRT4530_10892C.1
cccacgcgtccgcccacgcgcttactttgagagccttggtaggatgagctccgcggccatgaagctcgccgtggtggccgcgctcatctcggccgccgccgtgggcgcccgcgcctgcctcgacgtcggcttctacgacacgacgtgcccgacggcggagacgctcatacagcaggtcgtcgccgccgccttccgcaacgactccggcgtcgcgccggccatgatccgcatgcatttccacgactgcttcgtcaggggctgcgacggctcggtgctgatcgacaccgtgccggggtcgacgacgagggcggagaaggacgccgcgccaaacaacccgagcctccggttcttcgacgtgatcgaccgcgccaagtcggccgtcgaggcggcgtgcccgggcgtcgtctcctgcgccgacgtcgtcgccttcatggcgcgggacggcgtcgtgctgtccggcggcctcggctaccaggtgcccgcggggcggcgcgacggccggacctccctcgaggacgacgcgctcaacttcctgccgccgccaacgtccaccgccgccgacctcgtcgccaacttcaccgccaagaacctcaccgccgaggacatggtcgtcctctccggcgcccacaccatcggcgtctcccactgcgactccttcaccaatcgcatctacaacttccccaacacaaccgatggaattgatccgtcgttgagcaaggcgtacgcgttcttgctgaagggcatctgtccgccgaacagcaaccagacgttcccgacgacgaccaccttcatggacatcctgacgccgaccaagttcgacaacaggtactacgtcgggctgacaaacaacctcggcctcttccagtcggacgcggcgctgctgacggacgccgcgctcaaggccacggtgaactccttcgtgcgcagcgaggcgacgttccggctcaagttcgccagggccatgatcaagatggggcagatcggcgtgctgtccgggacgcagggcgagatcaggctcaactgcagggtcgtcaaccctgtcaatgtcactgctactgcagctgatgatcaccaccttacttcctcttcctcctcttcttcagatgaagtggctgcaagctaattaattaactgattaccactgcttgttagtaggtgtgcatgcacagacagtgattgagatgtgtgtgaagttcagtgtgatgagatgattagatgcttcaattgtttgttgcagttacagtgattgagagacatcagatcttgtttacctgatgtaggtgttggtggttgatactgtcaccatcttgtgcttgtcagtctgaaaaataaattgttgcatccagcatgcactggtgtcaaaaattgtaaaagaaaaaaaaaaagaccaggtt

SEQ ID NO: 3967 - DNA, 359 bp, Oryza sativa
  Clone ID: PAT_MRT4530_10893C.1
tcagagggatgttggacttccgatcgccgtcgcttgcgcatccaatggctcctgtccgcgtgtgatgatagccttctcgttcggcccataagcccattcgtcgccatcagattgctctagcatcgtctgccggagccgcgatagcgtgacggtgagcttgggcacacagctgagcaactggacgcagccctcccatgcgctgtccttgatgggctccgtcttggccaacaggtcccctgacgacgcggacgatgagcaccggccgtccggcctcgccgtcctcatcccctgtatatggtggatcggggaggagcccccataatcagtgccccggagatgtaggctacggctgaactccg

SEQ ID NO: 3968 - DNA, 518 bp, Oryza sativa
  Clone ID: PAT_MRT4530_10894C.1
cccaaccacccaacccctaaggaaatttttaccccccaaaatcttgggttacaggccaagggggggtaaaccccttatgaggggggagaaaaaaaccttgtttaagttaaaggggggaaaatggaaaaaaaaaaaacggggggggaaaaaactaaaaaattggggggaaaaaaccataaaataacccagggttaaaaaggggggggggggggggcccccttttaaaaaaagactttgggattccttggtggaaaagttaaggcaacatgcgggaagcaaaaaagggggaaaaggatcttttcttggggggggaaaaacgggggggggggggaaaaaaaaaaaccagcccaaccgggtttgaggggttggaccaaaagggaaaacttgggaggggaggggccaacctttaagggttggacctaaaccgggaaaaaggtctggccgtgaaaaaaccggacgatgtttacaaaaatttaaggcaaaagaacaatgtcccggggggggcccctaaaaggttt

SEQ ID NO: 3969 - DNA, 476 bp, Oryza sativa
  Clone ID: PAT_MRT4530_10895C.1
ctctatttctctctattttcaattctgccaccacttcgtcttctttgccttagtagaggtgaccgtcggagagtgtgaaggaggtgatgatggcaaattcactgatgagatataccatggtggttcttttgtttcttatggtagcagcagggcatatatagatgaaaaggtcaattagttcaatcactgtgatgcaaagagctggtatgctatttagatagatgattttcaagcaatgcttgggtatgacagagggcaaatttgaaggcatattggttactcagaggaaagattctgtaagatgggcttagggtgatatcaacccaatctgatttccaagtgacggcatcagtggtagacatggtgaagcaatttgttctgtatttgatcaggatgatacaattgcaggtgtgtactgggaagatgttgtggctcatcctgttagtcaacttccaaaagttgagttcttgaagatg

SEQ ID NO: 3970 - DNA, 195 bp, Oryza sativa
  Clone ID: PAT_MRT4530_10896C.1
atggcggggagtgcagtgttgaggcctagcgacggcaatgtagtcttcaggaggaacgcatgcatcctcgacaccagcgatggacgaactctccacccgaagcttcaaatccagtggcttgtccttggatccaaaggtggcaatggcaatccagtgcatgggctcgagggacctcatcggttgcccatgagctag

SEQ ID NO: 3971 - DNA, 1362 bp, Oryza sativa
  Clone ID: PAT_MRT4530_10897C.1
atggcctatccccctctgtcgtcagccgcctttgctggaactgaatgcacggcgtggagggcgtccgggtgcggggacggcgacggcgacgcggcggcggaggcgctggcgagggggctgacgctgctggtgcgcctcgccgaccctccggccgtctccgccctggccatccggccggccgacggcgtcttcctcaacgccgcctccgtcgacgtcgccgacggcaacctggtcatcctcagcgccgccttctacggcttcccccggagatactatctcatctacgatgtcgccgaggcgtctctcgccatcaccccgcatctgcccaggttctgcaagccgtccttcacgttgaaacctctccccgtgcgtcgtcgtcgtcgtcctagggttggagaggccgtcgtcgtcgacgatggcgacgatcatcgcaactacgtgctagtactcgtggcaatcaacttcaacaaggatgatattatctgcctttggcctcctgatccgtcgtggtcttcgtcgtcgtcgctgccatggcagaggaaggagacacgattccccgtcgagatgaatcggccctgggaacagtatgggttcagtgccgattccgttttcaccttgaatggaatagcttattgggtagatctagcactgggggtactgtactgcaagaccagtgacctactactatccgatcgtgatgtcgtcgttgagttcagcttcatcgatctgcctcctggttatcgtgctgaccgtaacctcttccgcccgaagatgtttcggacacttggctacgttggtggctccatcaagttcgtctccgttgatggataccacaagagggaggagacctacttcaacacagaggatgaggaggaagaggaggacggcgacgactgcatcatcgaaccggttgcagctgcagaacgcaagataacaatgtggagtctgatacctggtggcaaccttggatggaaaaaagatgcagaattcagcgtaggtgatctgtggatgtgggaggagtttcagagtataggattgccgcggcagcagcctatcaatcctatactggatcctcaagaagatgggaacccaaggatagagaccaagcgctgggactaccgcccttgccagacgccacaactcggcctccgcagccatagctcttgcaatttccgtccagggccgctgttgaaggttgaacactcggttgttcctatctttccagatcatccaagctaccaatgtcgcaaggtggatgctggagtggtcttcgatccaggagtccctgctggcgtcgccggagtaccgccggatgtcgtcgggttcgccggagatgacaccggaactcccgctgctgtgtag

SEQ ID NO: 3972 - DNA, 720 bp, Oryza sativa
  Clone ID: PAT_MRT4530_10898C.1
atgtttaggtatattacaaaagaatcacaaggtccatccggtgatcagacacttgatagtgatgttgccaatgaacctaatgatagtgaaacagagatagaaaccactgttgttgaacctaatgacattcttgctcaattaggtcctaaaagggacttatcaattcagaaaggtcctaaagatagattgtctagagggttttctgcattattctacactagaaacctatcaaacggagatgagtatgatagagattggcttgtttattccaaggaacttgatagcgtattatgcttctattgcaaatcatttacaaaaggaagagagtatcgctatcgcaaaggtcagttaacaaatgaggggttcaatgattggttgcatttgagttctagacttagagaacatgaaacaagtccagatcatgttttaaatatgaccaattggtacgaattgcgtaacagattgcagaaggatcaaactattgataaatctgcccaacgacaacttaagaaagagaaggatcattggagaaaggttttgttcagaattcttgccattgtaaaattcctagctaagcataatcttttagcattccgtggttctaatagcaaactgtatgaagatagcaatggaaatttcttgggcatggtagaaacgttggctaagtttgacccggttattcaagaacatattcggcgtattacaaatgaagaaacccat

SEQ ID NO: 3973 - DNA, 2262 bp, Oryza sativa
  Clone ID: PAT_MRT4530_10899C.1
atgactccgactatgaaaagcgtaataagaaaaaaaagaatagaagatctaactcaatctcagagaggggctatgtttaggtatattacaaaagaatcacaaggtccatccggtgatcagacacttgatagtgatgttgccaatgaacctaatgatggtgaaacagagatagaaaccactgttgacgatgttcttagtgagagcacacatgaacaagtggaaaatcatggtgatggtgataatgttgatgacagtagtgtccatatcgatttggacagttcagacactgcttttcagcctgaaatttttgatccaaggtgttgggattctcttgatgctaaacaacttgacattcttgctcaattaggtcctaaaagggacttatcaattcagaaaggtcctaaagatagattgtttaggagatctgcattattatacaccagaatcctatcaaacagagagaagtatgatagagattggcttgtttattccaaggaacttgatagagtattctgtttctgttgcaaattatttacaaaaggaagagagcatcgctatcaaagattgcagaaggatcaaactattgataaagctgcacaacgacaacttgagaaagaaaaggatcattggagaaaggttttgttaagaattcttgtaattgtaaaattcctagctaagcataatttagcattccgtggttctaatagcaaactgtatgaagatagcaatggaaatttcttgggcatggtagaaatgttggctgagtttgactcggttattcaagaacatattcggcgtattacaaatgaggaaactcatgttcattttctcggacctaggattcaaaatgagttgatacatttgcttgcttgtgatgttaagaaatggcatattctaaaagataatatgacaggattgattctcaagtcagtgtcaactactcggtgggagagtcgtgttgaaagtgtaaaagctattagatttcaatgtgcaaagatacgtgaggctctactccaagtatctgaaagtgataatgaaccattaactagtagtgaagctaaaggtttggcaaataatgaacttggagagtatgaatttttggtggcgatagttatctggtatgaagttttatatgcagttaatttagtaagtaagagcttgcaaggaaaggatatgcttattgatgttgcagttgagaaagtgcaggggctgatttctttcttcaaaggttatagagaaactggcttcttaaatgcattgaagatgtctaaagaaattgcacttgaaatgaatattggtacaacatttcataaaaagcgtgaaattaaaagaaagagacattttgatgagaaccgaggtgaagaaagtgttgcctcacaaactgcagaggattcatttagaatcaactattttattcatgttattgatcaagctatttcctctctcaccaggagatttgaacaatatcaaggttatcaaaagatttttggcttcttgtttacttctgacacattgctatcaaaggatagcaatgacttgaaatcttcctgtgatcgtctcgaggctgcacttaaaaaggatggaaaatttgatattgatgctactgaattgcatgtcgagttgatttttctccaaagtttcatttcccaagaaaagttgggccctgttgaaattttgaagtttttgaagcggcatgattgttttcccaatgcaactattgcatatagaattttattgaccattcctgtgactattgcatcggcagaatggagtttttctaaattgaagctattgaagtcatacttgcgatctacaatgtcacaagaaagacttaatggtttggctatcatagcacttgagggtggtatgctggggagaatcaatataaagctatcattgaagattttatttcaagaaacactaaaagaatgtcgcttttcaagtgaatattatgcacagtttttatccttctttatgacttcgcacatggcccccaaatttgacgggacggccctaaccgagggtgtagcaaaatcggggatgacatttagcggcttggacggcagggatgcagcctcgaagtggagcgaccaaggaggaaaaggtgaacgtgtccccgccagccttgaggtggatgacactagccttcctagatggagaggcggagacaaggcggcagtgaccttggtctcctcctcactgaggctcacgacaacaggctctagcaccgcctgcttttacatccccctccctgcccattag

SEQ ID NO: 3974 - DNA, 1257 bp, Oryza sativa
  Clone ID: PAT_MRT4530_1089C.1
atggaggctgcggtcgacggcaggtggacacgcgtccgcacgctcggccgcggcgcgtccggcgccgtggtgtccctcgccgcagacgaccgctcgggcgcgctcttcgcggtcaagtcggcggcggcggcggcggcggccgagcagctcgtgcgcgaggggcgcatcctttccgggctgcgctcgccgcacgtcctcccctgccttggcttccgcgccgaagccggcggcgagtgccagctattcctcgagttcgcgcccggcggctcgctcgccgacgtggtggcgaggagtggcgggcggctcgacgagtgcgccatccgcgcgtacgcggcggacgtggcgaggggcctggcgtacctccacgggatgtcgctcgtgcacggcgacgtcaaggggaggaacgtggtggtcggcgccgacggccgggccaagatcgcggatttcgggtgcgccaggacggtgggctccgacaggccaatcggcggcacgccggcgttcatggcgccagaggtggcgcgcggggaagagcaggagccggccgccgatgtctgggccctgggctgcaccgtcatcgagatggccaccggccgcgctccgtggagcgacatggaagacatcctctcggcggtgcgccggattggctacacggacgccgtgccggaggtgcccgagtggctgtccgcagaggcgaaggacttcttggcccgctgcttcgcgagaaacccacgcgagcggtggacatcgtcgcagctcctggagcacccgttcctggcatcggcaggctgcagcgtgaaaacaggggaggcggcgccccaatgggtgtcccccaagagcacgctggatgtggcgttctgggagtcggacacggacgacgaggaggacgacatgccagcgagccccgccgagaggatcaaagcattggcttgcccctgctcggccttgccggattgggactccgacgagggctggatccaagtgctcaacgagtccagcgaagcttgcgacacggcagtggccaaggtggaggccgaagggaaggggcgcgttctgatcgaagcgttggaaacgatcaacgaatcttccggtggcgatgcagagtgtgttgatcccgagggcactgtacgattgattactgttgcttccattgggcagcaggaagtgttctgcttgggtctcattaatgacccacttgtattttctgttaataaaagtgaattaacaaagtctttgtttccccaaattgtctcattttaa

SEQ ID NO: 3975 - DNA, 536 bp, Oryza sativa
  Clone ID: PAT_MRT4530_108C.1
aggagaggaatttggggattttccacagttcattgatctacccctgaaggggaaatataaatatgtacaaaagagatgcgaaaatactaaactacccctaatatcttaacacccccactcaaatgcaatgtgtatacaataatattgcatttggagtgtaactaaacatgagaacacaaactaaatattagcctatctttaaagtcttgatgatgtcgtcaaagtgtgccaattcttagatgatgatgaagaaaagatatatccccttctcaatgaagtggatctcggagccttcacaaactgttcttcggcccttggtaccttgaagccttcacgaaccgttcttcggctctttattgatttggaaatgtggttgatgatgatgatgacaatggaacttcacaaactgttcttcggtcctttgactgatgatgatgttgatgaaggcccttcacaaactgttcttcggaccttcgctgattgatgatgatcatgatgacaagctccgacatggagacgatgaacccacgcgtaag

SEQ ID NO: 3976 - DNA, 301 bp, Oryza sativa
  Clone ID: PAT_MRT4530_10900C.1
acagttgcaatcccattcattccaatacgttagcaattcactcggtttaactacgaaagcagttacttgtgattcccacacgtttagttacaagtagcaaagatacgggcaataataataacaccattagacatagtaatatcctaataatgattaatgagcagaagcactctagtatatttagctggatcacagatcattgctccttaccaccaaccattattgattccctgcaagattctagctacacctcgtcgtcgtcgtcgtcgtcgtcggtgacctcctgctggatctcggcgta

SEQ ID NO: 3977 - DNA, 150 bp, Oryza sativa
  Clone ID: PAT_MRT4530_10901C.1
atgacccggctgccgcaagagggccccagaaaaagtgtggtgggtcccaccgccgcgcgccacgtgtgcgccaccggagcacagccagtacactcgactggagactatgggcagatcaagaatgcaacagaaagcaacagttcagcataa

SEQ ID NO: 3978 - DNA, 245 bp, Oryza sativa
  Clone ID: PAT_MRT4530_10902C.1
tggacgcggccgctccaaaaatcagacaccctcgttgcctgaactacttgtgcctcgacgggccaaacttccctactacgtgacgtcgaacttacaacttctgtaactcactgtcactacgctgtatacctgatgttgacaactttgtaactcctggctcacccacattccccaccacaaactacctgacgacctgtgaaccacgcactacaactgattgtaaaactgccttggtgtgttgccta

SEQ ID NO: 3979 - DNA, 1821 bp, Oryza sativa
  Clone ID: PAT_MRT4530_10903C.1
atgattgcagccatcagggcaaccaccgctgtcctcaaggctacatcacctacaacacccatggcatcacctcctctagcacctaccaagtgtttgacggaatgccccaacaacaacatcacttgggtggcggcgaattcaaatcacattggtgagatgcttgctccaacagctgcctgggagctaggagacaggaaggacatggaccaagctccctacattgccaccaaggacctccccaaggtcacgcccaccaagtgttcgacgctatgttctagcttcgacaacaagcccgatctcactgtggctgtggtggttacttgtgccacctctgtcaagtcattgatggagttggtagctactgacagcaccaccagcggcacccacatcgacacccctgatagtaccaaggcgatgcccaccaactgtttgatgtttggtatgatggtcaacactggtaccatccagactggggttgtgttcccactctttcttgacaagctggacatcgtcacagtgctaacattacattgggctggattaaaaccttggcctccaccccatgaagatgacctcacatacattttggtgaatcaaagagaagtggagttatggaggacaattttggttgatcacaataaggaaggattattgatgatcattgagttgtatgtcctagacttaaatgactgctgcttaagttggagtcacttgattcttgcaagtgtgcttgttgtggagctgagcagtactaggcagtgtggttatgagatcatttccttcaaaagcaaccatgttgacaagctgaaattatttggcatgtcaattaatgttttggaacagtgtgaacaccttgaaggggacttgatcagattaatcatcaaagaaaagctgatgccatggaattctggtatggggatctgcttgtgttgtctattggtaatacaacttccagttggcaagctaaaatggaatgtctctgtcatttcattgttccatcttttgattactaaagtcaacgagtttccaagagggatcacaacaggaggtaaatcaacattatggacatcttctgaatgcacttgtgttgggctgcacagaagatacccagtgttattgcctttctggattagcagagcagaaaaatgggttatgagacatattggcatgacaatattagttcctgaatcatggcagcaagcaagttacaaggtcctatatggtgcagagaagttgttaaatttgaatgctgaagataaaagttacacgagggtgaagagctttgaggaaggtgctagttcagttcaatataaggtatgtccttttgggctagttcctgcatcggtggtacttgatgatgtggcgtatactacttcaggaaccacttggcattacaaatgcttgactgataaaatgagaatgccgagagctgaagtgaatcataaaccaatgtggactcgatatttgagcaagcaggggtgtcactctttgcagcataccaaaatgttgagccttaatgttggcaagaagatcaatacattgctcctgctatatgtcacacaagaaagatttaaagggattgagaagttatcagccaggggagccaggggatatatcttattggcttgggacaagccaaatttaaagaagaggggattgtcatgtattgttgggttgatcatgagcttcgtcgactattctccaatccagcccaacaaggcccaactagagaggcaacaaagcagcaccaacaaggtgctaggaagccatcgaacagaacaggcatcggcggcttcggccacggcggcggcggcgtcctag

SEQ ID NO: 3980 - DNA, 645 bp, Oryza sativa
  Clone ID: PAT_MRT4530_10904C.1
atgcctagccaaagctctccgcaaactctcaatgggaagctaaagctcaacaccagcaccaccattctcctgttcatcgtcttcctcttcactctctgtatcatctcatgtgaagctcgtcacgatcacctccgtatcagtgacaagtactcgagcaagaagtcttccctggttcccaaggatgtggctggagacgatgttgttgggagcaagcagccgatcgatcaatcagtgggcaaggaggtgacgctgaatgcgaagatggaattggcggcatcatcagggagttcttctggctctctgaataaacggtttgaaggaaccaaggtgaggtcggttgcgcgagagcgttcggtgctaggagctgagactaacagagagcaagtaggatcaaagccggcgaccactgcgtacaccgcggaaaccctagcagccatggactacccagttgcacacacagcaccagctgttcacaacaggattacaaaatatggaggcatgagtgaatcaaaacatgagtttgcaatgtgcatgccctttgctgaaggtggttttcgttaccaattacatatgttggatctatttcctgcactggtctcctcacaaaggacctgtttagggaagttcagccgcaacatctcctag

SEQ ID NO: 3981 - DNA, 339 bp, Oryza sativa
  Clone ID: PAT_MRT4530_10905C.1
atggagatcagacttgaagtgctcgcgctgttcctgcagcgactcgaattcagaggcgcagagggggccgaggaagggtgggatccgaggagggaagaagaatcgaagaagtccgcggggaggtcgaagagcgagcgaggaggcctgctctccggcgaggccgccgccatctgcagcaacgagccactccgctcctctgcaacctgcggcccatacggagtcagcgcggccgcaacaactgctgctggagacggcaccggcgaggcggcgaccggtctcttgagcagggccaaccactcctcgctgcacgcctggaatccagatccggtgcagtcatag

SEQ ID NO: 3982 - DNA, 463 bp, Oryza sativa
  Clone ID: PAT_MRT4530_10906C.1
tcgcagcaacgaagatcattttagtcattgctctccttggtattgatgcatgcaatgactatgcgcaatctgatgtttaacgtccaagaccattgtactgataaatgcattccactgcactgctacaggagcatgtgcttactccatataccgagttcgctagggaagataccagtgtttagatggcagcgcctatattgcaacaaagctgcgggctagctccagaaatcacccacaatgtggcagacagctcagagctggttggggcagcagatgttactatcaggacatgaacattgttcatgccatagcacagagaactgcaactccaccagtttgaggatctctactactgatcgtaatctgcactcaagcatcaagctctgttgcgctataacgtgccatgtatagactggctgtagcctaacgactatggtgtacgcactaccattaccacccttgg

SEQ ID NO: 3983 - DNA, 294 bp, Oryza sativa
  Clone ID: PAT_MRT4530_10907C.1
atgggtatcactagccactgggtagtggctgaagacatcgttgctgataggtctgaaagggagcagtacaccaggatgaggtcgctggagcggccgattagaggggccagcgccggcggcgtcggattcggcgcctcttccgtctcattctctgctgtttcgtccagcgccgtgtcggtgcgcttgcgctgcggtatggtccccgcggcctggttagggtttggtgtcgaggtggtcgggggagtcttagggaaggcggcattgttgtatggaaaactgggggttcggcgatga

SEQ ID NO: 3984 - DNA, 390 bp, Oryza sativa
  Clone ID: PAT_MRT4530_10908C.1
atgcagaatagccacctcctggttgctctgtttctgccattctgcttaccctggttcagctgcttgtcaggtcgcttaagcacggcagctatgagaaaaataagacttacaggatctgaaccatcattaaagaggagaggttttttccgctacaggagattaccagtagaggcccagtctctatccacagcagcagatgacaagtctctacgactccatggtggacagctccgtaattattcgagtacttcgatgagcaatgagtctttggttcctaatcataatattggtctcttgggaagaattcagcaactaatagattcccatcaatcaagaaggtgccgtactgctgcattcgatgtgctcaggaaggtgctaaagcatgcatga

SEQ ID NO: 3985 - DNA, 1458 bp, Oryza sativa
  Clone ID: PAT_MRT4530_10909C.1
atggggttcgcgtacaggatcgcgagcgcgtcggagtacctggcgatcaccgggtacggcatcgccgacgtgaagctggcgaagaaggcgtgggtggcgccggggcagcggtgcacccgcttcgatatctccccggtgaactacaccttcgaggtgcaggccatgagcgccgagaagctccccttcatcctcccggccgtcttcaccatcggcccccgcgccgacgacgacgactgcctcctccgctacgccaagctcatctccccgcacgacaagctctcccaccacgtcaacgagctcgtcaagggcgtcatcgagggtgagacccgcgtgctggccgcctccatgaccatggaggagatcttccagggcaccaagtccttcaagcaggccgtcttcgagaacgtccagctggagctcaaccagttcggcctcatcatctacaacgccaacgtcaagcagctcgtcgacgtcgccggccacgagtacttctcctacctcggccagaagacgcagcaggaggcggtgaaccaggcgaaggtggacgtcgcggaggcgcggatgaagggggaggtcggcgccaaggagagggacgggatgacgcggcagaacgccgccaaggtggacgccgagacgaaggtgtacacggtgaagcggcagggcgagggggcgaaggaggaggcgagggtgaaggcggaggtgaaggtgttcgagaacgagagggaggcggaggtggccgaagcgaacgctgacctggcgatgaagaaggccgggtggcaacgacaggcgatggtggctgaagtggaggccgccaaggcggtcgccattcgtgaagccgagctgcaggtggaggtggaacggactaacgcctctaggcagactgagaagctcaaggccgagcatctcagcaaggctgtcgtcgactacgagatgaaggtgcaagaagcgaactgggagctgtacaaccggcagaaggcggcggaggctctgctgtacgagcaggagaagcaggcggaggcgcggcgcgcgtcggcggacgcggccttcttcgcgcggcagcgcgaggccgaggcggagctctacgccaagcagaaggaggccgagggcctggtggccatgggcgacgcccagagcgcctacctctccgccatgctcggcgcgctcggcggcagctacgccgcgctccgggactacctcatggtcagctccggcgtgtaccaggagatggcgcgcatcaacgccgacgccatcagggggctggagcccaagatcagcgtgtggagcaacggcgccggcgccggcggcgaggtcggcgaaggcggtggcgcgatgaaggaggtggccggggtgtacaagatgctgccgccgctgctgacgacggtgcacgagcagaccgggatgctgccgccggcgtggatgggcactctgactggcggcgccccctcgtcgaccagttga

SEQ ID NO: 3986 - DNA, 654 bp, Oryza sativa
  Clone ID: PAT_MRT4530_1090C.1
atgtcagccgtcgccgtcgccgcgctgaccaacgacctcctccgggaggtcttcctcctatgctccccaccgctgcagacctcgtccgcgcctctctcgcctgcaggcaggctcttcctctgcaccgcccgcgacgccaccttcctccaccgcttcagctgcctccacggcccgctcctcgatccccggtcgccgccgctgatgcttgggctggtggattccgcctttctgggatggcgacttctccctctgcttcttccgccgggcgggccgtcgaggaccggagtcgctgtcgtcgctgccatttaccgcgcgagggcagcagcggacacgcgcggtggtgctgctagcgaagcagaaagtacgcaacggcgtacctgccccatctgcaacgcggtggtggcgctgctggacacccgcgagttcgacgaggcgacgacgctgctggtcagcaccgggcacgacggaggcggagctgtgcaactgtgcaagaaggggtgcgaccatgcatgcgatgcgcggctgccggagatgctcgtcgcgtgcaacagcgctgtcaaacgcctttgcaacgtcgccactgacatcaccaggatgattgcatgcttcatcaacatcattgatcagacgagcgtgtgggttaccatagcctga

SEQ ID NO: 3987 - DNA, 1852 bp, Oryza sativa
  unsure (1)..(1852): unsure at all n locations
  Clone ID: PAT_MRT4530_10910C.1
tcatgttttgtcgcatggtttccatgtcggcttcagcctgtgtttcagagtcatggttgacttgtacagcagcaagcgcagtcgaggccgcagccggctacgacggggcggcttggggcaccagtagtttgcttgccaaaaggatctccgccctggtctggagtgcccttgccaccgcgactgcttcgccatgtcagccgtgttcggcacctggccagaggcggcaggagccgaaggtggcagtgatggcacaggcgcggaggcagacggcgctcctccatcttcggcgatgggcaccgaaggctctgctccctcctcggcagccatcttcccccagcttcgctttccttttgccttgtaaccttctccttcacgaccctcttcggtggcattcgctctcagtggtttcgctcggaggtccccacggtcggcgccagctgttgtcaaagcgacaacaagataatctggggtgtctcccggcagtgctttgtttatggtcacaagctcgaccatggagacatctcgttacaagattagtgccacaaacacatacgagatttgcaatatttatgataaacaaaagcatccacaaccaaccttctaaacatgttagagataaggcccgaaaggtggttatggttctcacacaaggaagtgatactaatcggatagaactctaaggattctttatgtaagcatgaatcctagggtattttgaaagagaagttttcatgctcatttgtggagttctcatcctccagagttgatgtctctaacttgtccatggcttgcagtttctccttctcaagagatgcatcgtgcaagaacaaggttgtttcttgacaaatgtcgagaacaacattttgatggccagagggacaaggttcaggctcgataggaggttgtgatggtggttctttggactgcaattcaacaatagactcaggggactcatgaagcagaactgccattgcttcctctatcggtgcatcatcagggggtatgtctgtcaacgagttctcatgatcgttatggagatcacccctgaagtctagagcgcatcccgaagtttgaaattcttcgttcttcggtgctgatggctcgagagaggataccttagctgaaactgatggtgtggaaggatttgattcagatttggctattgaaggttcctcttgttttgacaccgataccttctggaggggttcagaatgttgctctatgaaggaggtgatttctagaattcggtctagaatttccttgccttcggatggagttttgtgcatgaacgtccctccggcagtgatgtcgagatggaatgcagactccctacctaaacccgcatgaaaatgctgtaatagcacgtaattgggtatagacagggttggaccagactgaactaaattagtgaatctgaaccaggctgcaccaatcgattctttatttatctgctggaaactcagaatttctacatgaagagtagtaatacgggttaattagggggcanangcactattgcttggnaagggggggtcccccaaangggnttaaaacacccaacggtagatgtataccattgtttcgctctctcatgaagagagaacggaaacaatttccaacgaacagtttcttgcttcatgtctcgaatcttaaggcacgagcaaagcttttcgaattcctgaagatggtggaaggggttttcctggcctaaaccagagaaagatttctccctaaccatactgatgaattcgatacgaatttcatagctaggtgttaaaattggctccgatgaagaaggtggctcgtaaaattcgtcccgaggagcgcacaactcgaagagaggttgctccat

SEQ ID NO: 3988 - DNA, 2079 bp, Oryza sativa
  Clone ID: PAT_MRT4530_10911C.1
atgccaccgaagaaggtcacgaaggagaaggttgctaagcgaaaggatagtgaagcaggaggggagatgcctgccgaagagggagtagagccttcggcgtccgtcgtcgaagctggtgtggcaccatcggcttcggcacccgcgccgcaaccaccgtctttggctcccaccgcttcgatggggccagtgtcgaacacggtcgatgcagcaagggcagctgtggcggcaagggtgctccagaccagggcagagatcctttcgacgagccaactagtggcgccccaacccgcttcgtcacagccggcttcgacttcgaccgcgtccaccaccgcacaagtcaatttcaacctcgaagcgcaagccaaagctgacatggaggccatgcgtcagaacatggcacgacttcaggacatgctcggtcaaatgcaagagcagcaacaggcatacgaagcggcccgacaagccaaggccgcctcggcgcccattctccaatactcggcgggctacatcccgccccaagtctacccgcaagcgtcgatccaggtccttccgccacaagtcatgcaagcgccagcgtgcttcgccgggcaaccttcggccgcaaccatatgcccgacccttcacgtacaggcacaagttcggccggtcgctgcccaagtacatcccccgcaacctgcacagacgtcacaagcgctggcggaaggggcttcggccttgcaagcgcggttccaagctttccttcaacaactcaaccaactccacaatacttcaagcacaaccccatcggtccgaccggaagggaacgcaagtcagggtgcaaccagttggcttccgtcgaaccagcctggtccgggggctttgctgtggagtcaaggaccgcagtttgaccccaacactgccacccaagtaccaaccattcgaccgcaggcaacagcatcaggcttcagaacaaatcaagcgccgaaccaggtcgccatggcatggacccagcctatgtttgacccatccatggcggctcaccaagcgccaccattcggggctgggcagccgaaccctatggcccaacctcacgcgcaagacatgacttcgcccttcgccacaccatatccacaaccgaattggccttcgcagcaaggtgccgtgaacaaggcggggggcgaaaaggggctaccactgagctggggaatcaagaatcacccaatcccaccccagttcaagttcccacccgttccgcggtactcgggcgaaacagatccgaaggagtttctatacatatacgagtccgcgttcgaagccgcttacggcgacgaaaacaccaaggcaaagataaataaagaatcgattggtgcagcctggtccagattcactaatttagttctgtctggcccaacactgtctatacctgattacgtgctattgcaacattttcatacgggtttagatagggagtctgcattctaccttgacataactgctggaggattattcatgcacaaaactcccgttgaaggtaaggaaattctcaatcgcatatcggaaaatacctcctttgtcaggcggtatgttgaatcccatccagaggcatttgtgtcaggaagggaggaaccttcttttgccaagcctgaacttgagccttcaacatcttcgggtctgactaaagagtcctccttggagccatcgccggattctaaagagattcaagctccgaattgcgctcctagattcagggatgatcctcatagcgattatgggaaaaccttgatgggcatcctcccggataatacgctgatagaggaagatgatcttcgtttcattcaaaaagattctggcgagacccttgaatttcactccaaagaaccactatcacaacctcctatcgagcctgaaccttgtccctctggccatcaaaatgttattctcgacatttgtcaagaaacaaccttgttcttgcacgatgcatctcttgagaaggagaacctgcaagccatggacaagcttgagacatcaactctagaggatgagaactccacaaatgagcatgaaagcttttctttcaaatttcctcaagaatcatgctga

SEQ ID NO: 3989 - DNA, 775 bp, Oryza sativa
  Clone ID: PAT_MRT4530_10912C.1
ccggccgggaaaaaaaaaaaagaaccgtacggtctcctctctcgtcaaaccaaacccaagcaaagcacccgccacatcggagaagagagagagagagagagagcgtggaagcttctggaaggttctcgaagatgctgtcctccctgtcggcgtggctggtgaacccgcggcggaacccgctggcccgcctccacatgaacgccgtcgcctcccgcctccgcaaatacgggctccggtacgacgacctgtacgacccctaccacgacctcgacatcaaggaggccctggcgcggctgccgcgggaggtggtggacgcccgcaaccagcgcctcaagcgcgccatggacctctccatgaagcaccagtacctccccgccgatgcccaggcgaagcagacaccgttcagaggctatttatctgatatgctagcactggtgaaaaaggagagcgcagagcgcgaagcattgggagcactccccctgtaccagaggaccatcccatgaagcgtctacttcgtaggcctgtttctaattttcttgatgtatgaaagtgaattcaataaaacgcagtggacgattatgtaccatgtattatgctaaaatccttgttgtgtaatgtgttatgtgtatgcttattatgtgaagatacccaccgtcagttctccatagataccttttggtatgacaactgacatatggtgtatgttttgtaatcaatttaaaactctatatagcttcacttggagctgagtaggtaagaaagttttcattgtcgc

SEQ ID NO: 3990 - DNA, 273 bp, Oryza sativa
  Clone ID: PAT_MRT4530_10913C.1
atgggagggggcggtcgccgcctgacctcgggcccgatcccccctcgggggagggccacgtggcgcctggggcagccttctctctctagtctcggccagggagtggccgccgccctacctcgggcccgaccctcctcgggagagggccacgtggtattggggggcagcctcctccgtccaatctctgggagggagtggccgccgccctaccttgggcccgatcccccctcgggggagggccacgtggcgcctagggcagccttctccctctag

SEQ ID NO: 3991 - DNA, 438 bp, Oryza sativa
  Clone ID: PAT_MRT4530_10914C.1
atgctgtcctccctgtcggcgtggctggtgaacccgcggcggaacccgctggcccgcctccacatgaacgccgtcgcctcccgcctccgcaaatacgggctccggtacgacgacctgtacgacccctaccacgacctcgacatcaaggaggccctggcgcggctgccgcgggaggtggtggacgcccgcaaccagcgcctcaagcgcgccatggacctctccatgaagcaccagtacctccccgccgatgcccaggttgaacaagatttcgcaatcatcctcggtagttttggttcagtcccacattctgtttgtatgtatgcgaagcagacaccgttcagaggctatttatctgatatgctagcactggtgaaaaaggagagcgcagagcgcgaagcattgggagcactccccctgtaccagaggaccatcccatga

SEQ ID NO: 3992 - DNA, 204 bp, Oryza sativa
  Clone ID: PAT_MRT4530_10915C.1
atggaggcgacccaggaggaggattgccacagctactgcggctcctcttcgtccgtcctctgcgaggacggcagcgacgacgcggccgcctctcgcactccgctgccgttcgatctgaacatgccacctccggaggaggagctagacatggccgccgtggccgatcagatgggtatccgctacgacacgctgctccgcctctag

SEQ ID NO: 3993 - DNA, 2300 bp, Oryza sativa
  Clone ID: PAT_MRT4530_10916C.1
atggctggttttgctgatgcactgaggtcagacaaatgcaccagtgtgcacttcatgagatggcagatcaaggtcactctgtggttgatggctatgaaatgcttctaggttagtaatggcaaacctgaaggagttctcactactgaaaagcagaaagaattcgaggaggccactactctctttgtgggatgcctttttaacgttcttggcgaccgtctggtctacgtttatatgcacatgactgacactaaggagttgttggatgcaatgaataccaaattcggtgctactgatgctagcaatgatatgtatgtcatggagcagtttcttgactacagaatggttgacaaccattctgtagttgagtaggctcatgaaatacataccatggctaaggaactcgaactccttaagtgtgtcttacccgacaaatttgtggccgggtgcattattgtgaaactatctccctcttggagatgtttcagtactgcactcaaacacaaaagacaggaatactccgtcgaggggttgattgcatctcttgatgttgaggagaaagttcgggaaaaagatgccgcgtctaagggcgatggtgggcagtctagtgccaatgttgtgcacaaaggtccaaaacaagtacaaagagaaatacaaacctcagcagagcaccaacttcaagaaaagaaaacgaagaatagcagtccaaaccaggatgagagaactagctttgtgtgtgaattgcattgtcatctagaagtgtccacaacgcaagggatgatggcacctgtagggcagtcttctaaatctgccaatgtgacaattgacaacactggagatagaagcaggtatggtaatttacctacagtttttttagttgatcgtatactaactggtggattgatacaggggctaatgcacatgtttgtgctgacatctcgcagttttcttcttatcagatcacacaagattctaccgtcctaatggggaataggtcacatgcttctgttcatggtgttggcatggtacatctaaagtttacttgggaaagatcatgcagctgaagaacatgcagcatgtccctactatcaacaggaatctcgttagtggctcccgtctatatagatatggatttaagttggtgtttgagtctattaaagtagtcgtgtctaaaaatggatattttattggtaaaggctatgagtgccgaggcctgtttcgcttttccctttctaatttctgtaataaatctgtgaaccatatttgtggcagtgtggatgatgaggctaacgtttggcactcacatttatgtcatattaattttgacttgatgtctcagctttccagtatacgtttaattcctaagttctctattgtcaaaggttctaattgccatagttgtgtgcaatcaaagcaactttgcaagcctcacaaagctatcgaggagagaaacttggcatctctagaactcctatattcagatatttttgaaacgaatggggtcttgacaaagggtggaaaacaatatttcatgacgttgattaatgatgctactagattttgctatttgtatttgttgaaaatgaaagacgggctctagactatatttaaatttataaggcagaagttgaaaaccaacttgacagaaagataaaaagacttaggtctgatcatggtggatagtttttctcaaacgagtttgacttattctgtgaggaatatagcatcatacatgagaggacggatcactattcttccgagtctaatgggactgccaaaaggaagaaccacacactaactgacttggtgaatgccaagttggacaccgcgggactacctaaggcatggtggggggaggtattgttgacctcgaatcatgtgttaaatagagttcctaatagaaataaggaaaaaacaccatgcgggatatggattaggaaaaaaccatcactttcttacttgcggacatggggttgcttggcgaaaatcaatgtatcaacaacgaagaagcacaaacttagacctaagactgtggactatgtctttctgggatatgcttataacaacattgcttatagatttttaatagttaaattcgaggaacctgttatgcatgttggtacaattatggagactcgtcatgctaccttctttgagagattttttccaatgaaggatacacatagtacttctagccaatcctctgaaataattcacagttcaatcacaccaccagaacaaattgaacatacaaatgaacttgtcacttaggaggattatagtgaagctcctcagagaagtaa

SEQ ID NO: 3994 - DNA, 1665 bp, Oryza sativa
  Clone ID: PAT_MRT4530_10917C.1
atgtccacccggagcgccttcctcgccgccggcgttgccatcgccgccgccatcttcctcctccgccctgcttccgacctgtcgagggatttgggggaagccgtcgctgacatgatactggccaatgccaccatctacaccgccgaccccgcaatgccgttcgccgaagccatggccgagttgaagggtagacacacaatggagttgaatcttagtggaaatgttgttcttccgggattcattgattcccatgtgcacttcattgatggtgggttgcagttagcgcgggtgccacttcgaggggttacaagcaaagatgatttcatcaacagggtcaaggaagctgtcaaagataagcatcctgggcaatggatatttggaggaggttggaacaatgatttttggggaggtgattaccccactgctgcttggttggatgatatatctcctgataatcctgtctggctttcacgcatggatggacatatgggaatagccaattcactagctatgagaatggctgggatcaacaaaaacacaaacaatccagttggtggaactattatgagaacaactgaaggagagcctaccggtcttctagttgatgctgctatgaagcttgtgtttgatgttatctcagaagtctctatccatgaaaggagagatgctcttcttagggcaagtagacacgccctaatgaggggggtgactactgttgttgatgttggaagttatttccctggaaagtcagaaaagcaagtctggcaagattttacagatatatatgaatgggctcattctgtcgaaacaatgattatgagagtttgcttattcttccccatgcccacatggtctcgtgtttatgaccttatccatgaaaaaggtcggatgttaagtcaatggattcatctaggtggtgttaaagctttccttgatggttctttgggttcttccagtgctttattctatgagcactacaaggatgatcctagaagttatggtctccaattggttgacatggattatctgctcaatacaacattagaattagacaaatcaggactacagattgccatacatgcaattggagataaagccaatgatatgctactcgatatgtatgagaaggtggttgatttgaatggaatgaaggatcatagattccggattgagcatgctcaacaccttgctcccggtgcagccaagcgctttggcaaacatggtattattgcatctgtgcagcctgatcatatattagatgatgccaattctgctgggaagaaaattgggatagaacgagctgagcgaagctcctattcttttcggtcactattagatggtggtgcacatctggcttttggttctgattggcctgtttcagatattaatccattacaagctattcgaactgcagtatcccgcaaacctgttggatgggaagtcccttggatccctgcggaacgcttatctctagatgattctctgaaagcacatactatatctgccgcctatgcctgcttccttgaccatgttttgggcagcctatctgaaggaaagtacgccgattttgtgatcctgcctagcacatcatggaacgagttcggcagcgacataacggaccacgtcttggcaacatatgtgaacggcaagcaggcctatccatga

SEQ ID NO: 3995 - DNA, 1761 bp, Oryza sativa
  Clone ID: PAT_MRT4530_10918C.1
atgggcctcctcagctccttgcgcccgcaccgccggggcgccctctccggcggcggcggcggcggcggcgggcagtggcagtggtcgttcctcgacgccgtctgggcggtgttcctcctcgccgtggtcatcttcctcgcgctcgtcttcacgccgcgccgcggcgagcccctctccgcatcctcctccgcactcgccggcgcgacggtgccaccatgcgcagcctcggaggtggacctcctcccctgcgaggatccccgccgcagctcccgcctcagccgcgagatgaactactaccgcgagcgccactgccccgcgcgcggcgaggcgcccgtgtgcctcgtcccgcctccgcggggctaccgcgtcccagtgccctggcccgagagcctccacaagatatggcatgataatatgccttatggtaagattgcagaaagaaaaggtcatcaggggtggatgaagcaggaaggctcatactttatttttcctggaggcggaactatgtttcccgatggagctgaacaatatattgaaaagcttgcccagtatgttccgctaaaaagtggtctcctgaggacgggtcttgatatgggatgtggggtggctagttttggtgggtttttgcttaaagagaatatcttgacactctcttttgccccaagagattcacataaatctcaaatacaatttgctctggagagaggaattcctgcatttcttttgatgctgggcacgaggcgccttccatttcctgcacagtcttttgatttcgttcattgctcccggtgtttgataccttttatggcctacaatgggagctatttgattgaagtcgaccgtctacttaggccaggaggttacttgattatatcaggacccccagtccagtggaagaagcaagagaaagaatgggctgaacttcaagaaatggcactggctttttgttacaagttgatcactgtagatggtaacactgcaatttggaagaaacctactgaagcttcatgtctacctaaccaaaatggatttaacattgacttgtgtagcactgatgatgatccagatcaagcatggtatttcaagttgaagaaatgtgtcagtaaagtttctttggcagatgaaatagctgttggttccattctgaagtggccagataggttatccaaaccttctgctagagcctctctaatggacaacggagcaaacttgtttgaactagatactcagaagtgggtcaaaagggtatcattttataagaaatcactgggcgtgaagcttgggactgccaaaattcgtaatgtgatggacatgaatgcataccttggaggattggcagctgctgctgtctctgatcctgtatgggttatgaatgttgttcctgctcaaaaaccattgacacttggagtaatatatgacaggggccttattggagtttatcatgactggtgtgagcctttctcaacttatcctcgtacctatgatctcattcatgctgatagaatcaactctttgataagagacccaatttctggcaagagcagatgtgacctgtttgatgtcatgttggagatggatcgcattctgcgtccagaaggaattgctgttgtacgagactccccagatgtgattgacaaggcagcgcaggttgctcagtcgattcggtggactgttcaggtgcatgacagtgagcctgaatcaggtggtacagagaaaattcttgtggctactaaaacattttggaagctaccattaacttag

SEQ ID NO: 3996 - DNA, 346 bp, Oryza sativa
  Clone ID: PAT_MRT4530_10919C.1
gcaaaggattaataaggataaaaaaggaaagtgtcgacggggatacccgtaaaccggatatagagagtactggggtacgctggtccaaggatctacgtaatacaacatcaagcacacagaaaacaaagattatattggttcaggccccttgataggtaatagtcctaatccagttgatatgggattatatgatggaaaccacatattacaaagggaaaagcggaactcgatgataccgacgagatcgtaatcgaacaggctgtggtggatgggttgactatgagattcgatgccttaggtcctcccggggggtccattttatatcgcaggtcaactggtctccaaa

SEQ ID NO: 3997 - DNA, 981 bp, Oryza sativa
  Clone ID: PAT_MRT4530_1091C.1
atggagaagaagcagagaccggggagagagaaaagggtagatagagagggctatggtaacccacacgctcgtctgatcaatgatgttgatgaagcatgcaatcatcctggtgatgtcagtggcgacgttgcaaaggcgtttgacagcgctgttgcacgcgacgagcatctccggcagccgcgcatcgcatgcatggtcgcaccccttcttgcacagttgcacagctccgcctccgtcgtgcccggtgctgaccagcagcgtcgtcgcctcgtcgaactcgcgggtgtccagcagcgccaccaccgcgttgcagatggggcaggtacgccgttgcgtactttctgcttcgctagcagcaccaccgcgcgtgtccgctgctgccctcgcgcggtaaatggcagcgacgacagcgactccggtcctcgacggccctgcaagtcgatctccgcgatgctagccggcgcgcatgacgacgttggcggcgaggcagccgcctcggccgcgaagcaggaggcgaagggcaatggagacggagacggagaggctgctcctctgctccgccgaccgcagctccgctctgactactccacccaccgcccaccgcccggcggaagaagcagagggagaagtcgccatcccagaaaggcggaatccaccagcccaagcatcagcggcggcgaccggggatcgaggagcgggccgtggaggcagctgaagcggtggaggaaggtggcgtcgcgggcggtgcagaggaagagcctgcctgcaggcgagagaggcgcggacgaggtctgcagcggtggggagcataggaggaagacctcccggaggaggtcgttggtcagcgcggcgacggcgacggctgacatgcctttcccgtcctcgctgcctacgcctttgcgccggtcgcatccggggaagaggatgggaggaccggaagagggggaaggagaaggggaggagacaaagaagaggggatga

SEQ ID NO: 3998 - DNA, 458 bp, Oryza sativa
  Clone ID: PAT_MRT4530_10920C.1
attcgacgttaattagtgccatctgagccgtcaggttgaaaagcccacaccttgcctaatatggagtttggtaaagttagtaagcaaccaaacatcccctcaatttgtcccgccaccaccatctcctcctccgccgctgccgccaccgccaccgccaccgcctcctcctcctcagccgccgccgccaccgccaccgccgcctcccccgccgccgcctcctcctcctcctcctccgccgcctccgcctccgcctccgccgccgccgccgccaccacctcctcctcctcctcctcctccgccacctcctcctcctcctccgccgccgccgcccccgcctcctcctcttcctccgccgcctcctcctcctccgccgccgccgccgcccccgcctcctcctcctcctcctcctcctccaccaccgccaccgccaccgccgcatccctgcttgttggcctctg

SEQ ID NO: 3999 - DNA, 249 bp, Oryza sativa
  Clone ID: PAT_MRT4530_10921C.1
atgcaccgcgaggctgtccacgcgacgaactaccgagacaatcacccttccacgtaccgacgaacagcccacgcaatcacgccgtatagacgtgaaggcacaaactgggtgaaccacagttcggcgttcgacaactccctcaggaatcaaaagaacaagtttgcaagcctctcaagactcacgctggaacaagaattccaagagttgggatatatagcactagtggagtttcagcttggtggaaaataa

SEQ ID NO: 4000 - DNA, 492 bp, Oryza sativa
  Clone ID: PAT_MRT4530_10922C.1
atggtaggatgtgcaggcagtgcccagccgggtggtgggaaaggtggcacaatgtgcaacagaaggaaagaaactctagcccaaagtgaaaaaattggttatgcccttgaacaaagtgaaaatttggtaactaaatctgtcccgggaccgcgacaattcctcgtcatctctgaagcaaccgagggtgtgaagtgggcagggcagaagaggttcttctccatggaaaggaatgctaatggttttaagcttatggaatcagcaaggctggcagtcaagaagatcaaggcattgggtaatgcaaggatcgagattgatccacggaatgagttctatgttgtagcagtagcaactgcgatatctctttggctgatgtcaagacaatatcgaagccttggcgaccccacatttcctggtggcagcatgaaaaagcttcaggcttggaagcgtgtttctaaacttaactctgggaaatctaataatgctgatgagtga

SEQ ID NO: 4001 - DNA, 1778 bp, Oryza sativa
  unsure (1)..(1778): unsure at all n locations
  Clone ID: PAT_MRT4530_10923C.1
tttttttttttttttttttttttttttttnagccaaaggcactgttctacctttttttttaatcttttgnccctctttacatgatctaanaaatganaaaggggnaattttttcttctctttttttttttaccctagtctgactgacggatgaacatgatatgagctgatgaatcggtagtttcagagtcttctttcctcctgcaattgcctgcagattttgcagcagatggattgtggcactggaggagtagaggttgcagctagctaagaggaaggaggccgctgtggccggcggtagccgagctccatgacgaactccttggcttgagcgcccagcgacgcctggacctgctccaccggcgagctcttcagccacagctcgagcaggccttgcaatgtggtcgagggggagattgcctcgccatggcatgtgatctccacctcatcttcacttgctaggtcaagcttattcatgatgtacctctggatcaaggaagtctgcagacttccatctttaattctcacgtaatatgttggtagctgaggcagcctgggatcttgtttctggtcaggtgaagggacaagcaaaaaccatactggtctagttattccatcatgcaaagcaccagttcttgtagaaccaatctgtccctgctgtgaatcagcatgttgtcctttcctcagctcatagtctgaggtggttttatctttcgatgatgcagattgtgaaggactgcgattattttcctctttaacttttaacttatttgagcatggcataacctttctgccagtaactaccagtttgtcttctgtgtcatcttctgccagtaacttaattgagttttttattttgtcttccttggcagcctggcctttaggacctgatctaaaaaatttcgtcctgtttgcagtgtcaaccaagctatttaaaggcttcttgagatcttccttgtcaattgtatgatcatccttcctatcttcagaagatgactggattgtgacatctacatcagtattattcttctttttattgccagtttttgtcatcttggcagattgtgctgctgagattttctgagttttatgatctcgaccttcagatttatttgctagcttgatggttccattattaccaggagagtttacatgggagactgctgtccttctcgcagttttggttctccgtcctgtcaaaccagtctgtactgccaccctcggagtgtcaacaaccaaggaagaaagtgacctctgttttctctttactggcaatgtcacagttggagccttaggagcaccaacctttttcactttaagtggaaaaaccttattcctgatatcttgaacattatggtcgggcctgagtttctcttcaggatcacagccaagatcaatgttgcatactgggcagtgatcgacttcttcgtcatctattttctccataatgcactccttgcaaaaggtgtggaggcactcggtgatggcggtggcctcccggaggagccccttgcagagcgggcacgtcatgcacgccacgagcgcctcccgccggacgcgccgcaccccgccacgcgcggcccccatctccccccgcgacggcgccgccccaccaccaccaccacctcctcctcctccccctcctcgtccaaggcgacctccactcccaacctcgtccaaactcaggccggctccggagggcggcggcggaagggagactcgggaacacgcagcgtcgtacgacgggagaaaccggcggcggcggcggcggagctccgg

SEQ ID NO: 4002 - DNA, 564 bp, Oryza sativa
  unsure (1)..(564): unsure at all n locations
  Clone ID: PAT_MRT4530_10924C.1
cttccccgccgctgctagggttactgcttcatcgcggccaacgccaccgccgtccaccgtcatccttgaccgccgccgctggccgggtgagcttcttccacgcccgccggcgtccatctcgcgtcgctcctccnggccatttcttcacctcctcgactccccgaagctcccgcccgcgtgagccaccaaatgcggctggcggaggaggcggggctggccagcccgctcgacgagctcctcccgccggtggacttctgctgcgcgtacggctcaaccctcctccacgcgcgctccggcgcggcctccatgatcgactacatcctcggcatccccgacccgctccagtggcactccgagaacttggagaggaatcccgcgcactactccggatggatggctcgcctcggccccggcgctgtacgcactactctggatggatggctcgcctcggccccgacgctcatcggcgttggggtgtacttcaatccatttgttgagtggagggacaagaggataaagtacgccggaggattaatgatgtcttaactaacatggcagtgaatc

SEQ ID NO: 4003 - DNA, 602 bp, Oryza sativa
  Clone ID: PAT_MRT4530_10925C.1
cgacccgctccagtggcactccgagaacttggagaggaatcccgcgcactactccggatggatggctcgcctcggccccggcgctgtacgcactactctggatggatggctcgcctcggccccgacgctggcagtgaatcgatgatgccattacagataagaagagcactaagtcatatcactggaatatattttccttttctggcttttgatcaaagagttctgccgtagttgttcgtctttcccaaggtcggagctggtttgcctgtgatagcttccgtaacccacattattgcctctggagatccagtttgtttgctctggttttctcatattgttggtagtctgagtggtacacttggttatgtgatgagtgagctggaggatggaaagagatttagtgaagttgtgaaaactgctaggtctcttggttatacagaaccaggccaaaaaaaaaatttcattcatttgtggcattataagattaatgtgtactcagtattcattcgttatctgtcattgcagctttcctgaatttagtgatgcttgtgataagttcacttactcagctatttaattttggtagatccacgtgatgatct

SEQ ID NO: 4004 - DNA, 522 bp, Oryza sativa
  Clone ID: PAT_MRT4530_10926C.1
atgcggctggcggaggaggcggggctggccagcccgctcgacgagctcctcccgccggtggacttctgctgcgcgtacggctcaaccctcctccacgcgcgctccggcgcggcctccatgatcgactacatcctcggcatccccgacccgctccagtggcactccgagaacttggagaggaatcccgcgcactactccggatggatggctcgcctcggccccggcgctattactcggcttgcggatagcatcggcgttggggtgtacttcaatccatttgttgagtggagggacaaggtcggagctggtttgcctgtgatagcttccgtaacccacattattgcctctggagatccagtttgtttgctctggttttctcatattgttggtagtctgagtggtacacttggttatgtgatgagtgagctggaggatggaaagagatttagtgaagttgtgaaaactgctagctttcctgaatttagtgatgcttgtgataagttcacttactcagctatttaa

SEQ ID NO: 4005 - DNA, 1512 bp, Oryza sativa
  Clone ID: PAT_MRT4530_10927C.1
ttttttttttttttgtatcaacacgaagaacaaaacaaattttactgaccgctgtactagcaagcaatcaacctcgaaaactcaccccgcacacaccagcaaaagctgtctggtgtatgcacggtttaacagtaacagctttgacggtttcatttggctgatgaggcacgtcactctcacgccgtttgcgtggggtggtcgaacggcagcgggctcacggcgtcgctgagcgggccggcgtgccggaacccgtacgccctgagcacctggtcgtcggcgaagctgagcgcgcggcggatgccctcgtcgcagctcttccccgtgtagtgctcgttccggtggccgctgcacggctggcatccggtgaagtgcgtcacgaacgggcgccgccacccgctcaccccgctctccgccagcccggcgcccgccagcgcggcgtccctcgccgccgcgtacgacgcgtgctccgcctccgcgtgccgcctccgcagcggcgccgccccgcgctccatcgcctcgtaccgctccgtgatgttgccgagcctccccgcgatctccagccagtacccctcgaagtagtagtcgctctctaggtacaccttgtcccgccacgggctgccgctctgcagcagcatgtacacgagcgccgactggtcgtcggactcgttgaacaccttgtccttgaaggtggaggtgagcacggcgccccagtgctggtactccggcgagtccggccccatggcggcccacgcgtccatgaagtcgagcgaccactggcagttgcggatgaggaacacgccggcgttgaggctggtccacgacctggactcgtacacgaggtgcggccagccatgggcgacgaagttgtggtcgcggtaccggctcagcgggaggcggaagtccatgtcggtgagcaccgcgtcggagtccacccaccacacccactccgcctccgggtgggcgaccatggcggcccgcaccaccgggatcttcgcccagtacctgtccatcgacggccggaggagcgccgtgttgtacagcagctgcacgccgttgagccggcagtaatccagcttgttcttcagcagccgtgtcagcaagctgtcccccgcaggcgacccgcacggctccggctgcgacccggacaccatcagcacgcgctcgccgccgcctccagccagctccgggtgcgcgcggagccactcggcgcgcttctcgtcccacccgacgatgggccggtcgatggtgtacgccacccccgggtcgtcgtagaacgttcgcccgccgccgagccggtcgacctcaccgctcccaaagtttgtgtgtgtcgtaaagttttgatgtgatgaaaaagtaaaagtttgaagaaaaagttgtaactaaacccggcaatacgcagatgatactatcatctttttggagcatgagcaattttcggacttttccgaaaacatccagaactatgttttgtagtactggaaattttcggacttgtccgaaaagttttcggga

SEQ ID NO: 4006 - DNA, 1536 bp, Oryza sativa
  Clone ID: PAT_MRT4530_10928C.1
atgacgacgacgacgacgacgacgaaccacagcgccaagagcatcctcctcctcgcgctcctcctcgtgccgcacctcgccgcggcgtcgtcgggagatgcgctgatcagccagcgccgccgcctgctcgactaccacggcggcggcggcggccatggcggcggcgacgtgtacgtggacccgtcgtacacgttcccgaacgcgcggctccgcgacgcgtacgtggcgatgcaggcgtggaagcgcgccgtcctgtcggacccgcacaacgtgacggggacgtggatcgggcccgacgtgtgcgcctacgagggcgtgttctgcgcggcggcgcgggacgacccgcacctcgtcgtcgtcgcctccgtcgatctcaaccacgccgacatggcgggccacctccccgacgagctcggcctgctcgccgacctcgccgtgctccacgccaactccaaccgcttctgcggcgccgtgccgagcaccctcgagaggctccacctcctccacgagctcgacctcagcaacaaccgcctcgtcggcgcgttcccggacgtcgtgctccggctgcccagcctccggtacctcgacctccgcttcaacgacttcgagggccccgtcccggccgagctgttcgaccgcccgctcgacgccatcttcctcaactccaaccgcctccgcttccggatccccgacaacgtcggcaactcgccggcgtccgtgctcgtgctcgccaacaacgacttcggcggctgcctcccggcgtccgtcgccaacatgtccggcacgctcgacgagatcatcctcatgaacaccgggctcaagtcctgcatcccgccggagctcggcatgctcaccggcctcgccgtgctcgacgtcagccacaacagcctcatgggcgccatccccggcgagctcgccaggctcgagaacatcgagcagctcgacctcgggcacaaccgcctcaccggcgacgtgccggagggcatctgccacctgccgcacctccagaacttcacctactcctacaacttcatcaccggcgagccgccggtgcaagaagttcgtcctcccgtcgcctccgccaccgccaccatcgccgccgccgccgtctcctccaccgccgtcaccctctcctccaccaccttcacctcctcctccatctccaccaccaccatctccatcgcctcctccaccttctcccccgccgccgtctcctccaccaccatcgccatcgccgcctccaccatctccaccgcctccatctcctcctccgccatcgccagtgtactacagctcgccgccgccgccgtactacgaggtttcaccggaggacaggtacctctcgccgccgccacctccggcgtaccacgaggcgccgccaccgccgtactacgaggtgtcgccggaggacaggaccagctcagagtagtatctgcattgatatctatcgttgatggagtgtataattgtactactacaatgcaaagggtgtcaccggattcgaactgtgttgatttgtttagtgcagagacttaa

SEQ ID NO: 4007 - DNA, 1286 bp, Oryza sativa
  Clone ID: PAT_MRT4530_10929C.1
aggattcctcttccccgccgcctgctagggttactgcttcatcgcggccaacgccacgcgcggtccaccgtcatccttgaccgcggcgcgctggccgggtgagcttcttccacgcccgccggcgtccatctcgcgtcgctcctccggccatttcttcacctcctcgactccccgaagctcccgcccgcgtgagccaccaaatgcggctggcggaggaggcggggctggccagcccgctcgacgagctcctcccgccggtggacttctgctgcgcgtacggctcaaccctcctccacgcgcgctccggcgcggcctccatgatcgactacatcctcggcatccccgacccgctccagtggcactccgagaacttggagaggaatcccgcgcactactccggatggatggctcgcctcggccccggcgctgtacgcactactctggatggatggctcgcctcggccccgacgctgtatgcgttcattcctcacctttaaattggttgctcctctaattgttttgtgtgattgagattactcggcttgcggatagcatcggcgttggggtgtacttcaatccatttgttgagtggagggacaagaggataaagtacgccggaggattaagtgatgtcttaactaacatggcagtgaatcgatgatgccattacagataagaagagcactaagtcatatcactggaatatattttccttttcttgcttttgatcaaagagttctgccgtagttgttcgtctttcccaaggtcggagctggtttgcctgtgatagcttccgtaacccacattattgcctctggagatccagtttgtttgctctggttttctcatattgttggtagtctgagtggtacacttggttatgtgatgagtgagctggaggatggaaagagatttagtgaagttgtgaaaactgctaggcattgatcttagctaggcttctggagcaacggatgggcatggagaatattaatggtggcgaatcctacttagacagcctcagaagcttgtttcagatgatgtgaagtcctactcggcagtttcacccgaagggaacacttctctacggatgccgattctccagacgcctatgcaagatgcaggctaaaaacgagaacaaaccgtagaggtttctcctatagggtccttagcataaacacttgtctagaacaaacgtgcaggaatagttaaggaaaattacttcatattaaacagataagcttacatacggttttccctttcgggaaacccgaaggtaggtacaagca

SEQ ID NO: 4008 - DNA, 1542 bp, Oryza sativa
  Clone ID: PAT_MRT4530_1092C.1
atggaccttgagaagtcttcctcgaacagcgcatccatgaagaagctgcaggacgatggtgccctccccggtcgcgggaccatgcagagggaggctggaggtacagaatctgaacccatcttgggccgcatggttgtagttgaagattacgtttcttgcggttttcttcctccgccttccgagtttcttcttcttgtcttgaatttctacggcctttctttgcttcacttgaaccccaactccatcgcctttctaagcatcttctctcatctttgcaaggcctacattagggtagtgcctttccttgacctcttccatttttattacgagctgcgttggatggaatccaacaggggtatctggatgtgtcagattccgacttcgggatggcctgaagtcgcgttacatccccttctagtgccccacttctcgcagcaagtggtggaatggttctatctccagatagagaactcggaccccgttcttgttattcctaaggacaagccagaaaagatcctagagtggactgctaaacccgccctaacttgctccctccaatcctttatcgacatcatcgatgatctccgaaaacgggggttgtcgggatatgaagtcgctgccgacttcgcaggtctggacaatgacactgctctccctttgacggatgccatcagaccactcgtggatcaccaggcggcgacgtcattgaaggagggcatcgccaaggaggcatcagacgctgttgctaccaccacaagtggcagcaatgttctccttcgtgctcgggactcgccggaaggcgacgagcccacggacttgggtgcgtctccaccacctcagcgaaagcagaggttggtgacggtcggcgagaagatggtgcgtgcaaaagcagcgcacagtggagctgatgctgcttctactgtgtcccctgcggcaacctcgacggaagtcgtggccgctactaaggaccaggaggcggcgccaccatgtgatcccgagtacctttgtcaatgtagatatgttgatgtcgagaatgtccagcaacgcgggcagcccgatacaccgtattggaagacgaaactcgaggtggccgaactcgaaaggaccatcgtggaggcgaacaaggaccaggccgtggaaactctccgaggtcacgaggtgtggttcaactcgtaccttaagagttgctgcacggccatgtcggaagtttgcatagagctccgagttccccgcggagatcccaaggagtccgctactggttatatctcgaggatgaagggggcctgcgcacagctcgaagggattggcaagcgcatcgacgaggccctgaagcaggagtgtcgtcgagcgagccgctacacaaggggacatgtgctggcttgcatccgagatcaccgcccacagctgcacctcgagttccttcgcgaagggttctctcgttctcggaggacatccgcggagatcgacggtcttgcgcagtcgatggcgccgcttgccgagaaggttttctgctccatggattggcgttggccgtcctggtag

SEQ ID NO: 4009 - DNA, 2725 bp, Oryza sativa
  Clone ID: PAT_MRT4530_10930C.1
atggcccaagacgctggcgatgccgtcctcccggcatcgcgcattacggcggagaggcaccttagcctcatccgcaagatcatgctagaggatgccgccgtgagggcaggggagacgcggccgcggtacccagagcggtctgcgcacctcctgtcctttgccatggtggggctgatcccgccattctctaggttcttccacgaggtcttggatttctacgagatccatgccttgcatctcgcccccaatgctgtgatgacgctggccatctttgcgcacctattcgagatgttcgtcggggtgcggccgacgatgcggctgttccagttcttcttcgtcccacagctgctgcaatgcgcggtggtgggaggatgctacttccagccccggccgggtgtggcggggcaatacatcgagagccacctccgcaagaatcccgcggcgcgtgggaatacaccgggcataacgaccccattgcgcacccacgtgggcaagcgctgggattggggcgaggaggacgcgaagacggtggttcggcgggtgctgggcctggacaccgtcgaacaaacgctgattccggacgggatccttcccctctgcagcgaccacgaccgggacaatatcctggctgtgatgtcggtcgtcggtgctggcaggggtcggtctcgccggggcaccgtcggcggcggcagcggcggcgacggcgtaggtagcagcggcacgaccgcgggcagcagtcggaccggcggctctggcgggggcggcggctccagggcgcccggacggaagaacaagctgctccggaagatagggcaaacggagccgtgtcgggggagcttcatcgagcccccgaagtggaccttcagacgcccccctcgcagcgggattccttcccaaggggtctcggcatccgacccctcccaagggtcgaaggccgagcgaccggagcggccgggatccggccgatccggtgctgcggagccttcgcagcaccccgacggggcccaagggccgcacgccgggtccggctccgagtccaccatgaccgagacgaaggagggggaggcgcaacccgccgtgggcgacagcggcagtggtgcccttctcgggggcaatcccgagggcccgagccgtactctgtcgtcccgggggcggaccgcgaccttttcttccccgactcctgcgagcatggagccgctcctgcaggtgctcgccgccgccgattccaccatccgagaggggctcaacgcccaagttcaatccctagcggacgagcgggcggccctggaggcagaatgcgcacagctcgtgacggaccgcgcgcgggttgacaagggacgccgcgccgtggacgacatgttggaggtggggcgcaaaatgcgccaagccgaactagcagagatccaggcgcgcgaggagacgctagactcggtcatgcgggagacggaggaggagcggcaggcggcgctcatcgtctcaagcgccttagacgaggcgctaggcgacatccgcctgcagtatgaaacctacggtgaggacctggcgaggagggttgaggacacccgcggggtcctcgacgcggccgcggcccaagagcggcgggcatcgatggtcgacgcctcgctacgggcccgggcggtggcgctcgaggccgagcgcaaggccttggacgagcgcacgcgctccgcgcaggagttcgaggccacaattcgccggcagatcgaggttctcgaccgcaaccaacgcaaacaggaggggcgcagtcgggaacatgcgcagcgggcccaggagctggaggagcgggctcgggcgctcgaggagagggcgcgcgtgttggaccagcgcgagactaccttggccgcccacgaggcgatggcggccaaggcggaatcctcccttcgcctccgtgaggaggccacagccgagcgcaattggaccaccctcgccgctgaagctttagtggcccgtcgtgtagaggagctgcggctccgagaggaggcgtggcgggaacgagatgccacgctcgccgagcgcgaggccgaggtgaaccgccgcgaggtggcggcgcgccagcttggcgagcagctcaccaagcgtgaggaggccgttgctgggcgtgaggccatccatctggaaagcaactgtgctgagcacgcggcgatggcggcgagggcatccgagctggaggcctgggagaaggaactggcatcgcacgggcagcctggcgacgcggagttggtcagccagctcaccgcggctcaaggcactctcgccgacctggggcgcccggtgcaggaccaagccggggagatcgcggcccccctcctcaccaacgacatcgggcctggccaactctccgacgccatcgaacggctggagtgcgtgggacgccgggtgggcatctccgtgcgccgggacaagaagctcccgcccacacagccggcgctcgcgcttaccggcctcggctcggtcagaccgccatcggctcggtctgaccgacttcggctccgtcggctctgtatcggccaccccgagcagcaccatcccagcctccagggggccggtctgacggcgcatatgccgccggtcagatcggccttatggtccgcgcttcggctggacgggatgacggcggatctggagaggctgaaggaggaggtcggcgaggccgtgaagtcgtcgtcggcttccttggcacgggctgcggtggagcttgtcctcgcaa

SEQ ID NO: 4010 - DNA, 1801 bp, Oryza sativa
  Clone ID: PAT_MRT4530_10931C.1
atgacgacgacgacgacgacgacgaaccacagcgccaagagcatcctcctcctcgcgctcctcctcgtgccgcacctcgccgcggcgtcgtcgggagatgcgctgatcagccagcgccgccgcctgctcgactaccacggcggcggcggcggccatggcggcggcgacgtgtacgtggacagcgaagctcctgtcgccgccgcgtcgttccacgatgatctctcgcggccacgccggcgggcgtgggcgctgctgctgctgctgctcggggcggcggtggcacagcacgagggcaacgtgtcggaggagtacgcggcgtcgttcgcgtcgcggtccgacgcgccgccgtcgtaggcgttcccgaacgcgcgcctccgcgccgcgtacgtggcgatgcaggcgtggaagcgcgcggccgtcctgtcggacccgaccaacttgacggcgacctgggtcggccccgacgtgtgcgcctacgacggcgtgttctgcgcggcggcggcgcggtacgccccgcgctgcggtgggatcgccgtcgtcgcctcggcggctctgaacgacgccgacctggcgggccacctccgcgacccgcccgccctgggctcgccgacctcgccgtgctccacgccaactccaaccgcttctgcggcgccgtgccgagcaccctcgagaggctccacctcctccacgagctcgacctcagcaacaaccgcctcgtcggcgcgttcccggacgtcgtgctccggctgcccagcctccggtacctcgacctccgcttcaacgacttcgagggccccgtcccggccgagctgttcgaccgcccgctcgacgccatcttcctcaactccaaccgcctccgcttccggatccccgacaacgtcggcaactcgccggcgtccgtgctcgtgctcgccaacaacgacttcggcggctgcctcccggcgtcttcgacgtccgcggcaaccacccccggggacccgattcccgggagcgccgccggcttggcctccgtcccgccgctccacggcacggggaaccgcttcgaagggccggtgccggcgaccatctgctcgatgggcaccctcacgaactgcacctacggggacaactacttctcctcgcgcccccgctggccggcgcggacggccggcggcgcggtgggaaccagcagccctggagctccccctcagaactccacatcgtcgtacaacctcatcaccggcccgccggtgtgctgcaggacggcgctcgacgagcgccggacctccacgaccggccgccccggcggaggggccggcggagcagcgcatagatcgcctttgccacaccacatgcctccgagacggacgcccaattccaaaacacccaccacgtcaactgcgacgcattcaggtgcaagaagttcgtcctcccgtcgcctccgccaccggcaccatcgccgccgccgacgtctactaccaccgccgtcaccctctcctccaccaccttcacctcctactccatcttcaccaccaccatgtccatagcctactccaccttctaccccgacggcggatacttcaccaccatcgacatcgacgactccaacatcttcaccgactacatctcctcctccgccatcgacagtgtactacagctcgccgacgccgccgtactacgaggtttcaccggaggacaggaccagctcagagtagtatctgcattgatatctatcgttgatggagtgtataattgtactactacaatgcaaagggtgtcaccggattcgaactgtgttgatttgtttagtgcagagacttaa

SEQ ID NO: 4011 - DNA, 1209 bp, Oryza sativa
  Clone ID: PAT_MRT4530_10932C.1
atggccggactacttgcctctctggccataaggaaagcactggagaagctctcctcctacctggcagcgagcctttcggcatcgtcgtcctcgccgacgtctgggagggcaaggcaggagaaggaccacgaggacctgaggatgctggagcggaccatgcgcaggatccacgctactctgcatgacgcggagcagcactggaacatcagggaggagtccaccaagctgcggctcaaggagctcaaggatctcgcctactacgcggaggatgtggtggatgcgtatgagatgaatcgccagaaggtggaggctctcaaggcatttgcaggcgccgccagccacaagcgcaagtaccagcaggaaagcgagggcttgttctgtgattctcatacggttgccattacagacgagttggctatcaaaacaaggaaacttattgagcgatttgacgagatcaagtattattcagacaactttactttgtcggagaatgatggagagatacggcttactcctgatattagtggtttgcagacaagctctgttgtctttgagaatagcattgtgggaagagtgaaagataagaacaacattgtagaaaagttgttgtccaaaagaggtgacaatctagctagtccggtttctgtcatggcaattgttggtatggaaggattaggcaagacaacgctggcccagctagtgtataaccacccagaagtgtgcaagtattttgatgtgcacgcatgggtttgcgtatctgagcagtttgatatcaacaacataacacagagcatcattgtcgcggttacaaaggagaagtgtgatctatcagaacttcctaatctccatgagagactggtagaagaaattaagcaaaagaaagttttgcttgtgttggatgatgtgtggaatgaaagaagagattgttgggatctgctgtgcatgcctatgaacaccacgaagctttgtatgattgtagtgaccacccgcagcgagaaagtcgcaaagcttgtgcagacaatgtcaaacttctataacctagaatgcttgagttttgatgagagctggttgttgttcaggcaagttgctctcactgttaaccaagaaaatgctccaccaaacctggtagagattggaaaggctatagttagaaagtgcaagggctttgcctttagcgatcaagaggataggcagcatgctgcgctatga

SEQ ID NO: 4012 - DNA, 327 bp, Oryza sativa
  Clone ID: PAT_MRT4530_10933C.1
gtcgaccacgcgtccgcccacgcgtccggccacgcatacggttgaacatattttactgcctctgggctcacaagaacggccgatgcaccggcgaggcttttggcgggtccccatcagccatgcaagctgagcctgcactgcaccgcagccgagcgaacacgggcaggacgtatgttgacgtgtgcagatgcgagaggcaagagtactacagagcaactgctgctgaagtgaaccagggcgggttcttcgactctacgtgccaggactccccacctgatgcacggtccaagaaaccagctgaagacacgagcatcatggactatactg

SEQ ID NO: 4013 - DNA, 396 bp, Oryza sativa
  Clone ID: PAT_MRT4530_10934C.1
atggccggcgtcgccgccgtgcgcctcctcctcctgcaggccgcggcggcgctcgccctcgccgcggcggcggccgccggggggccggaggccgccacgctgctggcgttccggggggcgctgcgggggccgcacggcgcgccgccggagccgctcaaccagtgggccaccaccacccccggcccctgcgccggcgccggcaccggcgtgtcgctgtggtacggcgtgacatgccaccaacggacgggggaagtgcccggacttcgccttgagtacctcggccttcagagccccgcccccggcatggggccgattgctccggctccgggggctccggagcccttatcctgggcgaacaacaagctgaacgggggcggcaccccgcggtggtgctgg

SEQ ID NO: 4014 - DNA, 869 bp, Oryza sativa
  Clone ID: PAT_MRT4530_10935C.1
gtcaaattctttgataatttttcgtaactgtttggatgctttttagacaaacaagggaacatcacctttagggatcaaaatagtttatccatagaaatctgtaaatttattgtaaactcactctaacttaaagtttgctgtatttattttttgaaattgatttctcaaatatgcctttttacccttagctcctacgcagttttattcggacgcgtgggcaagtatgcacatcaaagtataggtgttaagtttaagttgtttaaactctttgagcgaaaaaaaattggcatgttagttgttgatgttgatctaataatttataattagaaagaaaactcgatcacttgagaaatagataatcccaaaatacaatgtatctaccgttcctgtggaaactgaaccatttcccacacaaagttcgtgcaccacaaataatgatacaaaagcggtaggtgtgagagaacacctcacatataaacgagaagtggacgtagctatcgatcgatcagtccaaccatggcacaatctgctctgctctgctctgtttgtttggatatgcagctagctactaaccagctagacactggtacgtataacactttgcctttgtgtctgtatgtctgatacgaatggatgattgattttgtgtcgctgcggtgcggtgcataactttgcaaaatgcagataagggagtcgcggccgaaggtgacgctggtggcgcgcatggcggcgtcggtggccaactacgactatatcgtcgactgggagttccagatggacggcctcgttcgcatcaaggttgggctaagtgggatcctcatggtgaagggcacccagtactcccacatgaaccaggtccatcaaaatga

SEQ ID NO: 4015 - DNA, 764 bp, Oryza sativa
  unsure (1)..(764): unsure at all n locations
  Clone ID: PAT_MRT4530_10936C.1
attcccggngtcgacccacgcgtccgagcagatgcaagaagtggaggaagaaattagtcatcaactgaatagtccaaggaaggagtggcgtgtgaagattacaattgtcaagattgataatgcaggaacttcgtcctctataaacatggtttttattttgcctgcagaatataaagtttccacatccgatgaggaggttgttgaagtatcaatggcgtagttagtgttgtcacctcaacaagcaatatttgagaagcctgaagaaactaagcatcaacatcttaggcctttgtatattaagggctttgtcaatgggaagccgttgtcaaagatgttggttgatggaagagttccagtaaatttgatgccatataccacttatcggaagcttgagaagacaccagaagatttgagcaagaccaacatagtactcaaggattttggtgggaattgatcagatgccaagggagtattaaatgtggagttaacagtggggagcaagactattcctacaattttctatcattgatggaaagtgatcatatagcttgttgcttggaaggtattggattcatgctaattgttgcattccatcaacaatgcatcaaagtttgattcaatggcagggagaccaagtagaaatcgtgcaagcaaacagctacttgcggtctgtttgctgttgtcggtagtgttgagtctgtgcatttcatgtaaactagaacattancatctttgtctgaataacaatattggattgcatcatt

SEQ ID NO: 4016 - DNA, 572 bp, Oryza sativa
  unsure (1)..(572): unsure at all n locations
  Clone ID: PAT_MRT4530_10937C.1
atcaaatataagcaaacaaactatatatatatatattaactaattaaaagattagtatttttcctttcttacaatctgtttcttccgtccgttcgtccgtccgcgcgatttttcttcgcccacgcgttcgtccgtccgcgcgatttgagattaaattttaaaccgatacaaaatccaatcggataatcctacttagagaacccaaatagaagggggaaaaagaaaattttacccttcacagagaatgaaaaaaaaaggggcgaaaattcctaacctccccacagccggttgccgcagacaccgcgcgggagtccgccgttgccgacgcgcgcgggaagatctaccgccgccgccggctgtcgccgatgcaagcggccagtactccgccgccgccggccgtagccgatgccgccgcggggagacgatgggggaggggcgccggggcaaggccactcgaaggcggcgcactcccccttgggcgagtgcgcgcaccggcgagggggcatgcgccggcgccgcctatgagcgccatagctccgcccggacgcgtgggtcgagccgggaatnccgga

SEQ ID NO: 4017 - DNA, 291 bp, Oryza sativa
  unsure (1)..(291): unsure at all n locations
  Clone ID: PAT_MRT4530_10938C.1
tctcctctncctctccgnccatttctcctctccacctgngatccatccgngcccgcgaggaggagggagccgnacgccgncgcgnggagagcaggggagagaaggagaggaggagatcgccgtcgccgtcgncgtcgncgtcgccgatctcgagcgggacgnagatggggctcacgttcacgaagctnttcagccgcctcttcgccaagaaggagatgaggatcctcatggtcggtctcgatgaggccgataaaaccaccatactntacaagctcaagctcgacgagatcg

SEQ ID NO: 4018 - DNA, 2040 bp, Oryza sativa
  Clone ID: PAT_MRT4530_10939C.1
atgcgcggccaagcctcgcacctgcttgtcgtgcgcgctaacctgggcaacctctcgtccttgttcgacgagtacgcggcgaacggcggataccgcgtcacgtcacgttcaacggcctggcgcggcgggtggcatggccaggctggagggaaagacgggcaattcactctatacactccaacatgtgtcaacttctcgatggcggctccaacgctgcagccaggggccgtgccgctctgcaaggccgtgccgctgaagggcagcgtcaccgtgaccgacgtgcaggccgggagcaacacctgccacgtgtgggaccagggccacttcgcgctcgtcctgggcggagcaggcaatggcggtgtggtggcggaggccggtgtggaagctggcgctcttcgggggggcgctcggcgcgggcggcacggtgctcctggggctagtcctggtggcggtgctgagcatcccgcggcgcaagtcgaaggtggcggagatggcgcggcgggcgtacgaggaggcggtgctcggaggcggtgtccttcgcctcctccggtcctccctaccgccggcacagacggcggcggaggtggagctgtaccgccgcggcagccgcacccggcacccaaacttcccaccgctgcctccgccgtcgcctcgctgcaggataacagcgaccgtggcgactggcagctctcgacgccgccgctccgcccggccttctccacccaccgccacccatggcttcgcgcactcccttgccggcctccactccgccatccgtggcctcggcaagctctccgcgctgctcgccgacaggaagagaaagagagagataagggagagagagggggaggaagaaagattttgtgttgccgaccgattcggttccctcgcctctatctgcttcggattcggattcggattcctttccccttgcaaacaaaaaatgaaatccagagctttgatctggatgagcaagatcaatctcctcccctctctcaagccatggatgcagcggcggcggccatggtgctgctcgaccgcagcgtccgcttcatcgacgaggtggccgacgtgatgaaggagcgcgggatttctcacctggacggcgacgcggcgatctcggcggcgtgcgccgggatcacggactgggaagagaggaaggcgtctgaggagagggccatcgaggcggagtccttgcactaccgcgccgagagggacgccgcggcggaggccgtcatccgccgccgcaaggccggcggcggcggcgtcacgaagatgtctttcctctctcccggcgatctcttcgaacgcgacggggacatccttgaaggcatcgacccggaccctccggtcgtcgccgacgtccccggcgtgtcctccctcgtgttccgcctctcgtcggcgcggacgcccgcagattttgagcgcgccacctacgtcgccggcgccgaccacaacgtcgtcgtcgtcggcgccggccatggtcaccggttctaccttgtctacgacgcctgggccaactcgctctccaccaagtcgacggaggctcgacatcatcgttacggtggagcgcggctaccggaggagcgccggtccatgtgcagcggcggcgacggcgtcattaggttcgtctccatcgacgacggcgagcatccgaacgatctgacactcaccacatggtccctgacgatggcgcccgagctcaagcagtggaagcaagaagcggcactggtggacaaaccctttttagtcccgatcaggaaaaaaaaaccacatcacagagatcgggtgccggccgtccgccgcctcgccggcctccggcccggccgcctggggagcatcgccgcccgccgcctcggcgcgcggcgactgagtaaagatggtttctccaccagtgcggcgttctccatcggagacctcgtctactcagatgagctgatcaagaagacgccgccgcagcagctgccgccgctgaaggcgccgacatcgccggtgcatagcatcgtcgacgacgaagtcgtgttatctggccgaggttaa

SEQ ID NO: 4019 - DNA, 157 bp, Oryza sativa
  Clone ID: PAT_MRT4530_1093C.1
tttactctaccgcccacgcgtccggatacccatcctttgagtctcttctgcgacaacactggtctgtatccttttctgctgccttgctaaacaacacgaaccaccaccggatccccacgtcgtcgtcaccaaaccacctgcagacgtcgtcactagt

SEQ ID NO: 4020 - DNA, 200 bp, Oryza sativa
  unsure (1)..(200): unsure at all n locations
  Clone ID: PAT_MRT4530_10940C.1
agttgccactaaccagccagagccccgggggggagaagagcgagagaggaggagaaatcttgcagcaatccctcgcttanattcgccattaccggcggttttggtnccaccaagattaccacccccttcttcttctgngctngagcgctcgcattgnatttnaagctgnttnttgattctgngaagagggtgnaatctct

SEQ ID NO: 4021 - DNA, 228 bp, Oryza sativa
  Clone ID: PAT_MRT4530_10941C.1
ttttgtttagttgcgagagagagtgtgtagagatcagcttgtttgttgagtgcctgcaggtcatgaagatgctggtgaagctgtgggaccacttggcggccggtcctaggccggagaccggcctcgagaagttgacgggggccgctacaacccgacctcttgtcatcaacaaagatggcgacggccaggcgagctgcgttgcgttctagcgctcgcaggctatgccga

SEQ ID NO: 4022 - DNA, 273 bp, Oryza sativa
  Clone ID: PAT_MRT4530_10942C.1
atgaagatgacccaaggcgacatccatctccaggctgcaggcgctcttgatggtgaggcaagtatcgcggggccagcgacgactggagaatgcgcgtggatggccacgaggagctgcgccgcactcacagctctggtccaaaggttggtaagatgcgggcgtgccagtcagtttgatcctgcaactgataagatatacaaacagcagatcaataagccgatcggctgtcaagccgatggagcaattccagccgatgctgataccagccgatag

SEQ ID NO: 4023 - DNA, 309 bp, Oryza sativa
  Clone ID: PAT_MRT4530_10943C.1
gttctagatcgcgggccgccatcctcatctcttggggggtaaccctagacgagcgaccatggccaccatgccaagcactagcgcgtacttctcctgactatgtctactcctccacagggacaggaggagcagcaagagagccagactgcctggccccgcccaacgtttgcgggatgggcgcaccttcctcctggagagagtctcccaccagggactgcgaagcgccctccaggtcgacgttctaaccatgctggtttagcttgctggagatggaaataatcagaggctacaaccaccaaggagattcaa

SEQ ID NO: 4024 - DNA, 422 bp, Oryza sativa
  Clone ID: PAT_MRT4530_10944C.1
tcggtttttgcttttgttgttccaatcaaactggagggggataaaagaaaactggggcgattatcatgctactgtgaatcttgaatgctcccaacttattgcaataaaggcttgctgttggtcatcagttcttccttatcagctggttccacagatttggggtttgggttttaattcagaggaggcattttcttttggttatgatgccaattttgggcgcttactgctccaattaggaccgattttgagtcttccactttggagtttggacatgactggtttggtagtaacttactaccagtgatcaaaatgaactatcccagatatccttcaatcatgatgcatagctccagattgggttgcatactgttcttggtaaccctgaagacagacgagaaaccgggctatccttactaattatc

SEQ ID NO: 4025 - DNA, 1299 bp, Oryza sativa
  Clone ID: PAT_MRT4530_10945C.1
atggtgagcacccggggggccgcggcgaatgcgcctggtcggagggggcggccgccgaaggctgcggaggaggcggcgaggagccccgtgttgtcgtcgccggtggtggcggcggatgcggcggaggggtacgagagggagagggcggagaggatccgggagaacatggagcggatgcagaagctggggatactcgacctcgccacccgcttcaaccagtccgcgggcggcctcgccgggagcgggagcgggagaggccgcgggcggaggaaggcggccgtgacgccggggtccgtcggcgtggggaggatgatcaagcccgcctcgccatcgcctgctcgtcggtctctcagttcaattcttttggatatgcgtatctttggttcaataatccgttacatttcgattatgatagtttgggaaattattgtacggctgaagaacgtagagcctgttagctactgtgaaattcggactaaaaaggacaaggacgacaatgaaggtggaaactctgttctaatcgaggctggatcaaaggaagaagtttacacggaagaggatgagaaacttttaggcccttgtgtggaaccctggactctctttgtggatggttatgggaaagatggtaagcgcatctatgatcaagtgaggggccaaacctgtcatcagtgccggcagaaaactcttggccatcataccagctgctgtaaatgccagattgtccaggggcagttctgtggggattgtttgtacatgaggtatggtgagaatgtgctcgaagctaagaagaatcctgattggatatgtccagtttgtcgtggcatttgcaattgcagtatctgcagaactaagaaaggatggtttccaactggtgctgcgtataggaaggttgtcagccttgggtacaagtctgtggctcactatctcatcgcaacacagcgtgcatccccagcaggctcagctgattcaaacaaggtggcagctaccaagtcagaagcctcatccgaatctgaccaggctccagttgctaaggaggatcaagaggatgcagaaatgagcggcaaagctatccagaaggtagaagctgaccaccaagtgaataatccccctgatgacagcgacaatgatgatagcaggagcgaatctgtcgtgacttctgactctcaggattgtcaagtaaatctggacattgggtgtgccactccatctaagccgacgggtccaaagaagaggaagtggatcgaacgaagccctgactgtgttgcgagcagactgaggtcccgttccaacaaatcatga

SEQ ID NO: 4026 - DNA, 467 bp, Oryza sativa
  Clone ID: PAT_MRT4530_10946C.1
ccgaaatccctaaaccctattccccactatcgagggccgcccgcctctcacgccgccgtcgtcgtcaacctcaccggccgccgccgccgccgtcgcgcagtcctcccccatccccgcgcgggcgccgcagcgtcctcctcctagatatccaccacctccgccgcccgcccgctccctcgccttctcccccgactgctgctgttcttcaagaggttaccatagcctgtgatttgctggaggccgcggccgtcggcggagcagcccgacggcgcagcggcgctgggaggtcgacggagcaacggcgaggtcgcccagagctctgcccgcgtcgaccaatcggagatggagcagaatgctttggagcagctggcatccattgatctcattgaactatgcaaggaggctagaattgagcattgccgtgcaactagggacttgagtagctgtggccgctatgtgcagcatgt

SEQ ID NO: 4027 - DNA, 659 bp, Oryza sativa
  Clone ID: PAT_MRT4530_10947C.1
atgatccaaagactttgccggtcaaagtcaccgttgcatctcatcttcgatcgtgactacgacgtgagacctctccacgaccacgaggctggaactgccacgtcgacgccgcgcccgccggtggcgacggctggtggtggaggtggtggtggttgtgctgctgctactgctgcatcagcagcgacgtcgccgcctccggcctgtggagcgagagggacagccgccgtcgccgagcgcgcccacacccttactctgctcgtgcgcgttctccgccgtcgtcggcatgagccccctaccatctttggccgccgcggagctccgccgtgcttctcaaaggagcgtgtcgctccgccatcttggcagcttcctcttcctcaccatggcagcagcaactgctactgccgcttcgacgtcactgccgccacctccggttgctcggatgacgacgacaacggcgaggaataaatagcaggacagggtcttggattatggagaaattttcggtttttttccacccacaccacaagcactgccacaaaggtccaagagcccaaattcgacttcctgctatttggtccctgatcctgttcttgcgttgggaaccctgcagaccgatgacaccctgtacccactgagctcggggtctcgcgtttcatgtc

SEQ ID NO: 4028 - DNA, 577 bp, Oryza sativa
  Clone ID: PAT_MRT4530_10948C.1
gcacgaggatcggatgctatccccttctctcctatcctccgccgccgccagcccactaccgctccgcttcctccaccttcgacccctcttctccgccgccgtgccgctctccccaaatgacgtcgccgcctcttcctcctacgcacgctctgcctccgcctccgacgtcggaagccgagcctcctacgtgccggcacgccgttctgtccgccgccgtccccccctcctcgttgctagatgtggagaggactagaggagctttgtggcagagacgagcttcgacgatgccgtcgcttctccccggagtctaaagaaaatggcatcatcatccatcagcagtttggagctcattattgtgcctcctcattgtgcgatttaggtcatcaaggtgttgtgatccagacgccatccttcacaacaggaatcttgtttggcttcagctactgttcttcgtcgccgttgttcttgttgtcgtaaactcgtaatactaactttgtatttggatcatgtggcgtttctttcgccagtttatgcaatacagtgagaatgtcagtaccttctaagtgtttaattaagc

SEQ ID NO: 4029 - DNA, 1671 bp, Oryza sativa
  Clone ID: PAT_MRT4530_10949C.1
tttcataatatacccattgagtttattcactgtaggagcctctcctacaatttcattttcaaaaaaaaaacgatggctttaccaattgttttataatacgctattgggttaaacttttttcaaagagagaatcgactccatgccacctcctccgctcctcctccctccgttccgccgcgcgccaccgcggccgccgccacggcacgcgccgcgcgcctcctcctccacggcaccgccagctctcgctgccgctcgcgccggggagcgactacacgctgtcgctctcggtcggcccgccttccacggccagctccgtgtcgctcttcctcgacaccggcagcgacctcgtctggttcccctgcgcgccgttcacctgcatgctctgcgaaggcaaggcgacgcctggtggcaaccactccagcccgctccccccaccgatcgactcccgccgcatctcctgcgcgtcgccgctctgctccgcggcgcactcctccgcgcccacctccgacctgtgcgccgcggcgcggtgcccgctcgacgcgatcgagaccgactcgtgcgcgtcccacgcgtgcccgccgctgtactacgcgtacggggacggcagcctcgtcgcgaacctgaggcgcggacgcgtcgggctggccgcgtccatggccgtggagaacttcaccttcgcctgcgcgcacacggcgctcgccgagcccgtcggggtggccgggttcgggcgcggcccgctctcgctcccggcccagctcgccccgtcgctctccggcaggttttcctactgcctcgtcgcccactcattccgcgccgaccggctcatccggtcaagcccgctgatcctcggccgcagcacggacgccgccgcgatcggcgcctccgagacggacttcgtgtacacgccgctgctgcacaacccgaagcacccctacttctactcggtggcgctcgaagccgtctcggtgggcgggaagaggatacaggcccagcccgagctcggggacgtggaccgcgacggcaacggcgggatggtggtggactcgggcacgacgttcaccatgctgccgagcgacacgttcgcgcgggtggccgacgagttcgcgcgcgcgatggccgcggcgcggttcacgcgcgccgagggcgcggaggcccagacagggctcgccccctgctaccactactccccgtcggaccgcgccgtgccgccggtggcgctccacttccgtggcaacgcgacggtggcgctgccgcggaggaactacttcatggggttcaagagcgaggaggggcggagcgtcgggtgcctgatgctgatgaacgtcggcgggaacaacgacgacggcgaagacggtggtggtccggcagggacgcttggcaacttccagcagcaggggttcgaggtggtgtacgacgtggacgccggtcgcgtcggcttcgcccgccgccggtgtacggacctgtgggacacgctctcgcgccggtgagctgctggtgcggacttacgatgatcgagtatgatttgtcctaagctctcaggtgtacagagtacagactagtggtagctgccatgcatgtatctgtaggattgttcttcttgcgacgttactgttttgtttctcgtgtttctgcttgtaaaaaaaaaaaaaaaaaaaaaaaaaaaaaaaaaaa

SEQ ID NO: 4030 - DNA, 756 bp, Oryza sativa
  Clone ID: PAT_MRT4530_1094C.1
atgcggcccaagatgggttcaggttttgtatctccagcctccctctgcatggtcccgtggccggggagggcaccgtcgtcctgcagcttcttcatggacacggtgttcgaggaagacttctcaaggtccattgccgccggaggatcgccggagaacaggatgaaggaagagttctactcggacaagactgggtctttaccatatcgtgaggggtccgatatctccgagttctacttggagatcaacggacccgcgggcagaggggagcaaggcggggcatggggagggcggctcagcggtgaggtgaggcgggcggcacggcggcgtggggagggctatggagatggcggcgccggtgaggtcgggtggtcgtgccagccctccttccgcgacgagtggatctggtccgggttcggccacgtccgaacaccgcgctcgcggctgagcgccgccgcagccgcctcccccgccactcatctcgccgcggccactgccggtggcgcttccctcctacgcgactcgccgggcggggccgagcgggaggcggcgctggcggtgccggtggggaggggcatcaggagggtggggcgcgttgggagggaggggcgccgtgtggggaggggcgtcgggaggtggggcgctgacggggaggggcgttgggagggtgggtggccgcccggtggcggtttggagcaagagggaaggggcagcgcaggatttgacgacgtgggcggggaagagacgtgggagcgttaa

SEQ ID NO: 4031 - DNA, 537 bp, Oryza sativa
  Clone ID: PAT_MRT4530_10950C.1
atgaactcaccaagaaatctctcaaaatcacctagaacatcctcctcattttctcagccaaaggtgtttgatccgttgcaaatcttctctggggtcgaacaccctgcgctgagctcgtcgtcgccctcggtgtccagagcgccgccgctcgtcgtgtcgctgttctcggcgatccggtgcgtctccgaccaagccatcgcgccaccgttgtcgccaagatgcaaggaagcagcacgcgggaggaatcaagctgaagagctcccaatcacgagatcgccgtcgtcttcctcaagtccggctgctggctctccccttcgattcctcgtcctcggaacgacggtcgggtggagctatcgccgtcgccataccgatttttgccgccgccggaacattcttcacgccgtcatcgccattcaagcatcaccggcgcattccgcgtcggctatctcgccgtcgttcgccgtcaccgccgccgcaaaggtcgccggccgcctccgctctgtctctgctgctgctgttcctctcctgagccaatga

SEQ ID NO: 4032 - DNA, 335 bp, Oryza sativa
  Clone ID: PAT_MRT4530_10951C.1
cctcctgaagagccgccccctttttttttttttttttttttgccaacatttcacttgtttctttttgttgtttttttttttgatttggctttgtctttttttcttgggaggggacacaaccattaaatcaggagcggtgccagcccagcccccggtttccggcccgccccgggttccggacccccaaacggttacccccgagtaaagggctccgcgacccaaaaaaagggattccccccaagggctgatgccactaccacccccggacaaaaaacaagctggttcccgaccccaaaaactgagccatcaaacctgccaagtgggcggccaagccg

SEQ ID NO: 4033 - DNA, 315 bp, Oryza sativa
  Clone ID: PAT_MRT4530_10952C.1
aaagttcggaatccaacagttatttaaccacctcaaaccatgacaaatactttatatcaacaagatgaagaccggcaaccaaagcgatccataacagaccagcccacatagtaccacacctgggtgttaattgaaacatagcattaaattgtaactggggagaaagaagaaaagagcttaaatcttgacgatgtcctcgtcctagaactggatgaaagctgaagtggtcgccgccgttctaggacccgtcaatcttaacgccctctatgagcttgagggttggggggaccctcgccgaaggctcttgaggaggcg

SEQ ID NO: 4034 - DNA, 568 bp, Oryza sativa
  Clone ID: PAT_MRT4530_10953C.1
ctagttctagatcgcgagcggccgctcgcgatctagaactagcccacgcgtccgatagcacttggatgttgggtattacttatctttggacctcgcgtgtctagagcatatggtcaaacgacatttttgctgatgtacatacttgggggagtttgcgggaacttgacaagctatcttcacacgtctgagctaaccgtctgtggcacagacacatcttggggcaacaatttgtggactacttttcggctatttaacctgcccaagtgtgcaggtcgacaatgctgctaagaaaggtcaaaaggctgtggttcttgttaggcgacaggccagtccatggaaatccattgccatcttcgtcataagcataattgtgcttgctcttttcgcctttgcttatggaacacaagcctagatttttcacatggttctgtttgcatatatagtaggtatggcatggccatgagatatggaatgtaacataatcaccttttttttttcttcttgggtttaatgaatatacactggcatctatcgaaatgacactccacaagatgggaatttttaagct

SEQ ID NO: 4035 - DNA, 2793 bp, Oryza sativa
  Clone ID: PAT_MRT4530_10954C.1
atggcgggaagcgagagcgtccccctccccgactcccgaggcgcacgacgacacacgacacccacgacacgcacagtgcgagagctctcgtcgagaccagcgccgccgccgccgccgatcatgtcggagcgcgagggcccgccgtcctccggccccgcggcggccgtggcgccgcctcccctcgccgccgaacccggtgcccgcggcggcggcgacggcggcggcggagggaggaagcggaagggcgcggcggccggagccggagccgcggccgcgcggaagcctcgaaaggattacgggacaaatcaggcttatgtgttctacggacattcgcgagatttccagtacgtgggcgtagaagatttgcctaaatgtgcacacgtgattgcggagcttccaccgcagtcgcagtcaatgtcactgatggatgtgcagatctggatcatcaaattgtttcggctccatcctgaaactcaagatctctcaatcaagggtttctactcggattattgcccctctgtcctaattccagagtggtattttgggtactggataacctatgattgtctacgtgatgaatcatgggcttcctttgccaagaaagttagggggagaagaaatgggatggaaatgttcgtcttatatgtggactcctctgaaatcaagcactccagcagtttgatcaaagccatacctgatgattattctcagttggaaacggctgtgctgcctgacggaaaatccctgtcgtcatttttccctttgaattgcacttccaaacgcctcaccgaagacctgacgatgacaaccacggagatcgccgcatatcttgctcaatactacggcgatcagtacagtcgtgctggggcatggagggcaaaaatgaaggctttggagctgcgctatggtaccttctatgattcacacaactatgcgccgaggttacttaaggacataaaacataagcacccttacagttttgtggacatcaaggatacagaggttgcagactgtaaagatttcagagttctccaccggatattttgggcattcgaccagtgcagaaggtcctttatgcattgtcgtcctgtgatctgcattaagggcacaccactctgtggtaaatatcaaggagtgctgatgactgctctagcatttgatgctaatgattactgcattccagtcgcatttgctgtggtcgaaggtgagagcaaggaaagctggttgtggtttctgaggaatgtgaatcattctgttgtgaatgggcgttctaatgtatgcctcatacatgattacaaaagagagttgcttgatgctgtagaggacctgcaggatagtcctgaagaagcatatccatggagaggcatacagagccggtggtgcgtcgaacaccttgctgaaagcttctttgcacattttggtgacaggaagctggtgatgttattcaagaaactctgtcagcaaagccgaccatgtaagtttggcaaaatttggaaggagctagatgagttgacactgaaatatacgcaggagaaagaaagtggtgctagtggggaaattcaacaggagtcagttgagcatggcgaaacagagtttgtggcacaaagaccacacatccatcttgattcagtgggagaggaggtggaaaggaattgctctggtggcacagagagcaaaataacaaggttctccgagtggatcggtccaaaaccaatggagaaatggtcattgttgtacgataaaaacgacgcaagatatggcatcatgggcaccagtatagctgatttatacaaagataaccatgtaatgaaggggataaggtgccttccgctctctggattactggacctgacataccgtcgcatggcagaatgttacgataccagaagtgctgctgcaaagaaatcaactggcaaccctttaattaacttccctgaatgcatccaggatgagatgaaggccaaattgcagaaagccgagacacatcacgtaacttgtataaacagtgggaataaaaacgctttctttgaggaaggacacggaatatttaaggtccaatcaaagaacaagtatgtgattgttgagctgacacagagagagacacaaacgcacaaacatcctaaagttcgaaccgtaatcagcggaaataccatccacaatactttagttcgagagccagtgataagaaaagctcactgttcttgcaacaagctgaagctgcttcgcaagccctgctcccatgtcatcgccgtctgctgtcaggttggagttagccctgatacatacatgtccccttactacactctggcttatcttgctgacacttggaggggcaaattcgatgcatcggaggccttaggagaacactacacattaggagacttttgcagagatccttgctattcaacacttatgttaggaaatccgccaacatggatccctgataaaaggatggagtgcggtcttcctgccttcctaacatcggacgggacccaaaatggcgttgatgaggaagagcaacaatgcagcattgagagtgtatcatcagctgctgacaatcaaggcactgaaaatcgttcatcaagagaaactgaccagcaaaatgcacctaacactgataatgctgatatatcctgttatctggacgccagactgtttattggatcagatgaaggtgtgaaggcgagatattggatcaaccccgataagaaggtactggagatcctgcatgctgaatccaggtccaagcaggaaatggctctgctgctttgccaaaacctcatcactatttaa

SEQ ID NO: 4036 - DNA, 266 bp, Oryza sativa
  unsure (1)..(266): unsure at all n locations
  Clone ID: PAT_MRT4530_10955C.1
cggacgtggntncgcntgncaccctccccgcgcggcgtccggcgatgacggcgccggcggnaaggttggagcccgctgccccggcggcgcccgctaagacggccaccgccacggacgacggcggcgacgacttcgaggagcgcgtnctgcgcatcaagtcccgcgtcgggcccaagaagcnaggcagcnccgcggcnggaaagatgaagggcggcgcngggcgtcgtccaattcaaaggttgcgttancnttcccgccctttcgct

SEQ ID NO: 4037 - DNA, 2265 bp, Oryza sativa
  Clone ID: PAT_MRT4530_10956C.1
ttcatatataggcatggattctgtggaaacttatatttttttatgcctatggcttaaaacaatcagcgaaatcctctttaatctcatgtttgagcaatgctaaaggcaatgacaagaaatactaaaatattacttgtactgcgtaaataaagcaaagcaatagactttatagaatatctaaccttaaacacttgagtggactttatcaaggatatatatatataccctcaaactaatgagtgtcaaactgtagtcctgtggttcccccgccatggccaccacaccacttgcttcctccagctttcgctgccttctgctgctgctagctaggcgtgcgtacgactgttgcacaaagcagctagcgccctctgctgtaaagctgcaggctggtacgtatctaatggctggggtcataaaatggaaaatgatgtcatgtgaacaaagtgggaggagaagtgccgaaattgcacgagaatgcttatcactgacacctaatagatacaagtgtcacagctaccaacatattggctatttgggtgactctgcagagggtttcatttgccgtccattgaagtcaaaactaagaagcaaggttggactacatgtggctgcgaaggtacacaataaggacgatgaaggaagctgcagctccagaatttctgatgaggacaacgagacattgtctaatgcgtcgcgaaaaatggaagtaaaccatctgggggcactgagatgctatttttctaaactaaacactgaggacgcccagaagccatattcttttcatcagacgaacaagcagagaactggcccattatccacaaacatagaagaagcaaacatggctactgattatggcgatttcaggaatacgctggaatcattcgagatcaacttcaacagacgaaaaaaaggtacaaagggttatctaaatactgccgtggaggactacacaaattatttgatatttgatgagaagaacttcctggacatgcagcaagatgatcaaacatccagtttctgtttgacgaatttactagctgcgatcaatattgcagttttgttgttcgaaatagcaagtccggtgagaaattctgatattgaaaatctctctctccctttgatgtatggagccaagataaatgacctaatactatcgggggaatggtggagactactaacaccaatgtgtttgcactctgggttcttgcacatagcacttggatgttgggtattacttatctttggacctcgcgtgtctagagcatatggtcaaacgacatttttgctgatgtacatacttgggggagtttgcgggaacttgacaagctatcttcacacgtctgagctaaccgtctgtggcacaggaccagtatttgctttaattggagcatggcttgtctatcaaagccaaaacaaggatgctattgataagaacgtttcagaaactatgttcagccaggctgttgtggcaacaactttaagcttcttattgagcagtttcgggagattcgacaactggacacatcttggggcaacaatttgtggactacttttcggctatttaacctgcccaagtgtgcaggtcgacaatgctgctaagaaaggtcaaaaggctgtggttcttgttaggcgacaggccagtccatggaaatccattgccatcttcgtcataagcataattgtgcttgctcttttcgcctttgcttatggaacacaagcctagatttttcacatggttctgtttgcatatatagtaggtatggcatggccatgagatatggaatgtaacataatcacctttttttttcttcttgggtttaatgaatatacactggcatttatcgaaatgacactccacaagatgggaatttttaagctagatgccgcaatctagtggaaggatataactcaagtaataatttgtatttaaattttaaatataattattccagtggttacctagctgtaaccaacttagatactttctccgttccaaaagtaagtgacttggtgacctgtaatattaattggaattatcattatttcaatctcaatttcgtctttaagaaataagcacgctttattgggatttgcatctcagatttggttatgtaattgatagctaagaagaaatgatcatatatacatatagctgtggctgccatcaaaattggtttcattatgagactgtcacgaactacatggcaaactagaatatatgaatgtaaatgctaataaattctatatccaaggaatttgaattgc

SEQ ID NO: 4038 - DNA, 324 bp, Oryza sativa
  Clone ID: PAT_MRT4530_10957C.1
atggagccacctcctgagaggagggaaggtggacgtcctcagaaaaacatggcgacgcaatggcaggatgctatccttgggatcacaatggatggcggcgagcgtgcaggtgttcaacagcaggtcctccggctccagcggcacccggcgttgatccaaggcagcagcagcagtagaggcggcccgagtcacagctcccgcggtcaaggcactgtctccggcttcaactcatggcaatggaggaacgcatacaaggtgttcgacgaaatggaaggaatcgatagctggggaaggaacacagcattatccaatggtctcagctag

SEQ ID NO: 4039 - DNA, 448 bp, Oryza sativa
  Clone ID: PAT_MRT4530_10958C.1
ttttcattatgtacgctcctcctgaggcaaaccccctctaatccacagcctttttctgctactccttcctctaaaacaacgaaaagttcctgctgccagtcatgagcaacagatacttcatcaacatcaagaacaacttcgccgagatcaaatcctcccaaacatacagaaaccctttcaaaagagccctggagatacactattccatccccactgatcctcatttctgtgtggggagggtgattgccatctatgatacggtcactgtggaaggcatcgtcaaggagagacaggtggtcaaggctgaatacaagtaggccaaatagaagggaaatactgtcatgatggctattagttcggccaatgagaagtcggtgctgaaggtgcgtttgggaaacttgccggcaggcgagagtgtccgcattgagtttgaatttgttgggaaatt

SEQ ID NO: 4040 - DNA, 1620 bp, Oryza sativa
  Clone ID: PAT_MRT4530_10959C.1
atggaccttaatatgacaaatctttggtttcatgggaaggaacatatagctgcttcgccattcccacaagttgcaacatcaatgaacttcacttgccttggcagctcaaaaacaatcgaggcttctaaaaaaatgtttcagcagagcaatcaaagcttgtctattcctgatgatggatgcaggcttgtccttggacttggaccaacacctaatctacattatgctgataatgagtcatccggtggcaacagggataaagaatctgcaaatttgttcagccaacattttgccatagccgatcatggtctgaaattgggcatttcgagaggtggcacaagaaattttcaagccacaacaatgatcgagaagtattcacatcaaaatagaaatggtatcgtcttcccacttactgatgaaggatcaacttcagctaaaaggaaaccaggtggttatgtgctgccacttctgtttgctccaagatcagatgatatctgtcccaatggaacaccaccagtgaccgatattcaacatgttgaaactgtagatgatgatgacgatgatcacattacgtctcttaatcagcagaaggttcggattagccccgagccttcagcaacaactgattgttcttttgctgcaacttcagatatgatattctcctctactagcacggagcagagaagtcaccaacgacatcctaagaagtgtaggttcaatgggtgttcaaaaggagcaagaggtgcaacagggctctgcatttcccatggtggtggtcagcggtgtcagaagcctggttgcaacaaaggtgccgagagccgaacagctaactgcaaatctcatggtggagggaaacggtgtcaggagctaggctgcaccaaaagtgccgaagggaagactgagttctgcattgctcatggtggtgggcgtcgatgcggaactctggggtgtacaaaggcagcaaggggaagatcaggattttgcataaaacatggtggagggaagagatgcagggtagagggatgcagcaggagtgccgaaggacagtttgggttgtgcatctcacatggaggtggtcgccggtgtcagtacccaaactgcagtaagggagcacaaggaggcaccatgttttgcaagtcccatggtggaggcaaacggtgtatatttgaaggctgtactaaaggtgccgagggcaacacgctgctatgtaaagggcacggtggtggtaagaggtgcctctttgagggaggtggtgtctgtcctaagagtgttcatggtggaactagcttctgcgtcgctcatggaggcggcaaacgctgttctgtaccaggatgtaccaagagcgcccgtggtcgcaccgattgctgcgtgaggcatggtggtggaaagcgttgcaaggttgacggttgcgacaagagtgcttcaggggagcacggacttctgcaaggcgcatggaggcggcaaacgatgcgctttggagcaccggctgtgaaaggtcaagaggacggagggagccaggagcagcagtgcttcgggttcgtcgtgccggaggggagggttcatggtgggggcctgatgtccatgcttggagctggaggcaatcttgacgatccgaaggcctga

SEQ ID NO: 4041 - DNA, 753 bp, Oryza sativa
  Clone ID: PAT_MRT4530_1095C.1
atggcactggtgaaagcggcgcacagtggggctgatgctgcttctagtgcgccccctgtggcgacctcgacggaagtcatggccagtactaaggaccaggaggcggcgccatgtagtcctatcgctcgcctcgtgcccgtccggcctctgtccgccgacaccctcacctgggggcagctccaggctaagatggagtgcatccttcaagcgggcgcccgcggcgtgggccgcgagatcgaggaggccagtgcagcggcgtcgtcggcaaatcattgtgccgatcagctggcatgtgatctggcggagtcccgcgaggacctccaaaagatgaaggagctggtagctggcaacgagacatatgttgaagtcgaggatgtccagcagtgcgggcagcccgatacgtcagtagtcattccggcgctcacgcttgagcctcacgtgccggaggtggaaatcgatcaaagcccgtccgtggagacgaacatgaacgtgttggcagaccgagatcgtcgaatccagtattggaagaccaaactcgaggtggccgaactcgaaaggaccatcgtggaggcgaagaaggaccaggccatggaaactctccgaggtcgcgaggtgtggttcaactcgtacctcaagggttgctgcacggccatggcggaagtttgcagggagctccgagttccccgcggagatcccatggagtccgctgctggttatatctcgtggatgaagggggcctacgcacagctctaa

SEQ ID NO: 4042 - DNA, 2145 bp, Oryza sativa
  Clone ID: PAT_MRT4530_10960C.1
atggaccttaatatgacaaatctttggtttcatgggaaggaacatatagctgcttcgccattcccacaagttgcaacatcaatgaacttcacttgccttggcagctcaaaaacaatcgagacttctaaaaaaatgtttcagcagagcgatcaaagcttgtctattcctgatgatggatgcaggcttgtccttggacttggaccaacacctaatctacattatgctgataatgagtcatccggtggcaacagggataaagaatctgcaaatttgttcagccaacattttgccatagccgatcatggtctgatgttgggcatttcgagaggtggcacaagaaattttcaagccacaacaatgatcgagaagtattcacatcaaaatagaaatggtatcgtcttcccacttactgatgaaggatcaacttcagctaaaaggaaaccaggtggttatgtgctgccacttctgtttgctccaagatcagatgatatctgtcccaatggaacaccaccagtgaccgatattcaacatgttgaaactgtagatgattgtgacgatgatcacattacgtctcttaatcagcagaaggttcagattagccccgagccttcagcaacaactgattgttcttttgctgcaacttcagatatgatattctcctcaactagcacggagcagagaagtcaccaacgacatcctaagaagtgtaggttcaatgggtgttcaaaaggagcaagaggggcaacagggctctgcatttcccatggtggtggtcagcggtgtcaaaagcctggttgcaacaaaggtgccgagagccgaacagcttactgcaaatctcatggtggagggaaacggtgtcaggagctaggctgcaccaaaagtgctgaagggaagactgagttctgcattgctcatggtggtgggcgtcgatgcggaactccggggtgtacgaaggcagcaaggggaagatcaggattttgcataaaacatggtggagggaagagatgcagggtagagggatgcagcaggagtgccgaaggacagtttgggttgtgcatctcacatggaggtggtcgccggtgtcagtacccgaactgcagtaagggagcacaaggaggcaccatgttttgcaagtcccatggtggaggcaaacggtgtatatttgaaggctgtactaaaggtgccgagggcaacacgctgctatgtaaagggcacggtggtggtaagaggtgcctctttgagggaggtggtgtctgtcctaaaagtgttcatggtggaactagcttctgcgtcgctcatggaggcggcaaacgctgttctgtaccaggatgtaccaagagcgcccgtggtcgcactgattgctgcgtgaggcatggtggtggcaagcgttgcaaggttgacggttgcgacaagagtgctcaggggagcacggacttctgcaaggcgcatggaggcggcaaacgatgcgcttggagcaccggctgtgagaggtttgcaaggggaaggagtgggttatgtgctgcacatggaaccctgatggcttcaaagcaagtgcctgaatctgagcacagcagaggcatgatcaggaacagcctcttcagcaagatggtctctgcatcctcgatgacggctggtgctagcatggatcatgccatctcttcttctctccctggtgcctcgtcggatcgcggtgagtccttggaagagatgcggaacggcaagctcctgataccgcatcaggtcctggttcctggttcaatgaggccatcttcttcgcatggcaaaggtcaagaggacggagggagccaggagcagcagtgcttcgggttcgtcgtgccggaggggagggttcatggtgggggcctgatgtccatgcttggagctggaggcaatcttgacgatccgaaggactgaattttcctgataaatgttaaagttgcagctatttttatgctgtcatttatgatttctgcatctagaatctataagatttcagatcacccttgcactatgctgtccagtcatgactgcttgatcgaaactgaattctgaattatgtggcttaggccttgtataaagtattttgtccattcatatggcccttccatacacaaagagcagaatacctgaagagctgtttgattg

SEQ ID NO: 4043 - DNA, 1166 bp, Oryza sativa
  Clone ID: PAT_MRT4530_10961C.1
gtcatgtccataagttgcatatttgatcccaaagtggttatcatttcggcccataagtggcacaatttcagtgcataagtgcatgcaattttggcctataagcacgttaattttgggtgcgggatgggaaaacatccattcagatatattggtatcctgatgcatcacaacttcacaagagactatcaaacaaggatttggtaggcgatcaaggacatattccaaaagaaactgagtagttggaaaggaaattttttgtctattggaggaaggttgattttgatcaattaagttttaagtagcctagctatatttatgatctcctttaattgaggcacctaaaggtacactcaagaatctaggtaattactggtctagattcttttgcagtacaagctcccccaaacagggccatagacttgctaaatggagtgtcttatgcagacctaaagaatgtggggggtctcagaatattaacctcgaggtacagaagaaatatttgctaagcaaagttaattaatgaagaggggctgtggcatgatcttcttagaagaaagtatgtgtccaaaaagaatatcactgaagtagaaaagcgacgagtgggctctcattttgggcaaggttcatggaggctaagaaatcctttctgccattgggatcctaggagattaggaagggttctcaagtgagattttgggaggattactggtgtggtgataggccattcaacttactatattcttccttgtattctttggcaaggaaaaggaacacaatagtggcagaggcttagtacaacacctctaaaggattggtataaactggtctcaagagtttgtgcatttaatctatctgaacaagatgatctttttaaatggaaagttcaaaagaatggaatcttcacggttaactccatgtataaggtgctcatgtatcgagatatcatacaattctattatctggaagcctagatttccgttaaatataaagacatttctatggtatatgggagaagatgtcatgttgacaaaagacattctagttaaaaggaaatgaaaagggatcactgatattgtttatgtaatgctaatgagactatacagcatctcttttttgaatgtcatgatcgccatggctggtctcaccaaggaagccggcgtgcgaaa

SEQ ID NO: 4044 - DNA, 318 bp, Oryza sativa
  Clone ID: PAT_MRT4530_10962C.1
atggatcagagctttgtggacatggacatggtgcggatcagccctccatgccatctagatttgtcgatggctgcttgtgatctaggagtctttccttccaaatgccacaagccaagttgcaatgcttcaatgctctcctccacgaggcctttgtcatcgtctcctacccaagctttgctaccacagcgagccggccccgagcttcgctatgacactcctatccaatattcgtcggtgccgctctccacatcaagctcgaggagcaacgcgcccaggcggctcgagttccgcatccttaagcgcggcctccgcaactag

SEQ ID NO: 4045 - DNA, 1800 bp, Oryza sativa
  Clone ID: PAT_MRT4530_10963C.1
ttttttttttttttttttttttttttttttttttttttttaagacgaaatagatatttgtattatggtttttgaggatgatgggatcctatcattacaggcgagaagatgatgataccgcctagagggaggtgaaacgaactaagacgaacaagcatttacagaacacaatttctgctactacttgctgatgatgatgctaatggcgctgtcgcctgtggagatcaaaaggtgggcaatccaatccaggtggcatcatcgccggcgacctctacttcatgctcttcctcgccgcacccttgcgagcagccggcgccgcagccaccgacgccttcttcttggtcgccgccgccttcttcttggcagccaccggcgccgccttcttggcaggcgagtccttggcagaggtcttggcggacttggcagggcggccgcggggcttcaccggcgaggtggcggtcttggccttcgccttgggagacgccttgggcttcgccgccggcgcggcggcgaccttgatcttggtcttggtcgccggcttcgcggccttggtggtagcaggagccttcgccttggcagccggcttcgcggccttggtggtcttgaccttgggcttcgtggcgggggcggccttgggcttggcgtcggcggcggccggagcggcagggcgggtggaggagagcttgaaggagttcttgaccttggccagcttgccggcggcggtgagcttcttgaggttgccggagaggagcttgcggaagttgggcggcaggttggcgccatggttggcatggatgtgcttgccgatggcctgggagctcgatccagtcctctccttcagcgccacgatcgcctccatgatcatctcggcgtacggcgggtgggcggcggcgacgcggggcttcttggccttggcctccttcaccttcttctccttcgccggcttggcctccttcttctccttcggcggcctgccggccttcttcttctccttcgccggcttggcggccttctcctccgccgccgtcgtctcctcgacggcctcctccgccgcggcagcctccacctcggtcaccggaacctcagggacaacctcctcagtcgccattgcagcacgcccctcactcactctcccctctactactactcgcaagaaatggtcgcgactcgcggcggattgcttccgattctgcggcggcggcggccggccggtgccgcgcccgtgcttgcggaagttgggcggcaggttggcgccatggttggcatggatgtgcttgccgatggcctgggagctcgatccagtcctctccttcagcgccacgatcgcctccatgatcatctcggcgtacggcgggtgggcggcggcgacgcggggcttcttggccttggcctccttcaccttcttctccttcgccggcttggcctccttcttctccttcggcggcctgccggccttcttcttctccttcgcccgcctggcggcccccgcctccgccgcccccgcagttgcgcggccaggccgccgccaggcgcggcctggtcgtgcgtccggtggccggggggctcggtccgggcctcgccgtccgcccctcgcgcccctccaggttctccccggcggtccccgggggcccggcggccccgcggcccgcctgccccgtgggcttcgtggcgggggcggccttgggcttggcgtcggcggcggccggagcggcagggcgggtggaggagagcttgaaggagttcttgaccttggccagcttgccggcggcggtgagcttcttgaggttgccggagaggagct

SEQ ID NO: 4046 - DNA, 411 bp, Oryza sativa
  Clone ID: PAT_MRT4530_10964C.1
atggatcagagctttgtggacatggacatggtgcggatcagccctccatgccatctagatttgtcgatggctgcttgtgatctaggagtctttccttccaaatgccacaagccaagttgcaatgcttcaatgctctcctccacgaggcctttgtcatcgtctcctacccaagctttgctaccacagcgagccggccccgagcttcgctatgacactcctatccaatattcgtcggtgccgctctccacatcaagctcgaggaggtcagctttcattgcattccattatgggcaggactttagggtgatgaatcatcagtcacgccgcggagatacatcgtacgtgttgccctctagcaacgcgcccaggcggctcgagttccgcatccttaagcgcggcctccgcaactag

SEQ ID NO: 4047 - DNA, 986 bp, Oryza sativa
  Clone ID: PAT_MRT4530_10965C.1
ccggccgggaacgcagagactagacttttgaccaccgcgtgagtccaacccttcacggcgagggaaccatgacgaaaactagcgatcccctcctgaatcccccggcgccggcgagcaatcgcggcaacggcggcgtgcgccgcgtcccgtgggcgtccctgatcggcttcgtcgccctcgccatcaacttcgcgctctgcatctaccgcgcggaaggggatcgcggcgcgatcgcgtttgtcaccttcgcctatctcaacctgctgctcctcttctggtgcatccgccagttcgatcaggcgccgcacggatcggcggcgaggggccggatcagggccgccgtctggatcctcgccacatcgctcaccgccgtctttacatggaaggtggcggcgctgatgccgctccccgtcgccgccgtggcgtgggtcatggccgcggccaccgtggtcggtggattctacggcttcttcatccatgaggacaagtgatcgatcgatccatgatcggatgatcaaatcgcaaaatcggaaaagattactgctccattgggtctactgcttttatggcttcaggttgtatatcggtcaggttaattatgtggtggttgatatcgactcgatcgccggatgcactgtgagagtgttgcatatcataaataaatgaagtctggtgctatatgcattacaacaaaaatagtttagtcttacttgtaaatgtatgtgttgatttcccctggccttttcaaggtttttttccctttttttcctcgattgcattacagggggaaaaagttcaggccaaaaccatccgtttaatgtttttttggtttcaggtttagccggcctcgatcgtttttttaatgcttgttgttcataagtaaataatttgagtttatacatcaatggttttggtggtttgtgcctttcaaaaattttaaaaaaaaacaacaaaaaaataaatatggtatgggtaaatttatttaa

SEQ ID NO: 4048 - DNA, 366 bp, Oryza sativa
  Clone ID: PAT_MRT4530_10966C.1
atggcaaggggggaagaaattcagtatataagccaaaggggaaatactagtcaaggtctcacaaattatggggttaataaaaccatcgaggctgaagatggtgatgtctatgattgcatcaatatgaatagacaaccaggctttaaccatccattgttgaaagatcatacaattcagttgaaaccaagctctttactaatggagatggatgttgaaaatccatttatatcttccatatcagaagcacaactacctagctactgcagaatgccctataggaaccatcccagtactacgcaacaagaaacaagactatctcaattcagaataccaatgcagtcagcaccagtcaacaaaaaaagataa

SEQ ID NO: 4049 - DNA, 569 bp, Oryza sativa
  Clone ID: PAT_MRT4530_10967C.1
agtaatctatttgtattgaaattttaacagagtcttgtacagttccaaaacacagtttaacgttttgaaaacatgattccgctatcttctaccatacaaaacattcatcaagttcattatattcattagacaatacaaatgaaaacaagaaagaatcataatgacacagagataaaagttggaggcgaatcatctatcaatagagcctacgcctacatacggcagcaccacaaaagcaaggtttctgcttgatattacccttagagtcacgtacctgatcgagcgcgtaattgtagtcgtaacagagttcttgaagcggaggtatattgtcctgtgcgaagaacatcacgtgagggattctagagtcttcatgatcatacaaaacgttttgggcgtacagatttggcgagcagctatggtttatgaacctcccaacattacccttacttgctgcatcaatggtgaatccactcgactcatcaccttctgccatagatcggcctgcctgtgtccccagcattagctctgacatcccttgagctaaagagttatcatatctgttaccaata

SEQ ID NO: 4050 - DNA, 138 bp, Oryza sativa
  Clone ID: PAT_MRT4530_10968C.1
gggggagaggttataaataaccatcgcgggcgccccaaaaagcatatcaacagcagaagggacagcaaaaatgcgccctacaaaagcacacctactcggaactcaccatactcaactaacatcaggaatttcaggacc

SEQ ID NO: 4051 - DNA, 551 bp, Oryza sativa
  Clone ID: PAT_MRT4530_10969C.1
ttttttttttttttttttttttgtttttttttttttttttttttttttttttttttttttttttttttttttttttttttttttttttttttttttttttttttcgggacccgggggcccccccggaaattccggcccggacccgggaggggaacaaatttcccaaaaaggggggcaaaaaaaagctgggcgaaaaaagggcaaaaggggttcccggggaaaaatggtaacccgcaaaaaattccaaaaaaaaaacgagccggaagaaaaaagggaaaagccggggggcccaaaggggggaccaaacccaaataaaggggggggccccaacggcccgttttcaaaaaggaaaaccggggggcccaggggaataaaaaaaccgcccaacccccggggagagggggtttgcttaagggcccccaggggggtttttttttccaccagggagaggggcaaaagtgggtggccctcaaccgccggccccgaaaaggggtccaacaaggggccccccctggtttgcccaagaaggaaaaaaccctggtgaagggggg

SEQ ID NO: 4052 - DNA, 939 bp, Oryza sativa
  Clone ID: PAT_MRT4530_1096C.1
atggaccttgagaaatcttcctcgaacaccgcatccatgaagaagctacaggacgacggtgccctccccggtcgcgggaccatgcagagggaggctagagtcgcgttacatccccttcagtgccccacttctcgcagcaagtggcaaacgagatggttctacctccagatagagaacttggaccccgtccttgttattcctgaggaccagccagaaaagatcccagagtggactgctaaacccgccttgactccctccctccaatcctttatcgacatcattgatgatctccgaaaacgggggttgtcgggatatgaagtcgctgccgacttcgtaggtcggcggattcaaccgctacaggcccgtgcccatccggccttcgattactctgggccagatgacgtgacccgggtctctcctcggggtctggacagtgacactgtggggcgccgcatcggccagataatgatcagctgtcacgcccagaaattcccgaatagaattccaagcagaatgtgcaataaaatccccgtccaggaccagccagggtacacaaacgacaatgttgacatacagatccaccgggaacaccactccacaggcatcctcgacggcaaggacgaagcctactcctcggagaacccttcatctggtccgaactcaaactctgggcacgggcggcgcggcgccgacatgcgggacccaccggtcagcggcacggggaggacagaggaggcgtcggcccgcgggcccaccggtcagcggcacggggagggcggtctaccgtggaccgggaccacgcagaccctatcggagcgcgaggagacgggggttccggcggcgaacctcgacggggaaggggcggccgaggtagatctcgaccccgcgaacccgacggcgacgacggaacggtgcggcggcgaccctagcggcggctag

SEQ ID NO: 4053 - DNA, 977 bp, Oryza sativa
  unsure (1)..(977): unsure at all n locations
  Clone ID: PAT_MRT4530_10970C.1
tttcttggggnnggcnnggaattcctggcaccgaagncccgaattccccccantgttgttgggaatccacntggcnttggggcagtttaaaaattcccccccaccnaatantgaaagttccccccatccncgtggcctaagaanaatantttttggggggngaaccccccngcccccaaagaattttttttctnaaagccccccccacccaaacctggggccttaccgtttttccccccnaaattntttttntcccnaaaggganaaatttttgttttgggggggggttcctgaataatccctnnttaanaataattgccctcccnaaaaggggtcccgcctttaaaaggaattgttntctntgggcgaanaatttgcccccnaaancccttgaagcccaaaaaagaaatccntcccctgaaaaaaaagaacaaatnantttnccccccctttttggggtcccccctttaagccctttaanccctccccnttattgggggagcctgggaattccctccccctttccccaaaatttttccntttccccccttntaatgttttnttatgggaattttggcttttcccnccccaatcccttttggaaacctttttccttgtttcnaaaaaaatggggggggaaaaaaaaaaaaaaaaacccccccnggtttnccccnttttgtttnttaccnaanccctttttttccccccaaaaaaaaatnaaaattncccccccntggttcccccnaaaaaaaaaaaaaaaaaaaaaaaaaaaaccncccaaaggggggggggggcccccggttncccccccantttcccccccccnannaantttgaagttccctttttttnacnaaanttcccccccnggggncccctcccttttttttnccnaanccnttccntttnnaacctngggggnaaaaaaancccccngggnnnntttttnccccccnnccttttnnattccccccccc

SEQ ID NO: 4054 - DNA, 192 bp, Oryza sativa
  Clone ID: PAT_MRT4530_10971C.1
atggcactagtcgatggtggcggcgtagctacggcgatcttcaagcaatgtgaaggtgagaccatcgaagaagttggtgctgcggtgcagacaaaggaacaacaagattctcgacagctcggtaggaattttgacatgggaccaaaaccatccaaaagtggattccataagttttccaagaagcactcatga

SEQ ID NO: 4055 - DNA, 466 bp, Oryza sativa
  unsure (1)..(466): unsure at all n locations
  Clone ID: PAT_MRT4530_10973C.1
aggcagcaacttcttcaatgagccaactttttccatcagtttgcactaatgaaattcctcagacatagataggtacagttgcaaaatgcagtgtgcccccaaaacccctaaaatgacatagttatacagattgctcaatgttccagacttccaggaatgcaatctgacaatccagatagagaacaataaagaatttaatctagtattatttccctgttctctctaatagataaaatattcgtatttgaccatctaatacacccttatgaactaatcttctgtagcaaaactgaaaatcctagacntatttgtttgtatcttcagctcctttcgtaggtacacttagttaaagggggtggggtgtgtattcggggagtctccgtcccagtgcgaatgattgaaaaagtccgagagctcggtctggctgcgcaaatggcaccatgtgagatgctcctcgcaccgtcgc

SEQ ID NO: 4056 - DNA, 613 bp, Oryza sativa
  Clone ID: PAT_MRT4530_10974C.1
tccggtcgaccacgcgtccgtttcgattgaccgcggcgggaaagggccttcgagacttgggaggttggagcgagcaagctcggccatggcgaagctctcctgccttctcatcgtctccttcgccgtcgtcgcggcgttggcggccacggacgacgacgcggcggcggcggctgaggggatcacggtggcggaggcgtcgtcggacccggagaacaagtgcgtgtacacgatatacgtgcggacggggacgatctggaagggcgggacggactcggtgatcggcgtgacgctgctgggcgccgacggctccggggtgcggatccgcgacctggagcggtggggcggcctcatgggcgacggccacgactactacgagcgcggcaacctcgacatcttcagcggccgcggcccctgcatgcgccaggcgccgtgccggatgaacctcacctccgacggcaccaggcccgcaccacggctgcagctcttcaccgtcgagcagtggctcgccaccgacgcatcgccctaccgcctctacgccgtcgtcgacaactgcaacaaggccaaggacgccgccgccgccgacgccgacgagccgagggtcaccgtgctgtaa

SEQ ID NO: 4057 - DNA, 608 bp, Oryza sativa
  Clone ID: PAT_MRT4530_10975C.1
tccaccaaattaccctcctaagggaataagcttgcggccgcggcccctgcatgcgccaggcgccgtgccggatgaacctcacctccgacggcaccggcccgcaccacggctggtactgcaactacctcgaggccaccgtcacgggtccccacctcggctgcgcgcagcagctcttcaccgtcgagcagtggctcgccaccgacgcatcgccctaccgcctctacgccgtcgtcgacaactgcaacaaggccaaggacgccgccgccgccgacgccgacgagccgagggtcaccgtgctgtaaataaatcgtagattctctttggattcccgtgtaattatgtaccttacgcgtatgtggtctactgctcgactgctcgtgctgtcgtgcattgcagtgattgatcctttttttttacattgaggggaggatgctaaaataattatacgattttaagagggtaataagatgaaaccagcgttggatcggtcggacgatccggtgctcactccagttggtaacatatcaaaaaaaataaaatcaaacaatcaatgtcaccatgactggcttattgatttccatgtatcgtttttgtgtcggcctcgtgcc

SEQ ID NO: 4058 - DNA, 282 bp, Oryza sativa
  Clone ID: PAT_MRT4530_10976C.1
cctccacgacacctcgacggcggcacgtggtacaccgtctccaccctcgatctccggccaccggtgcacgctaccggcggcgagctcgtcagctgggaattcgacctccacctctacaaatccacctcccattccaacgggtggatcaccaagcggttatgtctaaaggagttcgtcagagacaaggctatccctctacccaaatccgtcgacaggctgtaccacgagaccggcaagagaccatcgccgtcggcggcgaggccggcaccgtcgcgtttatga

SEQ ID NO: 4059 - DNA, 1462 bp, Oryza sativa
  Clone ID: PAT_MRT4530_10977C.1
cgcacgaggggatttcccctgcgcaattttgagcagacctagatttcaaaagtaggatcaggtttagtaacaattcttagcttaagtttcttagattcaattgtaatttgtatataacagattctaacattagaattggatttgatacttgatagacaactcttactttctactatttatatagacatggctgtattttttatatacaactatatcgatcaatctatatcattataatttggacctatcacgatcaaatggccaatatctttactttttttttcttcaattaatatgaggaaggcggcggcggcggtggcgccgtcgaccacgacggggtacgggtccggcgaggcgaggcggtcctccggcggccggagaagccgcggaggcaaaggtaagagcctaagaggcaaagaaacagtcctcatggcagaaatggtggcctcaactgttgtccaagaggttttgggcggagccgtctcctacttgtccagcaaccgggagaaggtgtccgagaggcacaacttggagaagttggagatggcacacgctcaattggagcacgccctagagagatcttcaaagctacccatcacagatgtttccttgcttcgtcagaggaggatgttcaaacgtgcctatgaggagtgcagtgaagtggtggagaaatgcaaggtgcggattttggaagttgctgaagagcaagggaagaagctgaagcgtgctgctcaagagtgcgatgacacactgcgcaaatgccggcaacgcatcctggaacaagaagaggcagaacaagaatgccatgtcccagttcctgagttcagagaacagggaacaattgtcaaaggcaagccttctcttaaaaaatgcccgcatatgaaagttgaccttgtctacacaccccatggctcatcacaagacctactcccagaaatcaagagttctgtaatagaggttatgaaggcaaccatgaacactcggagcacacagagaaccattcgaggatctaggaaagcgaagctgttgcaacagcagggtcataaaacacagcatcgtacaaatgcaatctctgacttcctcaacctttggtctgcacatgcgcctgtccagctgcagggctcaatcctcgattggattcagaaagagaaggaagcacaattagcacctcctctactgcgcctgaaattttagatcatgtaacagggactggtcaagaaaacacggataattaaatgaatggaaatgtaatattctagcagagaaaagtaactcatacggagttgatttctaagtcattaggagtgtattgatatgaaatgtgtgctacatatgctgctgctgttggtctaactcaaaacttatgtttgtaaatgatgataacatgatgttcattctctggtaatataatgtacagtttcatcattggaaaaaaaaaaaaaaaaaaaaaaaaaaaaaaaaa

SEQ ID NO: 4060 - DNA, 420 bp, Oryza sativa
  Clone ID: PAT_MRT4530_10978C.1
atggcccggcccacggcacaactatttggcccggcccaagaatggcacgacacaactgttgtcggcccgtaccagcccgacccgatagttgggatgtgcatcatcaagcgtaccgcactgaggccgtcgcgcctccccttctcctactccggccgccgcgccttccccctcctccggctgacgccgcctctcctcctcctcctccagccgttgcgcctcccctcctactatggctgccgctctattttccccatcggcggcgccgcttgtctcctcgatggcgggatcctgcggcgaggcgtggtcggcgagcttccgtcctcgtcgcagaatggggtggcgcgtcgtggcggcgatgccgagccacctagctgcggcgtggagcagcgcggcagacgggcggcggcacgaatggcctga

SEQ ID NO: 4061 - DNA, 309 bp, Oryza sativa
  Clone ID: PAT_MRT4530_10979C.1
atggcgacggctttccggcgacaagcggcggcaacggaggggtggacgggcttctcctcacagctgcgaatccagtggaagcaacggcgtccgaaagcgacgatggacgacgacgaacgacacggctggagaccaaaccacggcaataacccactggttcacggcgacggcaaccttctggtgggatttggcgcaaaacaaccagtggccgaggtagctctcacccttgcgaagccaagggaggcgacggcgcaggtcggggtcgaccgaggaggcggcgcgacgtggctggagcggcggccagcatag

SEQ ID NO: 4062 - DNA, 483 bp, Oryza sativa
  Clone ID: PAT_MRT4530_1097C.1
atggaccttgagaagtcttcctcgaacaccgtgtccatgaagaagctgcaggacgacggtgccctccccggccacgggaccatgcagagggaggctggagatacaaaacctgaacccatcttgggcccatgggtatctggatacgtcgggttccgacttcgggatggcctgaagtcgcgttacatccccttccagtgcccctcttctcgcagcaagtggcggacgagatggttctatctccagatagagaactcggaccccgccctagttattcctgaggaccagccagaaaagatcccagagggggtgatcaagtttttgggtagtgcttttgcgcgctttctcttggctgcaacaactacttcctgcaacgccactcgccactgcatcctcttcgacaatgctctgcactgcgacatcttcttcctctacatcaatttccagcatgtcgaccggaggaggcatcaacggaggatggactag

SEQ ID NO: 4063 - DNA, 590 bp, Oryza sativa
  Clone ID: PAT_MRT4530_10980C.1
ttacatcgctatctggtggttggcagcgatgaagtcgaccgtgaaggtggagttggcgtggatgccgccgaccttggcggtggtgaggacgacgtagcatgggagctctacggggaagaaggacttgacgtcggcctgctgggagaggtcgagctcggcgtgagtgaggatgaccacgttgatgaagccgagggagatgaggtggtggaggatggcagaggcgagaagcgcgcgacagtggagtcggcttagggagcccgccaccttccctcccgctagatctagcagaggagagggcgccccgcccccgtcgccttcggttggggagcccgtcgtcgtgctcatcttagcagggaatggcgtgggcttcactgctcgggagaaaaaccacggcgacaaaggagctaaggtggagaggtggaacctgtggaatagcgtatcccgtgcctccctgcttgcaatgttggtgactattccatcctctacgctggcaccctctagatatgtcctccacgacggacgaagcctactcctccgagtaccaccatctgacgcatactcgaactctggggttgagagaccgggcaaga

SEQ ID NO: 4064 - DNA, 209 bp, Oryza sativa
  Clone ID: PAT_MRT4530_10981C.1
ttcttggacctccaatgtttccaccggccatgtgtggacagccattggtgatcaatgctcggaccttcagcccaaggttacatgcatctgctgggccacagttgcagtatggcagtagatgatgatgggcagactgctcttatatatgcactgagatgcacatacaaggaactctagatagaattgacgctgcagtgagtgcagcttaa

SEQ ID NO: 4065 - DNA, 2354 bp, Oryza sativa
  Clone ID: PAT_MRT4530_10982C.1
ttttttttttttttttttttttttttttttttttttttttttcgtccggacgcgtgtgtttttttttgaatgatagcgggcaacagccaacaggattccattcgcctaagcaaaggaccaatctacaaggtagtaagtgatattacatggatattcagatagatgtcagtggtgggcgccagcgttacacaaatttatcaggtccataagggtagagtacaatacttcaagagaaacatagcccaaaaacctacgcttctcaaactcctgactatctgctgacatcttcccatcctccgttgggtgatcaatagtaaggtaccaagaaatgcatccacaggtgtcgtccgggtcaacattcgccaccaggccaagcgtttcaccttgctcaagatcaaagtaaaggcacaggaaatctctagtcacattcataccgagaaccaatgcttcttcatgaagccagtggattacttgactagcaacctgctgcagaagcattgttgggaggtcctccaagtcacaattgtagctatttaccaaatatccatcggagggcttcccagtcaatgatccagcaatgcttggggagccttcacccattagactaatttggctatctttcacgatcaccttagtattgaactgtgacctggatttgtacttaagttcatggttatcagaaggctttgcaatccgatctgcagcaaggataggctgaggaactttcaagcatagagaccaggaggaagttcgagaatgccaagtaggaagagaacgcaaatggagatatggaaccctgctgaccacactctcaagctccacgagtactttgttagaaaatatcctgtgagccactgtcaagcagaaatgacctagcaggccataatcgtcacctgcaacctgagcaggactttggtagcgaccaatgttaagggatttctccctgaccttcctaagaatgttctcatgaaacaattgtagcaagtaaatttccagacttctgggattaggaaaccctgtcacgtcttttcttaaagggtccagcttcccattcatagtgaccaacacaagatttgaggcatcctctgaattggcatggtcttcatggtctaccatttctgagtcactaccatctccagaatgagcaagcgagaggcacaatgaacattcctgaccaatagctaattggagaaaatcttcacgcattccagtcacattgatgccttgagattggacaaatgtctcacggatcaccatatcaaatacctgctcctcaaatattgacttgtggatgttgcgaagaatagaatgtgcatgtttgatggatttattgacatcatcattgtctgtttcagaggaagtgatgcttgagatgccatctttcagtttatgaccgtagttttccacaccattggcactgtcccctcgaaaattaagactcaagaaacggcaagatttttgagggacttgtacggacaaagtgcctgatgagtcttggtcaattggaatcaatggtaatgatgacagtcgaggcattgctgctgtgtccaattgagaagtgtcgatcagatcaaacatgaagccctcacttcctggaccacttccaccaaaccgttgccgcttcactttccagttctgctgcaatctgattaatgagccatagaacctagactctttttggaactgctgctccattgttttggcagattgtttgaagtagcgtgacaaatgccgaacgcgctgaagcttggtggctgcagagactgcggtgtcaactaaggtttcggttggcagcgatttgggcttgagcatcccagcgactgccactgcatcattggcttcgacagtggagatgaggtcaatgacgacggagagctcctgctgcgcctgctgcaggctctccatcatgccctgccacggccatgcctgctgctgctgctgctgggcggtgtccttcttgggcttcttggcgtccttgtcgatgacccaggagaagtcgatgcggcggatggcggagaggcgctgctcctcgctgctggtgtcgggcgggtagtgctcgttgccggcctcgtcgatggcgtggaggcgcttgatggggagcttgtcgaggtccacccgcacggcttcctccatggcgaaggcgaggcagcggcggcggagggcttaattagatcggagacaattttttgagtgaaggaggcactgccttggggctcacgagtcccgctcaagagcggaagggatccccccgcgggaagcagaagcggcggccggcggggtgggggcggccgccggcgaggtcgtcgggcggcggagtgaggaggagcgaattctcgatcgagtttccccgcgtc

SEQ ID NO: 4066 - DNA, 396 bp, Oryza sativa
  Clone ID: PAT_MRT4530_10983C.1
atggccgagaagacccttcgcgaattcgttgccccgtctgctgacaacgtgcctgttggcccggctatcaacatcggagacactgatttcgatcttaagagcagcctgataactacagtgcagcaaagcccgttctgtggcaagccgaacgaagatgcaagcactcatctgcagcaattcttggagatctgcaccacttacacggtaaaaggtgtcagtccggacgccgtaaggctacgtctattttctttctcacttttgggaaaggcaaagcagtggttctacgtgaaccgggcgactgttaacacttgggacagatgctccaccgcgttcctcttaaaattcttcccgatgggcaagaccaatgaccttcgcgggagaatatcaagcttctag

SEQ ID NO: 4067 - DNA, 572 bp, Oryza sativa
  Clone ID: PAT_MRT4530_10984C.1
atacaaattagtaccttttggatacacggcatagctaaaggtggtttgcacgcgccatgaagccaaacttcgcttatgttagatcaaagccaaataagtaatattctctaggtttctcaattagaaaatttagtagaaggaaattcaagatgctattttttaaacggaatataataaagctctgggtcgggatgtattcacttatgagttttattaggttttctggaatgttattaggcccaatttagttgatttatttaataatttttatagtggtaatttacctctttaattactctcttaactttggtatttttattttactgcccaagcgcaaacaggctttgaaaattcaacaatataggcctatttatttacttaatgtcagtttcaaaattttcactaaagttaatacaaatagaatttctgtagtggctcagaaacactgctggccaagctccgctgcgtggtcacctgggagaaatcaaatgcctacacgtgtctccaaaactgaaataagcacacaaatgaaaaaaaaaacagaaacaaataatataacgttattgtctttt

SEQ ID NO: 4068 - DNA, 231 bp, Oryza sativa
  Clone ID: PAT_MRT4530_10985C.1
atggcgttgcggcgccacacacaccgctgcgtgcgcgtcctcgctccgcgcgcgtcgcgcaccgggtggtactgggtagaagtagaaccttcgagttggatggcgcggttaggtgtggtggagtggagttttaacaaaatatgtttgcaaagaaccaatttcattcacttacagctcatcattggatctgatgcgtcagagcttgtggaggaggcaaacagttgccgatga

SEQ ID NO: 4069 - DNA, 326 bp, Oryza sativa
  Clone ID: PAT_MRT4530_10986C.1
cccacgcgtccgcccacgcgtccgtggtattaatcattcaatctatcgatcaatcactcgtgcaacggaacaagggaatcatactccttctctttttgtctgctttttgaagggaggggagggggcccatccaccagtctaccatggcgcgagcagcgtcaggggcacatccaccaccattcctccatacacgcatggtggacatgccctcctcctcctgctgatacttctgttccctgtgtgaatgctgaatctcaatctgactcccactctaaatactctcgaagagaaggagaaggtgaacgtatatgaggaggagctcgatg

SEQ ID NO: 4070 - DNA, 330 bp, Oryza sativa
  Clone ID: PAT_MRT4530_10987C.1
atggattcgttggacgatggatccccttgccccctcgagcgaagaagatttaggcggcggtgggcagagaaggtaaaactaacggggcgcggcggtggttacctctcctacgctatggtgactggtgagcgggtgctgatggccggaggccgactgccgccgctggaggagacgctgcgatcgccgttgtacacagtacatctgctccaagagttcacggatgccgccggcgttgcatcgttctctcttttgttctgtgggctgtggcaccgtcagatcgacgaaattaatccttccttgcttggttgccatggacagcgggacaggtag

SEQ ID NO: 4071 - DNA, 182 bp, Oryza sativa
  Clone ID: PAT_MRT4530_10988C.1
gcggggacgagcgggcggggttcatgtgtcagtcagtcccgcgctatgcaggcccaaaggggtgccgccagtggccggggcgactgacatgctttgcgcatgcgtacaaaaacaaataatctaattagagtaactattgccgtcgtgcgggagggagataattgaccgggtggtaaaaaaaa

SEQ ID NO: 4072 - DNA, 511 bp, Oryza sativa
  Clone ID: PAT_MRT4530_10989C.1
gttggaggcggaagccgtcatccaccggatcgccgtgacgccatccacaacacctgagctgaggccgccgccgcgtcgtcgtcgtcgtccgtacatcgccgccggatcgagccgcgccgcaagcggtaggagatgaggcccgcggtgagcagggccgccttcgcgtccgtgcttctggcgccgcgcgcggtcggggtcgccgtccgctgcgcctccttcttctcttcggtcgtcttcccgtcggtcgccgtcgtcacttacgatcacgcgtagattattaaggaggacgccgtaaccgatccaccggagcatcttagcttgttgctgaatgtgctccatgcacgaggtgaaaagcttgtttcttcaggggcgaaaagaggcccgatttccttgttggtcccttagcagaaagtccagcagggtaattaacattactactgagaagggcaactgttcctagcgggatggaaatgccctggtggaagtttgtaatacggcctattgctttggc

SEQ ID NO: 4073 - DNA, 1653 bp, Oryza sativa
  Clone ID: PAT_MRT4530_1098C.1
agaggggaggaggcccaagagaaagagggagagaaggagagggagagaaagagagggactccatgtcacttctccttttaatcctaacgatcgacccaattcttcaagtactagacaaagcaacggaggatggcaccttatcatgtctaagtggccggcaagctaggatgcgaacatccctctacgcagatgatatcgcaatcttcgtcgcaccaacctaacgggatgttttcatccttagctcaaaccctagaggtctttggtgaatccacgggcttgcaaattcacctgcggaagagtcaagtggcaccaattcactgcttttagattaacctaaacaacatcatgacgaacttccttgccacacaaggtgatttcctgatcacctatctaggcctacccctctcgttgacgaaacttgggaaagcgcatcatcaaccgctgataggcaaggcagcatacacgcttcctccttagcagggaaaactcctcaaccatgcgggaagaacaactggtcaaaacggttctcatggcccaggcgatctaccacttaacttcaatcaagttacctaaggccatgttccaagcattggacaagataaaacgaaaactcctttgggccggtagtgtaaacctctccggtgccccccggggggatgcaaaattaactggaatacagaccgaaagacctaagtggtctcggcgcactggaccttcaacgttttgctcgagcactaagctctgcgctggctttggtttgaattggtggcgctagacaaacctttggtgcagcatgccggtgccttgcaaattgcaatgagaaatactacaaggctatgtttaatgcggcaatggaaatcagggtcagcacgacaacaagacgatcttcttgaacgacaaatggttgaatggccaaatcccgtggtccattgcaccgaatatctacgcgtctcaagaaggaagaacatatcagttaactaggctatttcaaacaacaattgggtaggtgacctcctgtctatgcactatgccacggcccagcattttcaacaatttgtcaagctccggatgcaaatccaaacaatcgacctgctgccaaacaccgaagactgcatcaagtggaggttcactgagcacggccaatactcgtccaaatcagcctacatgatacagttcaaaggagcaataaaaatagttttttaagaacatcatatgggacacatgggcaccatcgaagtgcaaattcttcgcctagctaatcatacaaaatattgtttggatggctgacagattacaagcgcgccaatggcccaaccaatggttctgcccactatgctgagctacaccagaatatgtagttcaccttctgatccattgcagattgacaagaagaatttgggactcagtcgcagcaactcagtacaagattggtggaacctcctcctcaccttactgaacgcgccaatgtagcccataaaatccctaatcatccacatctcttgggagctttggaaggaaaaaaaaactccaaagtgttcatggagcttgcaaacacaccaatgagcatcctggcaaaaatcaaggaagaggccacactgggtagcggtaggggtgaaaagcttatctgagttctgtcctctaggagagtagaac

SEQ ID NO: 4074 - DNA, 126 bp, Oryza sativa
  Clone ID: PAT_MRT4530_10990C.1
atgccgtcctcggtcttgctacgcagcccctccaaccgtgcaagtttggatcctctcgatggcggaggacgtcaggcggtgggagatggatctgctccccccgccgagtgcgtaggtccgaattaa

SEQ ID NO: 4075 - DNA, 414 bp, Oryza sativa
  Clone ID: PAT_MRT4530_10991C.1
atggcttggcctaccgtccgatctgcacggccgcgcgctagccacgcacaggagaagacggcatgggcccaagccaccttcgatctgctcgcggtggcggcatcgagcccagaaggggagaagtggcgatgtgtgtggaaaggggatccgacggaaatgagtgagacgagggtgcgagagcttcgagcggtggtgcgcccgtatcttgaggaaatagagagcggcttctttgaagaagatagcgaggagaggcgatcaccagaggctcaagacgcatcattcccgtggctgctccaccgaccccaggacaccgatgccacggggccctgtgccaacggctcgcgccgcgtgtctgctgaggagatgatccggatgccaccgtctaggattgaggtcactagagaggggggctag

SEQ ID NO: 4076 - DNA, 841 bp, Oryza sativa
  Clone ID: PAT_MRT4530_10992C.1
atggagaaggtgacgaacccgctgttcgagaagaggccgaagcagttcggaatcggcggcgcgctgccgcccaagaaggaccttcaccggttcgtcaagtggcccaaggtggtgcgcatccagcgccagcgccgcatcctcaagcagcgcctcaaggtgcccccggcgctcaaccagttcactcgcaccctcgacaagaacctcgcaactaatctgtttaagatgctcctcaagtaccgccctgaggacaaggctgctaagaaggagaggcttttgaagagggcccaggctgaggctgaaggtaaaaccgttgaggcaaagaaaccaattgttgtgaagtatggtcttaaccatgtcacatacctcattgagcagagcaaggcccaactggtcgtcattgctcatgatgtcgatccgattgagctggttgtgtggcttccagccctgtgcaggaagatggagattgttcacaagaaaactgcatctgtcctctgcttgaccactgtcaagaacgaggacaagcttgagttcagcaagatcctggaggctatcaaggcgaacttcaacgacaaattcgatgaggttaggaagaagtggggaggcggcgtcatgggatccaagtcgcaggcgaagaccaaggccagggaaaagctgctcgccaaggaggctgcccagcggatgacctaaagaactagcctgaaattttgcgttgtggttgttactaggaacacattgtgatcttataacttcggtctgcaatgtagtatgcttatagttattatgtggatgtggaccttgagtgtactttaaattaaaattaatacctattcctgttgcatct

SEQ ID NO: 4077 - DNA, 1176 bp, Oryza sativa
  unsure (1)..(1176): unsure at all n locations
  Clone ID: PAT_MRT4530_10993C.1
gggcgtccgcgggcggcggccaggcagtcgccgccttcttcctcctcctcctccgccgcccgcctcgccgcctcccgagagctccaccctcgcctccggcgaaatggcaccgaagcgaggcggcagggcgccggtgccggcgaagaagaagacggagaaggtgaccaacccgctgttcgagaagaggccgaagcagttcggcatcggcggcgcgctgccacccaagaaggatctgcacaggttcgtgaagtggcccaaggtggtgcgcatccagcgccagcgccgcatcctcaagcagcgcctcaaggttcccccggcgctcaaccagttcacccgcaccctcgacaagaacctcgcaaccaacctgtttaagatgcttctcaagtaccgccctgaggacaaggctgccaagaaggagaggcttttgaagagggcccaggctgaggctgaagggaaaaccgttgaggccaagaagccaattgttgtgaagtatggtcttaaccacgtgacttacctcattgagcagagcaaggcccagctggttgtcatcgctcatgatgttgatccaattgagctggttgtgtggcttccagccctgtgtaggaagatggaggtcccttactgcatcgttaagggcaaagctcgccttggatcgattgttcacaagaagactgcatctgttctgtgcttgaccactgtcaagaacgaggacaagcttgagttcagcaagatcttggaggccatcaaggcgaacttcaacgacaagttcgacgaggtcaggaagaagtggggaggcggcgtcatgggctccaagtcgcaggcgaagaccaaggccagggaaaagcttctcgctaaggaggccgcccagcggatgacctaaattatattcgccccccgccgttgagctcgccctgtagtttcatttttcagtgtaatgattttgacgaggaactcagttagcaccatgcgacagtgctgtggttttctgaagtctagtttcatatattttctgttcaccggaccatgttgggaaactatgcaagatatcagagctttacaatgtttggtttctacgcagtttaaaaaatgagttttgctaaaaaaaaaaaaaaaaaaaaacccgcggacctactcaatagcctaaaccccccattcagagctgaaaaaananaaaaa

SEQ ID NO: 4078 - DNA, 1061 bp, Oryza sativa
  Clone ID: PAT_MRT4530_10994C.1
gcgatttagaacttttctattaaggagcggaaacaaaaaggtttttgaagcacggttgtactaattgcatagtatcccaacatggtccggtgaacagagaagatatgaaaccaagactcagaaaaccacagcacggttgtacagtgctaattcgagttcctcgtcaaaatctgactgaaaaatgaaactacaggagctataatttaggtcatccgctgggcagcctccttggcgagcagcttttccctggccttggtcttcgcctgcgacttggatcccatgacgccgcctccccacttcttcctaacctcatcgaatttgtcgttgaagttcgccttgatagcctccaggatcttgctgaactcaagcttgtcctcgttcttgacagtggtcaagcagaggacagatgcagttttcttgtgaacaattgatccaagacgggcttttcctttcacaatgcagtaagggacctccatcttcctgcacagggctggaagccacacaaccagctcaatcggatcgacatcatgagcaatgacgaccagttgggccttgctctgctcaatgaggtatgtgacatggttaagaccatacttcacaacaattggtttctttgcctcaacggttttaccttcagcctcagcctgggccctcttcaaaagcctctccttcttagcagccttgtcctcagggcggtacttgaggagcatcttaaacagattagttgcgaggttcttgtcgagggtgcgagtgaactggttgagcgccgggggcaccttgaggcgctgcttgaggatgcggcgctggcgctggatgcgcaccaccttgggccacttgacgaaccggtgaaggtccttcttgggcggcagcgcgccgccgattccgaactgcttcggcctcttctcgaacagcgggttcgtcaccttctccgtcttcttcttcgccggcaccggcgccctgccgcctcgcttcggggccatttcgccggagggggggcgctggagcttggtgttccgaacgggagacggcgaggcggggggtggagggggaggccggccggc

SEQ ID NO: 4079 - DNA, 252 bp, Oryza sativa
  unsure (1)..(252): unsure at all n locations
  Clone ID: PAT_MRT4530_10995C.1
gctggctgcttcgttggatgtatgcaaatgctgaggatgcaccatgaggtggtgcttgtgttggtggcagccacagcaacaacgttgaattgggttggctgctgatgccctggtgaaattgaagtgctgattagtgactgatgcacaaaaaggcttgatggtggtgtctggtggtgcggatattattggaaaaagtctgtccccgtaacgtgtacgaacggcngatgctntgggcctgtttttaaaaaaaaa

SEQ ID NO: 4080 - DNA, 366 bp, Oryza sativa
  Clone ID: PAT_MRT4530_10996C.1
ctcaaataaggcgtcttgaatctctcctctcttccttccctaactccgtcgacgctcgtcgccgatccggttcgccgccaccgccgccgccgtaaggggagggcacttcgatcccacatcgacaggtcgacctccacatcgagaacgagaactgcgagctctattgcctcgatcatggcttccagactgatgaacagatagcccgacgacaagaccgaggaccaaagcgatgacgattagaacacctttttctaagacactgtcgctggtgatcatgaacatcgcactgacaccaacaatcgttagcctaccgcgattgactaagagtagacgtgagactaccgacagactatggcatcctgtgca

SEQ ID NO: 4081 - DNA, 297 bp, Oryza sativa
  Clone ID: PAT_MRT4530_10997C.1
gtcgcaagccgtaaccaccgcattcgcatcagatggaggatcagttgccggtgaccatgtcttggttcctgctgtcacatatgaagatccttcccaagcaatgccattctcttggcaggtgtagagcagaggctgtgattttgctgttcctgcagagttgctggtgaaaatgactgaggctttttttttgattgtgtgagcctgcagaattcaggctggtgaaaattgtagataaataacagctcaggtcctctggttgatggtggtggtggtggtggtggatgtagcaattattta

SEQ ID NO: 4082 - DNA, 465 bp, Oryza sativa
  Clone ID: PAT_MRT4530_10998C.1
ccgacttggcacgtcgttgccggtgctcgtcgcttcctcgccctgtgccgccgaggccatcctgcgcacgcatgacgacgtgttcgcgtcgcggccacgcaccgttctagcggatatcatcttctacggctcgcgcgacattggcttcgcaccgtatggcgaggattggcggcaggcaaggaagcttgtgaacacgcacctgctgagtgtcaacaaggtgcagtcgctatggcttgcccgtgaggaggaggtgaaaattgtgatggagaagataagcaaagcggcattcgcacgtgaagcagtggatataggccagattctttgctcattcacaaacgatctcgcatgccgtgttgtgtcaaggaagttagtcggggatgacaggcagaaaaagctcctccaagagttggttaataagacaataaagctgctttctatcttcaacggggaggagtacttttcaat

SEQ ID NO: 4083 - DNA, 235 bp, Oryza sativa
  Clone ID: PAT_MRT4530_10999C.1
tagaagctgtgtacaaagtagtgctcatgatattagacggtggagatgttactagaaatgaaattggaatcattacaccatacaatgcacaagtcaaaaaaatttatgaaaaatttcaacaaagtaacatcaagaatattgaaattaagtcagtggatgcattccaaggtcgtgaaaaagaagtgatcattttcagttctgtggttactaaaggtacaggacaattcttgaaaga

SEQ ID NO: 4084 - DNA, 480 bp, Oryza sativa
  Clone ID: PAT_MRT4530_1099C.1
atgcggggcccaccggtcagcggcacggggaggagagaggaggcgtcggcccgcgggcccaccggtcagcggcacggggagggcggtctaccgtggaccgggaccacgcgggtgatccaccgccgatccacgggaccgacggcccggatcgccctcgggccgatcggacggacggcggcggcggcagcccccgggctcggatcggcatcaaagccgatcggccgacccggggctagcggcggcgcggacggcggcaacgacccaaagcgacggcgagcgcgggcggcggcgacgcacggggaaatggggaaggagaggagaggagatgcctcaccgagggggttaaacccaccggagcgcgaggagacgggtgttccggcggcgaacctcgacgggggaggggcggccgaggtagatctcgaccccgcgaacccgacggcgacgacggcgcggtgcggcggcgaccctagcggcggctag

SEQ ID NO: 4085 - DNA, 1626 bp, Oryza sativa
  Clone ID: PAT_MRT4530_109C.1
atggcccatcgtaagcccaccaaggccggatcgaccggcgaagaccccggtaaccttggcgtagggtggtcgtgctttcttggcaagtcccttgtcaaggaggccgacttggccgatttcatctcctctggcattctagccgagggccaggcggattgtgggggtgaagccgttgtcccctcgcctggcaacagtttcgaacctaccgccgagctgttcgccatcttgttcacggcgtgcgctacaactaaagatgtgaatacgccggtcgggccaagaaaaacggttttcagctgcgtcaacttcatgcttcggccggaacgctcggatgcctggccggtacttgcgtctatggcgaaatgggaacgaaactggatgcagaaatggttctacatcaacaatccctaccccgccgaggacattaaggcgaactggcttcgtttccggcgtcttgcagtttccatcgtcgcgaagccgaacgtggagatcgacggtacccttgagtcccggctcatcctccttcgcaaagttgtgcggcagttaagtacccgcgatctttttcgcatgttggaggacgctgaagcggaggcgtcgaagatggtttggggcctaactacggctgaattcgcccacctgctttcacgccagcttgacggccgggacgcggctgaagttgatgccgacgaggaggaagacgacgatagggaggccgagtccgaagaggacgacgggtcgcatggctatacgcccagtccagcacaaccgaagtctggggcgggttcccatgtttcgtccattcatccacaaaacgttgttggcgcgaagaccctcctggcgatttctagctctacggcgaagccagggtcgatcgcccggaagaagaagaagaagggtggggtggtgcaggtcgctcccggcttttcagttagcgaggggtctgatgggacacccactttgccagcccagcgatttggtttctcttatctagggccttgcggcgcacttaagtgcgaaaaagtccgccttggagaggctggatgggtaccggcttcgaccgctgaaaatcgaggaggatcttcgccacaaggaggacgaaagacacgtcgtgcggacaacttaaaaaagtcgaatgcagagaataagtctctcacgggcgaaaacaagtctctccatgccgacctggaggcggcgaacaagcgggacgctgaacgagatcgtcaacttgctatggccgaagagaagatcaagtcccttgaggctcgtcttgtctcggccgaagctgctactgcaactcaggcgccggtgacggagtccgccaaacaagccggctacaccctcaggctagctctcaacaacctcggcgcgcacggggaaggcgctccgagtgacgacgggacggcattcgacttctccgagttgacgcaggaagcggccggcttggtcgtcgaagtggccagtgcctacggagactgctgtgcacatgtttcggcgggcttcgttcttagcctcctgcacgcgcacggctgtgaccatatcggggatttccctgacctcgtgaaagaggattggcccgacaactcgcagtgctccggggcggccttgagggccttccgaatgggtttatga

SEQ ID NO: 4086 - DNA, 197 bp, Oryza sativa
  Clone ID: PAT_MRT4530_10C.1
atgacatcgtaaagaatctgagacccaaaatctctaccccgtttagctccttcaaactggacagaaatccaagatataggaatgcggggaatttcatgagattatcagactttctggacttcacaaaggataaggatttatcaggaattatgatcagcgtggagcatgctgcttttgtggcggaggaacttgggttt

SEQ ID NO: 4087 - DNA, 1977 bp, Oryza sativa
  Clone ID: PAT_MRT4530_11000C.1
atggctgcacgaacatggttgtggttgctactgtcccctctcatcctcctactgctgcactatgctctggccctgctaactgcacgccgagcgaggaagaaccccttgccaccttcacctccagccttgccattcatcgggcacctccacctcatcggcgccctccctcacgtctccctctgctgcctcgccacgaagcatgcgcccgacctcatgttcctccgacttggcacgtcgttgccggtgctcgtcgcttcctcgccctgtgccgccgaggccatcctgcgcacgcatgacgacgtgttcgcgtcgcggccacgcaccgttctagcggatatcatcttctacggctcgcgcgacattggcttcgcaccgtatggcgaggattggcggcaggcaaggaagcttgtgaacacgcacctgctgagtgtcaacaaggtgcagtcgctatggcttgcccgtgaggaggagtcaaacttgaaacaattggacgttgaccaaagtcaaaacgacttagtgaaaattgtgatggagaagataagcaaagcggcattcgcacgtgaagcagtggatataggccagattctttgctcattcacaaacgatctcgcatgccgtgttgtgtcaaggaagttagtcggggatgacaggcagaaaaagctcctccaagagttggttaataagacaataaagctgctttctatcttcaacgtggaggagtacttttcaattttagctcggattggcgtgattgggaaggtgatgtgcgcaagagctgagaggttgaaaaagaagtgggacatgctgctgaaaaagctgatcgccgaccatgagagcaagtgcgattcatacttagtatgtggccgtaacaaagatgactttgtggacattttactgtctgttaggaaggagtatggtctcaccgaagaacatgtcaaagctattcttgagggtcatcttaagtttgatcttcaccaaattataaaccaacaggacgtctttattgcgggaacacagtcgtctgctcgggtgatcgaattcacctttgctgagctcatgcggaagccacacatgctcaagaaggtgcaggatgaggtgagggcttgcattcccaatggacaagcaattgttagtgaagttcaagttaacaacatgacttacctgagagcagttgtgaaggaggtactaaggctgcaccctgtggcaccactccttgcgacacacgtctccatggctgactgcaacatcaatgggtatatgatcccttcagggatgcgtgtcttggtcaacgcctgggccattggtagggacgaacgcttctggtatgatccagagaagttcatgccagaaaggtttgttgaaagtgtgaatggttctgccactgcgtcagtcaacttttgggtgaataactatcaatacttgccatttggttctggaaggagaatgtgcctcgggatgaactttgccatggcagttatcgagatcacactagcgaaccttctctggaaatttgattgggcgctgcctgcacatgcaatggaggttgatatgtcagaagagtttgggttgtcggtgcgtctgaaagaaaagctattgttggttccaaagcaacatgtgtagctgctagcaagtactcgaaggaattgaattgtccaactttaatgtgagaaagtctaccatgacctatgggggtctacactaatgttaacctctggacaaagtcattatacaccgtttctctatgcttcaacccttggaggatccaattcttatcacaaaatatgtgtgtaacaagtaataatttttgcatggttgtcgatgcttaatctgtttgtttgtttactttgtgtatgcagtggtgtatgatcagtttggttaactgcctagccatttgtaataattaatgtttcagctaataccttcatatattttagaatattgattggtgacataataaacttgataaaatagtaaccc

SEQ ID NO: 4088 - DNA, 275 bp, Oryza sativa
  Clone ID: PAT_MRT4530_11001C.1
gaaacacagcccctaataatggggcacctaaatcaaaacgggcaataaatataaagatttagtttatcaaagccaccttccattaccaggttttatcaaccagaggggcctcaggcttgcaaaaatatttatcacccctacaagggtggggctgcgcccaattttttacttggagtatttcgaacaagcaaagcacccaagcttgcccatttaccagggtctccaaaaaagctaattggctattgatctatatcacacaagcgacgggagctgat

SEQ ID NO: 4089 - DNA, 269 bp, Oryza sativa
  Clone ID: PAT_MRT4530_11002C.1
gttataaattcaaaagaacaatacggacagtcaaagagtatccatatgtatatttgctgactgacacatgaaagcgctacacattaagcaacccaacagagtcatacgcacagccagctttagtagcctagtgaccagtagttggagacctaagataacctagccagtagcagacaccacctgtccaattggggatgtccacgtttcttaactcgggggaggctcgactgcacccacttcatatcctctgttcggctggaggggaacac

SEQ ID NO: 4090 - DNA, 216 bp, Oryza sativa
  Clone ID: PAT_MRT4530_11003C.1
atgagagcgaagtcaattgttgcaacacaaaatcgaaaaggttacaaggatgtcacacaaggcgacagggtggtgaccggatccggcaatgctagccatcggagatggagaaggctcagtagcatggggaaaggtcattatcaaaattgtagaagaagacatttactcgagtatggaatcgatcaagaaaagagctgggagggtagaagggaatag

SEQ ID NO: 4091 - DNA, 319 bp, Oryza sativa
  Clone ID: PAT_MRT4530_11004C.1
cggagcggcggcatggcggcgcggctgcggcttggcgcggcttcgtcggcactgccagcgcgacgtcgtggctagtggcggccgcatcgaggtcagagtcggcatcgtcggcgcggcggagtcgtgttcggccgcgacgacgtcggcggcggcgtcggcaacgaggcggccggcggcgagatgcggcggcggcggaggcagcgatgacgacgcgcgcgaagcaacggcgagatacgacggcggcgtcggtgcggggatgccctatggagtggcggcgaaggagaagccgagagagatcaatcggggaaaaaacttctaa

SEQ ID NO: 4092 - DNA, 164 bp, Oryza sativa
  Clone ID: PAT_MRT4530_11005C.1
cctacgcagccaccagccgtgccgcacctccgtgcctccttgcgtcccagtcgccgccgctgcagccacacttccagccgccgctgccgccaggcggtgtcaccaacgacgactgcgctgtcatcggagccctcgccttgggcagagcgggcaagtggttctag

SEQ ID NO: 4093 - DNA, 336 bp, Oryza sativa
  Clone ID: PAT_MRT4530_11006C.1
atggctggcagccacctgcacctctcatccaattcgccagccaactccaccgtcagccgcaatcacctcctattgggctacaactcactgacaacactcccaccacctttgccggccaccatcctgcccaccgacatcgcccccaccacctctgctgaccacctacacctccaactccaaaaattggcctcccccaactccatcgagccttccggaaccaggaaggtgacgactagattgctgacgcccctcacctccggccttcttcctcgcgccgcctccaacttgctgctgctgctgcttcgccgccgtcgctctccaactcaagccttctag

SEQ ID NO: 4094 - DNA, 308 bp, Oryza sativa
  unsure (1)..(308): unsure at all n locations
  Clone ID: PAT_MRT4530_11007C.1
ccattgaaatacagcatatatatctatacggagacatttcaaatacaacatattccaacggcactgcaatngacaaaccacatacattacacttactacaaggaagaacaggtttcatatatatcatactttacaaatccaagggggggtttgaatcaattacataacttcaactcattaacacctactgaaatttgagccaatcaatcatgattccccaaagcatacaattctctacttaaaaacaacaccatatatttgtcacctttgatcacaatgtctcaaaaactgagcatgttggctgcact

SEQ ID NO: 4095 - DNA, 1592 bp, Oryza sativa
  Clone ID: PAT_MRT4530_11008C.1
cacgcgcgcgcgccatcatgcctgtagcctccgtcgtgctcctcctccacctcctctccatggcggcggcggctacggcggcgctggccatggaccccgccgagagggagacgctgctgctcgtcatggaggccgtctcctccgaccgcgagtggcgctccgtcggccctgacccgtgcggctccccgtggcccggcctcgagtgcaagcctgtgccggccgccgggaacgtgtcgtcggcggcggcgaggctgcacgtcacgcggctggacttcggggtggcgccgaacccgacgtgcaaggacggcgcggcgttcccgcacctcgcgttcgcgtccctgccgcacctccagtcgctgttcctcgtcgactgcttcaagaacccggcggccaccacggcgttcgtgctgccgccctcggccaacctctcgtcctccagcctgcagcagctcagcatcagggccaacccgtccctgtccggcgtgatgccgccgcagctgtccagcatccggtcgctccaggtgctcaccatctcccagaacggattgatccgcggcgagatcccgcagggcatcggcgagctcacgtcgctggtgcacctcgacctcagctacaactcgctcaccggcacgatcccgagccgcatcggcgagctccggagcttggtcggcctcgacctcagctacaactccttctccggctccatcccgggccagctcggcgacctcgccatgcttcagaagctggacctgagctccaacaacctcaccggcggcgtcccggccaccatcaccgggctgacatctctcaccttcttggcattgagcaacaatggcctaagcggccacctcccggccggcctctccgacctccttgacctccagtacctgatcatggagaacaacccgatgggcgtcccgttgccgtcggagctcggcgacattgcgcggctgcaggagctccggctggccaactccggctactcggggtcgatcccggagacgctcggccggctggcgagcctgacgacgctgtcgctggagaacaacaacctcaccgggaggatccccgccgggctgagccggctcaagcggatgtaccacctcaacctgagcaagaacgggctggacggcgtcgtgccgttcgacggcgcgttcctcaggcgcctcggccggaacctcgacctcagcggcaacccggggctgtgcgtcgacggccgcgccgtcttgcaggccgacgtcggcgtcggcgtctgccgccgcgccggcgacggcggggacatcgcctccgtgtccgccgccaccgacgtactatcagttggcacattgttcaggcgagatggacaactctggctcgccggcggccgctgccttatggtaactggctgtgatttgtgcgtggccgatctggccataaatccggctgcgcctgcaatttgcaagcagttttcaggcactctgcagcctgagctctgccctgcttttcattgcttgccgctgtataatccaatgagtgttatgcccctcattgccttaagtaagggaaccagatgcagtggtcaggtgatcatgtactccagcgttgatgtctga

SEQ ID NO: 4096 - DNA, 507 bp, Oryza sativa
  unsure (1)..(507): unsure at all n locations
  Clone ID: PAT_MRT4530_11009C.1
nnnnnnnnnnnnnnnnnnnnnnnnnnnnnnnnnnnnnnnnnatttttttttttttttactatagtcagaatcttgttttattttactgagtcaggcatgtacagagtttctgatgcgcacaggtgaatcttgggctgaagaatagcctagttaatatatatacattgacagatggccactaatttctggagctggtgttcatggagatggcctggccaagtattgcagccattcttcaggcaacccttggctcctcttgagcgtcctgaatgcagcttttgtcaagggtactgcaagaatgtcaaattcctttggcgccttggggaccttgagtagcttcatgtttgcttgctccactgtcttctggcccttcctggagttgcatcttgagcatgcagtcaccagattttcccattcccattttccgccacgtgcagtcggaatgacatgatcaatcgttaggttatcaacagaagaacaatactggcaagtaaatccatccctgta

SEQ ID NO: 4097 - DNA, 1163 bp, Oryza sativa
  Clone ID: PAT_MRT4530_1100C.1
atgtcgcagtgcagagcattgtcgaagaggatgcagtggcgagtggcgttgcaggaagtagttgttgcagccaagagaaagcgcgcaaaagcactacccaaaaacttgatcacccccctacccgtacaggtacacaagcgagtggagtttcagaggcttgctcatcctgagcacccgtgtgcgcagttaacggatacaagagggagaggggcgacaaaagcggatgcagaggtgaggaggggcggggtccgagttctctatctggagatagaaccatctcgtccgccacttgctgcgagaagaggggcactggaaggggatgtaacgcgacttcaggccatcccgaagtcggaacccgacgtatccagataccctgttggattccatccaacgcagctcgtaataaaaacggaagaggtcaaggaagggcactaccccaaatgtaggccttgcaaagacgagggaagatgcccagaaaagcgatggagttgggtttcaagtgaagcaaagaaaggccgtagaaattcaagacaagaagaagaaactcggaaggcggaggaagtaaaccgcaagaaacataatcttcgactacaaccatgggcccaagatgggttcaggttttgtatctccagcctccctctgcatggtcccgtgtccggggagggcaccgtcgtcctgcagcttcttcatggacacggtgttcgaggaagacttctcaaggtccattgccgccggaggatcgccggagaacaggatgaaggaagtgagctaggtttctctttgcgaggagcggagaagacgaagagcgctagaaggcaggagagttttctggcaaacggacttcaaatggatccccaaaatccctttaaataaacgcacttccaatggtgcgtattccaaggaaaggagagagattgctgccagaaaattatgggtacgttgcggacggtggtttttcagacttcaatttaaattcgctcatgaccgttgaacttcgcgcggcgttgtcgatgactctttgtctctacggttttcacaccgggatcgaccagatgataacgacaacaattccgacatcagaagtcgcgattgataacatgagctcatttaagcagaagtcgggggctactgtttgggttacggataagagccggagcgcgtag

SEQ ID NO: 4098 - DNA, 991 bp, Oryza sativa
  Clone ID: PAT_MRT4530_11010C.1
agcctccaatggtggtagaacattttcaaggctcaggggcaagtgatggtggatggatagcaaaaatcgctgctttacttgttggggaggatccgtcgcagtcgtacgctttgatatgtggaaactgtcatatgcataatggcttggccaggaaagaagattacccgcacattacctactactgcccccattgtcatgcgctgaacacatcaaagcaatctttggggcaacattctggctccaattcaggacggtcgacaccagttgctcctgctgatggaatatctgctagcagttcagtagtagagagtgaagtgagtaacatgactacaattcaggagctgaaaaatgaagaaaataccgagaagcaagaagtgcaagcaagttgatcggtcataaacttatactgctggtctgtgtgaaaattagcacatctatttggtgtatattgccgtattcaactggtttgaaccacagatgtagcactgctgtaaattggtaatagtgcctgatatgatccacctacagaggccgagtacaaaattttgagtcaccatctttacatccttggatgtatgaattttgttgtcaatagggtgggggacaaacgactacctgatgtctgacaatgtgagatttaaaagctagcggatggagccaagcagttcagttgggcatgaagcatggtgttggtctaaaacttagacacaatcaatcccccatatctgtttacccgtgctttatttgcagttgcaccttcggagatgaggaattttgagttctgttagtttctgaaccttgacgattaccatttccctgagatgtctgtaacttgcagcatttcgtctgcaactattggtttcttttgagtagtgaaaagtgacaaccacaccatttttttttaaaaaaaaaaaaaaaaaaaaaaaaaaaaaaaaaaaaaaaaaaaaaaaaaaaaaaaaaaaaatactcgagactagttctctcctcgtgc

SEQ ID NO: 4099 - DNA, 860 bp, Oryza sativa
  Clone ID: PAT_MRT4530_11011C.1
atggccaagcgtctcttccactcgtgccgctccccctccgtggcggacgccgtggtcacctccaccactaccctcctcgccaccgaccacccacctttcttcccgggcagctgcccgcgccgtgttccccgccgccgaccacagcagccgcctccgggtgcatgtgccgctggctatgcggccgacgacctcacaccggcgcgcgggacgcctgcgtaccgctggcttaagagctcgcagtggcacgtcatcgaggccgccgggatcaccgacgacgaccacacgcctcgcctcaagatcgacgcgcggagccggctgcggcgctctcgccgccgcctgcaccgtcgggcggaccccgtcagcgggtcgtcgggggacagcggatggttcaccagcgacgaggactcgtacgcgaacagctgcggcgtcggcgtcggcggcggcgaggccgagacgctggtgacgtcgaccaccacggagtcttcgtccggcgcgagcgggaactgcggcggcagcggcgaggtggacggcgtagtggtggccgggagcttcgcggtggtgaagcgctccgacgacccccgcgccgacttccgcaggtccatggccgagatggtggtggggcgcgccatctacgacgccgacggcctcgagcgcctcctgcggtgcttcctggcgctcaaccaccagcgccaccgccgcgacatcgtcgccgccttcggcgatgtgtgggaggccgtcttctccaacccgacgtcgtcgcagcgccgcattgtcacatccgactctgcgatctgcaaggctgcagcgaccgtgtcaaaccgtcggtaggaaaacaaacatgcatgtgatacgtatagcaa

SEQ ID NO: 4100 - DNA, 3856 bp, Oryza sativa
  Clone ID: PAT_MRT4530_11012C.1
gtcccccttgtctcccaaaccctctctccttcccctcgcttccgcctccggccgccgccgccgccgccgcgaggccaccgcctgctgctgcagcggcctacccttgcgtcggtgcaagacggcgccctgcggcttcggttgcggggtgggtggtggcgttgcgggaggaggaggagggaggcgggcggggtccaagctgaggcggctcgtgaggtccatggcggtggcgccgccgctgccgccggcaccggcgcggcagctacggcggtggaaggggtcttcgccgcggccgccgccgtggctgtcctctcccttccgccgcacccgatacttgtcgcgcccggccttcgccgcgggaggaaggcaagattattctcctagttcaggcatgggggttagcaaaaccggtgctttcaggcttggattgtatggcaacttaaatgtacaaagtagtgtgcaagaatgggttgatgaaaccaagaggttatttttcctcaggaccacaaacagtgtcagaaacaacatcactaatggcactactcctctgcgggttggaaatctgcgtcatgatccctcagaagatatcaggagttcaaactatccttccttgtataatcaaagagaaagaggaccatctaattcaattgtaaatagacatgtcgatacagatttggctaagcatcgtgtgatgtatcagtcagcacatgctgtgcctgccccattcagtgttgttaataatgatatcaaaccactgaacatgcttgatggctccaaggaggaaattccttggcacgattccgttacgatggaatcttctctgcctaaagtttccaagtcagagaaaacttggtggttgataaagctatcccagacaaaaaggagcacaaacgcattacaagggaaggtgacgccaaatttcccggacaaagcttccttgtccactgagtcaaaaaatgcacggaagttgcttgctaccatctatgacaaagttttggttgtcgacaatgttgagtcagctaggagtgttgttaaattgcttactacaaagtacaaaggctttattcatgcatgtgacacggaggtggcaaatattgatgtcaaagaagagacaccagttggtcacggagaagtaatatgctttagcatctgttcaggaaattctgatggggaggctgattttggaaatggtaaaacatgcatatgggtggatgtgctagatggtggaagggatgttctaatggagtttgctcctttctttgaggacccatttatcaaaaaggtttggcataactatagttttgatatccatgtcattgagaactgtggaatcaaggttgctggatttcatgctgatacgatgcatcttgcacgcctgtgggattcttccaggagaactgatggtggatattcacttgaaggactaacaaatgattacagagtcatggatgctgttctaaaggacatacctaaaactgggaaggtgtcaatgaaaactatctttggccggaaaaaggttagaaaagatggatctgaagggaaaaccatatctatcgagccagtcgaaaagttacaaagggaggatagagagttgtggatttgctattcctcactagattcaatgagtacattgaagctttatgaaagcttgaaaaacaagcttgaagcaaaggaatggattttcgatgattgtcctagaggaacaatgtatgatttctacgaagagtattggcgtccctttggtgctcttcttgtaaagatggaaacagagggagtgcttgttgaccgtgcatacctttcggagattgagaaagctgctgttactgaacgagaattagcagcggataagtttcggaaatgggcatctaagcattgtcctgatgccaagtacatgaatgtgaatagtgataatcaaattcgccaacttttctttggtggcatcgaaaatagaaataagcgtggtgaaacttggccacatagtattacttttatagtgcctagtgatgaaggcatagctacagagggcaagaagactccaaagtctcgcacaatcaaacttttcactattgtggaagatcttaaaattgatatgtctcgcactatcaaactttccactgttggcggggatgttttaaggagtttggctgggggcaagaagactactaagataggcagacttaatgtccgtgaagacgttgatgagggtcaagagtttgatgaagatgggagcagtttggaacttcctgagcaggatatagaagacatcttccccatatggaactgcatatgaagcgtttggtggaggaaagaagggaagggaagcatgtcatgccattgctgctctatgtgaagtcttttctattgacaagttgatatccggcttcattgttccattgcagggagatcgtatatcatgcaatggaagggcgcattcactgttcattaaatatcaatactgaaacaggacgcttgtcagcaagaacaccaaacttacagaatcaacctgttcttgaaaaggataggtacaagattcgccatgcttttgtcgcagctccagggaacactcttattgttgctgattatggccaactggaactgaggatcttggcgcatcttactaattgtaaaagcatgctggaagctttcaaggctggtggtgacttccattctaggacagccatgaatatgtaccagcatgttcgtgatgctgttgaagaaaagaaagttctgcttgaatggcatcctcaaccaggtcaagacaaacccccagtgccattattgaaggatgcttttggcgctgagaggaggaaggccaaaatgcttaatttctccattgcatatgggaagactgctgttggtctatcttgggattggaaggtttctgttagggaagcaagggatacactcaaactttggtatagggatagaaaggaagtttcagcttggcaaaagaagcagaaagcctttgcgcttgaaaagtgcgaagtctacactttgctcgggcgatcacgccaatttcctaatatgactcatgcgggtcctggtcaaaagggtcacgtcgagcgtgctgctataaatgcaccagtgcagggcagtgcagcagatgttgctatgtgtgcaatgcttgagatagaaagaaacgctcgccttaaggagcttggttggagactcctattgcaggtatcatatttaagagctacgttttgtgttctttcagagtattttattttgatccccagaatgaatttgtacattgcatgatgaagtaatcttggaggggcctacagaatctgccgaggaagccaaggccatcgttgtggagtgcatgtccaagcctttctatggaaccaacatcctcaaggtcgacctagctgtcgacgccaagtacgcgaagagctggtatgctgccaagtagaatccgcactcagttcttctgccctatacatagccagatgaacacatttgtctgccccaaagttaggcgacaccaaagttatgtgtcgccgatgcgatgaagactctgcccatccgtcctgacgaaatacagcggactgaaccagcacagatagagatgcaagccgctcaagaagttgaagtgccacccccatcacccacaggaacacaagaccacacgtccattttttcggtggcagaggcagagcatccaacgagagccgaataggctgaagactctttcactggcagtagctgaatgtacagaagtagcctgtccgatagttagatttggatttgactgtagggaccacagtagatactgacctgtatgagactttcagatacttgatcatgaaggagtgcacgacagaagcatgctgtcttcaaaaaaaaaaaaaaaaaa

SEQ ID NO: 4101 - DNA, 3276 bp, Oryza sativa
  Clone ID: PAT_MRT4530_11013C.1
atggcggtggcgccgccgctgccgccggcaccggcgcggttgctccggcggtggcaggggtcgtcgccgtggctgtcctcttccttcggccgcacccgctacttttcgcgcccggccttcgccgcgggaggaaggcaagattattctcctagttctggcatgggggttagcaaaactggtgctttcaggctgggattgcatggcaacttaaatgtacaaagtagcgtgcaagaatgggttgatgaaaccaagaggttatttttcctcaggaccaccaacaatgtcaggaacaacatcactaatggcactactcctctgcgggttggaaatctgcgtcatgatccctcagaagatatcaggagttcaaactatccttccttgtataatcaaagagaaagagggccatctaattcaattgtaaatagacatgtcgatacagatttggctaagcatcgtgtgatgtatcagtcagcacatgctgtgcctgccccattcagtgttgctaataatgatatcaaaccactgaacctgcttgatggctccaaggaggaaattccttggcacgattccgttacggtggaatcttctctgcctaaagtttccaagtcagagacaactttggtggttgataaagctatcccaaacaaaaaggagcacaaacgcattacaaggaaagtgacgctaaatatcccggacaaagcttccttgtccactgagtcaaaaaatgcacggaagttgcttgctaccatctatgacaaagttttggttgtcgacaatgttgagtcagctaggagtgttgttaaattgcttactacaaagtacaaaggctttattcatgcatgtgacacggaggtggcaaatattgatgtcaaagaagagacgccagttggtcatggagaagtaatatgctttagcatctattcaggaaattctgatggggaggctgattttggaaatggcaaaacatgcatatgggtggatgtgctagatggtggaagggatgttctaatggagtttgctcctttctttgaggacccatctatcaaaaagatctgtgaggctagaaataaatgtaggtctatggaaagtcaaatctgcacacaggtgtaccaggtttggcataactatagttttgatagccatgtcattgagaactgtggaatcaaggttgctggatttcatgctgatacaatgcatcttgcacgcctgtgggattcttccaggagagctgatggtggatattcacttgaaggactaacaaatgatcacagaatcatgaatgctgttctaaaggacatacataaaactgggaaggtgtcaatgaaaactatttttggtcggaaaaatgttagaaaaaatggatctgaagggaaaaccatatctatcgagccagtcaaaaagttacaaagggaggatagagagttgtggatttgctattcctcactagattcaatgagtacattgaagctttatgaaagcttgaaaaacaagcttgaagcaaaggaatggattttcgatggttgtcctagaggaacaatgtatgatttctacgaagagtattggcgtccctttggtgctcttcttgtaaagatggaaacagagggaatgtttgttgaccgtgcatacctttcggagattgagaaaactgctgttgttgaacgaaaattagcagcggataagtttcggaaatgggcatctaagcattgtcctgatgccaagtacatgaatgtgaatagtgataatcaaattcgccaacttttctttggtggcatcaaaaatagaaataagcctggtgaaacttggccacaaagtaaagcttttaaagtgccaaatgatgaaagcatagctacagagggcaagaagattccaaagtctcgcacaatcaaacttttcactattgtggaagatcttaaacttttcactacagagggcaagaagactacaaagactggctggcttaaagtccgtggggacgttttatggagtttggctggtaaaatacccacagatcatatatataaaattgatgatgatggccaagagtttgatgaagatgggagcagtgtggaacttcctgagcaggatatagaagacacttccccatatggaactgcatatgaagcgtttggtggaggaaagaagggaagggaagcatgtcatgccattgctgctctatgtgaagtcttttctattgacaaattgatatccggcttcattgttccattgcagggagatcatatatcatgtaaggaagggcgcattcactgttcgttaaatatcaatactgaaacaggacgcttgtcagcaagaacaccaagcttgcagaatcaacctgctcttgaaaaggataggtacaagattcgccaagcttttgtcgcagctccagggaacactcttattgttgctgattatggccaactggaactgaggatcttggcgcatcttactaattgtaaaagcatgctggaagctttcaaggctggtggtgactttcattctaggacagccatgaatatgtaccagcatgttcgtgatgctgttgaagaaaagaaagttctgcttgaatggcatcctcaaccaggtcaagacaaacccccagtgccattattgaaggatgcttttggcgctgagaggaggaaggccaaaatgctcaatttctccattgcatatgggaagactgctgttggtctatctcaggattggaatgttgaagttagggaagcaagggatacactcaaactttggcatagggatagaaaggaaatttcagcttggcaaaagaagcagaaagcccttgcgtttgagaagtgcgaagtctacactttgctcgggcgatcacgccaatttcctaatatgactcatgcgggtcctggtcaaaagagtcacgtcgagcgtgctgctataaatgcaccagtgcagggcagtgcagcagatgttgctatgtgtgcaatgcttgagatagaaagaaacgctcgccttaaggagcttggttggagactcctattgcaggtttatgacaataacactcctacgtttacaaaaggaaagtattttattttgatccccagaatgaatttgtacattgtcctcaaatgttatgtctgcatctgccaggtgcatgatgaagtgatcttggaagggcctacagaatctgccgaggaggccaaggccatcgttgtggagtgcatgtccaagcctttctatggaaccaacatcctcaaggttgacctagctgtcgacgccaagtacgcgaagagctggtatgctgccaagtag

SEQ ID NO: 4102 - DNA, 3471 bp, Oryza sativa
  Clone ID: PAT_MRT4530_11014C.1
atggcggtggcgccgccgctgccgccggcaccggcgcggcagctacggcggtggaaggggtcttcgccgcggccgccgccgtggctgtcctctcccttccgccgcacccgctacttgtcgcgcccggccttcgccgcgggaggaaggcaagattattctcctagttcaggcatgggggttagcaaaaccggtgctttcaggcttggattgtatggcaacttaaatgtacaaagtagtgtgcaagaatgggttgatgaaaccaagaggttatttttcctcaggaccacaaacagtgtcagaaacaacatcactaatggcactactcctctgcgggttggaaatctgcgtcatgatccctcagaagatatcaggagttcaaactatccttccttgtataatcaaagagaaagaggaccatctaattcaattgtaaatagacatgtcgatacagatttggctaagcatcgtgtgatgtatcagtcagcacatgctgtgcctgccccattcagtgttgttaataatgatatcaaaccactgaacatgcttgatggctccaaggaggaaattccttggcacgattccgttacgatggaatcttctctgcctaaagtttccaagtcagagaaaactttggtggttgataaagctatcccagacaaaaaggagcacaaacgcattacaaggaaggtgacgccaaatttcccggacaaagcttccttgtccactgagtcaaaaaatgcacggaagttgcttgctaccatctatgacaaagttttggttgtcgacaatgttgagtcagctaggagtgttgttaaattgcttactacaaagtacaaaggctttattcatgcatgtgacacggaggtggcaaatattgatgtcaaagaagagacaccagttggtcacggagaagtaatatgctttagcatctgttcaggaaattctgatggggaggctgattttggaaatggtaaaacatgcatatgggtggatgtgctagatggtggaagggatgttctaatggagtttgctcctttctttgaggacccatttatcaaaaaggtttggcataactatagttttgatatccatgtcattgagaactgtggaatcaaggttgctggatttcatgctgatacgatgcatcttgcacgcctgtgggattcttccaggagaactgatggtggatattcacttgaaggactaacaaatgattacagagtcatggatgctgttctaaaggacatacctaaaactgggaaggtgtcaatgaaaactatctttggccggaaaaaggttagaaaagatggatctgaagggaaaaccatatctatcgagccagtcgaaaagttacaaagggaggatagagagttgtggatttgctattcctcactagattcaatgagtacattgaagctttatgaaagcttgaaaaacaagcttgaagcaaaggaatggattttcgatgattgtcctagaggaacaatgtatgatttctacgaagagtattggcgtccctttggtgctcttcttgtaaagatggaaacagagggagtgcttgttgaccgtgcatacctttcggagattgagaaagctgctgttactgaacgagaattagcagcggataagtttcggaaatgggcatctaagcattgtcctgatgccaagtacatgaatgtgaatagtgataatcaaattcgccaacttttctttggtggcatcgaaaatagaaataagcgtggtgaaacttggccacaaagtaaaacttttaaagtgccaaatgatgaaggcatagctacagagggcaagaagactccaaagtctcgcacaatcaaacttttcactattgtggaagatcttaaacttttcactacagagggcaagaagactacaaagactggctggcttaaagtccggggggaggttttatggagtttggctggtaaaatacccacagatcatatatataaaattgatgatgatggccaagagtttgatgaagatgggagcagtgtggaacttcctgagcaggatatagaagacacttccccatatggaactgcatatgaagcgtttggtggaggaaagaagggaagggaagcatgtcatgccattgctgctctatgtgaagtcttttctattgacaaattgatatccggcttcattgttccattgcagggagatcgtatatcatgcaaggaagggcgcattcactgttcattaaatatcaatactgaaacaggacgcttgtcagcaagaacaccaaacttacagaatcaacctgctcttgaaaaggataggtacaagattcgccatgcttttgtcgcagctccagggaacactcttattgttgctgattatggccaactggaactgaggatcttggcgcatcttactaattgtaaaagcatgctggaagctttcaaggctggtggtgacttccattctaggacagccatgaatatgtaccagcatgttcgtgatgctgttgaaaaaaagaaagttctgcttgaatggcatcctcaaccaggtcaagacaaacccccagtgccattattgaaggatgcttttggcgctgagaggaggaaggccaaaatgcttaatttctccattgcatatgggaagactgctgttggtctatcttgggattggaaggtttctgttagggaagcaagggatacactcaaactttggtatagggatagaaaggaagtttcagcttggcaaaagaagcagaaagcctttgcgcttgaaaagtgcgaagtctacactttgctcgggcgatcacgccaatttcctaatatgactcatgcgggtcctggtcaaaagggtcacgtcgagcgtgctgctataaatgcaccagtgcagggcagtgcagcagatgttgctatgtgtgcaatgcttgagatagaaagaaacgctcgccttaaggagcttggttggagactcctattgcaggtttatgacaataacactcctacgtttacaaaagaaaagtattttattttgatccccagaatgaatttgtacattgtcctcaaatgttatgtctgcatctgccaggtgcatgatgaagtgatcttggaagggcctacagaatctgccgaggaggccaaggccatcgttgtggagtgcatgtccaagcctttctatggaaccaacatcctcaaggttgacctagctgtcgacgccaagtacgcgaagagctggcctagcattgcagttggtagaactgcttgccgaggtgtcactgtgcctgtgtcacatatatactcccgtaaccatttcttttttgtatttttgtccatactttttgtcacaatggacaaagcagggcacaccagggtttcccaaaccgccggggccgaggttaccgcgccccagcggaggttaccgcggtatttacattaccgtatccccgcggtaaggccggtaaccgcggtaaccgcgcggttaccggcggtatggtga

SEQ ID NO: 4103 - DNA, 1842 bp, Oryza sativa
  Clone ID: PAT_MRT4530_11015C.1
tttttttttttttttttttaaaggatggaaaatccaaatccaagcaatgataataagactaagcatggcaagtaatgctagttacaacatcctggaatcagttcataacatcgagatttttcagagttagcatcatcccagcctcgagttcgtcttcatgacaaaaatcccaaggggcgatccaggatcaacagcactctagcattacaggaaaacaccgctccagcttggcggctccagggtcaatgtaatgctccggctgtccggcacttcaaacatagtttaatctcacgaacatcatctcatgatcatacaaacataagtgaaatccgaaccaaaatgcagtaaacgacggtgctagttgtttatgggtgctggagccagcgagctgaggcagctcaccaccgtgaacagtgatcggatacaagccttggccatgccatgtcaccttcacttgctccccttcttcttccacaggtcgccaagcatccggataccggctcccttcctcttgccaccgaacccctcgtcgtcgcagtcgtccggcatcgtcgcgggggagccccagccgttgccattgtggccgacgaagtgggcatccccgccaatcaccgcggcggccgcctccgcggcctttcgccattgctcggtctgcacgcgcaggcgccgcatctcggcctccagcgtctcccgagcggcttccgacgccctcagctgctcgcccatgcgggcctcccgcgccgctctctccttcaggtcctgctcgaccaaggacgccttggccgccgcctcctcctcagctttcttggccgcctccgcggcttcaccaacctgcttcttgagctcggcattgtcggccgtgagtatggcgacctccatgtccttcgccatcagcttggcctttagttccgcgacctccgggttctccttctcgccggagtcaatggccgttgcgtcaatgctctcctcttcgatcatcttctttgtctcttcctcctccagttccttctcagccaaagcggcctttatgccacagctcacctcctcgccgtcctcggcgccggccgcgctctggttctccttatcccccgattcggtccggacgacctcgaacacatccgtcgcgggggagtttatgctgctctcctcctcggccggcggctccgtcaccttcagctgctgctcagtcttcttgggggtttcgaccgcaaccggagatggggagcgcggagacgccgcggcggcggaagcggggctccccttggtgccaacgcgcttcttagcctcctcgagcgcgacctgcgcgtccttcttggcggcctcggcggtggcgagctgctcccgcagcttcttgagctcgtcctgcaccttgcccagcttcgtctccagctcagccacccgcgtccccgcgcgcttcttctcatgcagcgggctgcgcggcgagtggcggtcggcgagcttggggctgctccggtcgacgactgtacggtggtgcgcgccattcgcatccgagcaggccgtcgtcttgaggtgcagcggcgcccgcggcgacgctcgctgcggcagctcggaccccctggatctcggcatgctccgccgcgagctagctaagccggcagccggcgctggttgctctgtccgtccgcccggccgcccctggtctctatcctctcgccgcgtccgtcggtcgcggcctacgatgagagcaaacgcggggaagactggctcatgagccggacctggaagagccgtgggacgacgcggggcgagcggtagcctgtgcgcggagccggcgccgtcgccggggttgtgagccacacccacatgggtcatctcgtgccg

SEQ ID NO: 4104 - DNA, 1530 bp, Oryza sativa
  Clone ID: PAT_MRT4530_11016C.1
cacattaagaagaaattaatcaaataaatgtataagctacaaagctagtactaattaatatacataaccatgcaagagcatgagataaagagacacgtacaaacatacaacaaatttatcaactagaaaaactaaacgaatcaagtttacattgcaacatacatacacatatccatagtctaatcaatgaaacctcgcactatcttgtacgatttgttttgttttttaaaaaatgtgacgacaaagaacaccggcggatgggaacggctacggcaactcgcacaatcttatacggtccattttttttaaaaaagtatgacgatatagatcaccggacagacgggaacgacgactacggcaactcgcacaatcctgtacggttcgtttaaaagtaaaaatatgacgatgcggatatcaccgggtgctgcgtcaccgttggaagcttatgatgcggtctttgtcggcgggggtggtggcggcggcggcggcggattcggcgacggggaggtggtgggcaccgaaggagcggacgtggtcgttgagggagcgcttgtgcttgaagtcggagccgcaggcgcagaaccagcgcttgccgcagttcttctcgtgcgtgcgccagtcgcccttgacggcgaagggcttggcgcagcggcggcagcggaagggcttggcgccgtgcttgcgcttgtagtgcgtctgcagggtgcggaagtccttgagcggccgcgccctcgggtgggcgacgttgttcttgcaccccgccgcgcagcagtagcacggcagcttcagcatcgccagtgtctgcgtccccttgagcgactccgggcccttgcggtactcccgcccgtgcccccacatgtgcatctgcatgttgttgtatctgttgaaggttttgttacagacatggcagatgaactgcaccgggccgacgaggatctgcgccggcgtcgggatccaataccggctgctcatcgccacgccgctctccgccccgaccccgccgaacatatcccccacggcggtgatgctgctcgacccttccaccgacgccaccgcctcgccgtactgctcttcatccccctccaccttgcaaccgccatgcataggcttccactcgtccatctcctcctcccctacgtcgtcgtcatcctcctcctcatcgtcctcctccatggtgacctcctgagcgctagatcctgtaaccggcaagccgatattcaactccacgccaggctccactaccccggctgcgtgtgcactgctcatgatctcttctttcacagggtgctcatgcctcttcgaattcccctcctcgagcatgctgagcagcggcaaacaagtcataccgctcttatgatcttcttgaatttcacctccgccatcttcaccaggtactactgtttcttgatccctggaagccatcgaggacgacgaggagaaagacgacgaccacgacgaggatgacgccggccgcggcggtggcttgagccactcgaagaaaggcgaggcggcgacgacctcaccttccat

SEQ ID NO: 4105 - DNA, 732 bp, Oryza sativa
  Clone ID: PAT_MRT4530_11017C.1
atgaacggtgcggctggaggcacggtgacgacgtcggcgctccggttcacgatgacgggctacctccggcagctcaactgggggtcgccgccacgccgagctagccgcttgctgccgccggtcatctccggccgcgccgcgccgccgcctccgtcatcgccgtcggtcgccgccaccaccgtgaggtgcacgggagcgaggagaagctcggccacccttccttttccgtcgccggtcaccggagctcgccgtccacgtgcaagccgagccgccgccatcgtccctctcgtcgccggccgtcatccgtcgtcgatcgtcgcgttggagggtaccaacgggttcgtctcgtcgtcctctacgctgtgccagactgtgaagtggcgagaagtccatgggggtcgctggggagtccatgcctctggttgtagagggggtgattatgatccaggaatggtgcactgtgcggccgggatagagctcgactttgcggagccgagggaggtggcggcgctgactggcgacggccaaggcgacggcgcacggcggctggaacagcagccaaagatagcgcattactcgctcaagcacatgccagtgatcatctcccgagttagaggtaaaccagctcaacttgctcacaacaaagcagatgtcagggtagtcgccggcgtggtggacttgctggtggaaggctctgggctcccgccaacccgttcatggcctgatgggtaa

SEQ ID NO: 4106 - DNA, 335 bp, Oryza sativa
  unsure (1)..(335): unsure at all n locations
  Clone ID: PAT_MRT4530_11018C.1
attctaaatggaggtttagtttaaattggcgggtgtttaatgcgtattattcatgatggtctctggtacctaagtgggattggctggtgggatgttttggttgcgatcgggaccatagcgtaatgtgatgaagagatggtaatgtgtttatggttgcccgttggatgtatgaggaggattaggttgggatttaattttgattaaaaacaaatcctattccgatccccctcaatcgattaatcgaacnggctcaacgcaatcaaaagttatgcaaggcatcttaagttcatgcatatgtgcaactattcactcggactccctgaacaggcatggnc

SEQ ID NO: 4107 - DNA, 347 bp, Oryza sativa
  unsure (1)..(347): unsure at all n locations
  Clone ID: PAT_MRT4530_11019C.1
ctaaattggagtggaggctactacctaattaatacgatatcctacaagaacaagatgcgcgccatggtcgtcgttcttgtgctcgccgcggccgggccgccgctgccaccacgaagaagaaggagtgcaacgacggcgacaaggccgcactgctggccatcaagttntccctcggcgacccctaccacttcgcctcctggacgcccgacaacctctgctgcgaatggtacgacgtcacctgcgacggacaccaccgaccgcgtcgtcggcctctccgtctttcaggacggcaacctcaccggcaccatccccgacggcgtggacggtcttnatccaacttcgnacct

SEQ ID NO: 4108 - DNA, 377 bp, Oryza sativa
  unsure (1)..(377): unsure at all n locations
  Clone ID: PAT_MRT4530_1101C.1
ctagagttgcanccagcatctgatntctgctacaaggaagaatcgttcactagaaccccagtggcagcatgaagcgttcacagcatgcacgctccagcaacaaaccaaggggaactaaaaattttaatggtgctaaaattttgggaatctcctgcttctgtactctcttaacttttagctgaactttggtagtacccaacttttaaccattccaattttggtaatgctagaattaaggttaggcttcatatgcttcgtatggctaatgagccaaacatatagcatcaatgctttcacttggcaaaagttgttgagcctttccaaatgcatgaagcaatccaaattgtttttattactataaaaaaaaaaaaaaaaaa

SEQ ID NO: 4109 - DNA, 328 bp, Oryza sativa
  Clone ID: PAT_MRT4530_11020C.1
agctcatatttaatctccatcacataattttgatatttactactagtactaccggattattaaatcaggaacagctgagagtcccaaaaaaggaagaaaaacaagagggagaaaaaaaaccagcaaaagcaaaagcaaagtaaagccctcacattatccatcgatccatagttccatacatatgcatcacatcaacgagtgagacaagctcaagctcctgctccttctctggtcggctcggatcggctcggctcccgttctccgcgcgcgcgcgccaacaaaaaatcacttttccctttttccaggtgacgctaattaatctcccgga

SEQ ID NO: 4110 - DNA, 107 bp, Oryza sativa
  Clone ID: PAT_MRT4530_11021C.1
tttgtggatgccggcaagagcctcctccgcgtgaccaaggactttcaccgcctactgcaaggtcctccaccgggcctcattgagcagagcctgctccggctgaggga

SEQ ID NO: 4111 - DNA, 561 bp, Oryza sativa
  Clone ID: PAT_MRT4530_11022C.1
atggcggaggaggagaacccatggaagccactgttctggtggcgggtggacgccatcaaccagagagtccgtgtcgttcgcgaagatctcgccgccgtggagcagcaactggcgtcgcgggtggacaagctctccgttgcgtcgtgcgcgggggacaagctgctcatggaggcgtccagggcgctcggcctcgccgtgtgctacatggaggcggcccggctcctcgcgcgccaccgcggcggcctcatcgcgcaggggcggattcccagtcgacacggccgcgtccacgacgacgacctcgcggtgcgccgcgctctgttctaccttcgcctagccaaagcccgagccgaggaggcgtgcgacgccctggatcgctgccgcggccacctcggggccgtcaagatgctgctgcgccgcagggaagccccggctggcgtagccgatcacgtcgacggtgagcgtgcctccgccgtcggtgacctcgaggccgcacggcaactgatggtggacaccgacgcgttcatcagcgccgccctcggcgaccgatcagacgtcgattag

SEQ ID NO: 4112 - DNA, 219 bp, Oryza sativa
  Clone ID: PAT_MRT4530_11023C.1
atggcaaggtcacagtacgtccttcaaaaacacatatttagaccgcggaacaagcgggttggtagtgccgccacgactcgtgcaagcaacgatgaaacagcgggccggagatatggaagcagccatgcatgcataagcatcagcatggaccagaccgatgcaaactgggaaagcggctggtggtgtggggtgagagttctggtgcatgactctacctag

SEQ ID NO: 4113 - DNA, 146 bp, Oryza sativa
  Clone ID: PAT_MRT4530_11024C.1
gccgcagatctggcatccccatgcccgacgtcatctccgcccccgatgctgaaaccaccggcgagacgagcgagactcgatcgaccgacgtggagaagctgaggtaaggatgctgttccggagatgactagtgagtgaacggacag

SEQ ID NO: 4114 - DNA, 221 bp, Oryza sativa
  Clone ID: PAT_MRT4530_11025C.1
acggggatactaacaaacaacggggtacagagcggggtggtgggtcacattgggcagcaaaccaatctgggttgttacacacccatgcctcaatgctaaccaggtttatcattggagcacgccactggccatagcatgttatagtctcgagctcagtacttggcatcgtctcctatcgccatggtctcaacaatgtgatccgtttgcactatttatgggct

SEQ ID NO: 4115 - DNA, 196 bp, Oryza sativa
  Clone ID: PAT_MRT4530_11026C.1
gtagtagtaaaatggctgtgagacattcgtatttcatggaattcccttgcgagaaatcttgtttcctccaggataagatttccaatggccttgtctaagaaaaatatttatataatggggggagtaattaattgtgggaaacggactagagataatctttgccacctatttgagaaggtgtcagtgaaaaaaaaaa

SEQ ID NO: 4116 - DNA, 579 bp, Oryza sativa
  Clone ID: PAT_MRT4530_11028C.1
atgtcggactccgaggagcaccacttcgagtcgaaggccgacgccggcgcctccaagacctacccgcagcaggctgggaccatccgcaaaaatggctacatagtcatcaagaaccgcccctgcaaggatcagattttggttcgtttcaccaactttggacaggggcatgtagtagtcatgggtgagctggtatattcttgctatgaattgtatagtgataaagttgttgaggtttcaacctctaaaactgggaagcacggtcacgccaagtgccactttgttgcaattgacatctttactgccaagaagctcgaagatattgtgccatcttctcacaactgtgatgtcccgcatgtgaaccgtacggagtaccagctcattgatatatctgaggatggatttgtgagtctgttaactgaaaatggcaacaccaaggatgacctcaggctccctactgatgataacctgcttagtcagatcaaggatggatttggagaagggaaggacctggtggtgactgttatgtctgccatgggagaggagcagatctgcgcgctgaaggacatcggcccgaagtaa

SEQ ID NO: 4117 - DNA, 531 bp, Oryza sativa
  Clone ID: PAT_MRT4530_11029C.1
cgggctgaggaattcggcacgaggctctgcctgcgaggagcgctgctttgccgccgtcatcgccgtcgtcaccttgccggtcgagccgctcgctgccatcagagtggtcggatctgatggtggcgagcacgtggctgtcgattgtttggcggttgatggagccaccgttgtcctcccacaagccggtatcaccattttcgcgttgtagtggacaaggggctccacggtggggacgagctcaaccttggcggattgagcgatggcgtcaacctcgccggcggcgccgataaatagaggcttgctggatctgatggcggcgaggtcgtggccgccagatccggtagcctggcggctaatggaggggctgttggtctggcggatggaggtgctcactctcctctccgtcgtgcattcacgtttaactggtgctgccgccaccaccatcgccggcacggcaaggcatccacctcctctgcaccatccccttcctcctcacacttctctgccagcctgaagcaccccatgagtatg

SEQ ID NO: 4118 - DNA, 2274 bp, Oryza sativa
  Clone ID: PAT_MRT4530_1102C.1
tcagtttatctccaagtaggactcggagataacggacccctcacgatatggtgaagacccagtcttgtccgagtagaactccttccattcgtagacaccatccctatcacgtgatagatttcttccttcatcctgttctccggcgatcctccgacggtgatggaccttgagaagtcttcctcgaacaccacgtccatgaagaagctgcaggacgacggtgccctccccggtcacgggaccatgcagagggaggctggacgtacagaacctgaacccatcttgggccgcatggttgtagtcgaagattatgtttcttgcggttttcttcctccgccttccaagtttcttcttcttgtcttgaatttctacggcctttctttgcttcacctgaaccccaacttcatcgcctttctgagcatcttttctcatctttgcgaggcctacattggggtagagccttttcttgacctcttccatttttattacgagctgcgttggatggaatccaacagggtatctggatgcgtcggattccgacttcgggatggcctaaagtcgcgttacatccccttccagtgcccttcttctcgcagcaagtggcggacgagatggttctatctccagatagagaactcggaccccgtccttgttattcctgaggaccagtcagaaaagatcccagagtggactgctaaacccgccctggctccctccctccaatcctttatcgacatcatcgatgacctccgagaacgggggttgtcgggatatgaagtcgctaccgacttcataggtctggacagtgacactgtgcagcgccgcgtcatccagataatgatcagtggaccctcggaggtgggtaacatccctgtcccactctgcgacaagggctcagccgaacgcgctgccgcgattaacgctctccctctgacggacgtcatcggaccactcgtggatcaccaggctgtgacgtcgctgaaggagggcgccgccaaggaagcattagacgctgctgctgccaccacgagtggcagcaatgttccgaagaggggaagagagttctcctgtgtgctcgggacccaccggaaggcgacggacccggcggactcgggtgcgtctccaccgcctccgcgaaggcagaggttggtgacgatcggtgagaaagaagagaaaaatcttcgcaggatggcgcgggcgaaagatgcgcacaatggggctgatgctgcttccagtgtgtcccctgtggcgacctcgacgggagccgtggtcgctaccaaggaccaggaggcggcaccacatagtcctatcgccagcctcgtgaccgcccagcctctgtccgccgatgccctcacttggggagagctccaggctgagatggagcgcatcctccaagcgggcgcccgcggcgcccgcgaggacctccaaaagatgaaggagctggtagctagcaacgagacgcagtggcgcaggctcgagcaccagatgtcggagctcaaggaccatctgacagacatccggggatcgctgcggacatcattcactggcctgcaccaacttgccagggaatgtggcgtcgtgatttcaatcccggcgcaccctgacgagtggtcattgacgtcatcgctcaccaagttggctaaggtgatggaggcgatcccctcccgccacgcggctaggatcagcgaggagacgtccaacggtatatacaccggggcgtgccaagtccttgcgtgcataaggctggcgcatcccgacttgaacctcaaagaggcgttggatcggggagccaccgataacgcgcgcaaggcgtgtgattccgagtaccttctttattgtagatatgttgatgtcgaggatgtccagcagtgcgggcagcccgatacgccggtagttgttccggcgctcacgcctgagccgcacgtgccggaggtcgaagtcgatcaggttccgtccacgggggcgaacatggcgatgacttctttagatttcgagaacgcgttggctgaccgagatcgtcgaatgcagtattggaagacgaaattcgaggtggctgaactcgaaagagccgttgtggaagcgaagaaggaccagggcatagaagctctccgagttcacgaggtgtggttcaactcatacctcaagagttgctgcacagccatggcggttctctcgttctcggaggacgcctgggaaatcgacagtcttgcgcagtcgatggcgccacttgccgagaaggtcttctactccatggattggcgttggccatattggtag

SEQ ID NO: 4119 - DNA, 638 bp, Oryza sativa
  unsure (1)..(638): unsure at all n locations
  Clone ID: PAT_MRT4530_11030C.1
ccaggctgcggttatgtttgtgtgggaattggtggacgcggatgaaacaatntgtgcaacaccaagggaaacaagctgatggacaccatggatttnacagcacaaagctgctatatgacggactgcaactgatgaggggaaaacagctggggttacagcactcgcaaggttaccagtgccaggaatgtccacagggtgcagacaccacagcagtccagtggatattganggattgttgaatgtttggacagaggatttgggtgctggcatataatgaggctgactgcgcaagccaatgtgagttgtactgactgactgacttgagtgtatgaattcaagtgatgagggaggatgacatgatggacacangtgggtaagctgttgtcaccttgggtgttttgctgcgcacgaccactaaatatatcccacagggaaaagttggatacaagtggtgtgggtgtcncttggttccttggtacataccttggtatggagtattgattatgatgctctggtgaccccaccgtttgcctggtagtagaataagattttggaggtgtgagatgtaaataaatacatatagtacgtacccagtatatattactgngaccttcttctaaaaaaaaaaaaaaaaaaaa

SEQ ID NO: 4120 - DNA, 550 bp, Oryza sativa
  Clone ID: PAT_MRT4530_11031C.1
tgcaggaattccggcacgaggcgaaaagcgatggcggcggttccggcgcccgccctcctccctaccacgagcggctgcggcggtgcccttccccctctccccgcgagcggcggcggcggctccctccgacctgtctcgctttcctcgccggcggccgctccctttgtcctgtctcgcctcctcgctccctcctcctctcctcctcgcctccctcccgcggtggcgcgggttgacggcggtcgcgggcgaatccgagggtggtggcggcggctccctccatcccctctagccttcctcctgtggcagatccgccggcggcggcggcctccgcaggcggatcaagcggcggtggctccctccgccccctctcgccaagtcccgcggtcgatccgacggtggtggcggcgttggcggcgtccgcgggtggatccattaacagtggcggtgggcagatccggtagcggcggctccctccgccgcctctcttctccctccggcggcggtggtggtgtcggcggcggccgcggatggacccagtggcggtagcaac

SEQ ID NO: 4121 - DNA, 1929 bp, Oryza sativa
  Clone ID: PAT_MRT4530_11032C.1
atggctcctcgcaagcccaccaaggccgggtcgactggcgaagaccttggcggccttggcaacgggtggtcatgcttccttggcagatcacttgtcaaggaggccgacttagccgaattagtttcctccggtgctcttgcggagggccaagggacatgtgggggcgaagccgttgtcccttcgcctggcgatgggcgaatggttgtcttcgccgcctacttcaccgccgggcttcgtctcccatgtgatgatttcctgtcatctgtgctggcgacatacgaggttaggcttccccagctcagtccatcagcattcccgaagctggctgtcttcgcttggatgtgtcgaacgtgcgggttcgctcccaccgccgagctgtttgccgtcctatttacggcgtgtgccacgaccaaagacgtgcagacgccggccggactaaaaaaaagtgtcttccgctgcgtgaacttcatgctgcggccggaacgttcggacgcttgggagaggaactggatgcagaagtggttctacatcgccaacccctaccctgcggaagacgtcaaggcgaattggctccactttcagcgctctaccgtctccatcatcgcgaagctgaacgtagagggtacggccgaaagtgacgatgaggaggaagaagaagatgatggggaggccggatctaaggacgatgggtcccacggttacaccactagtccgactcaggcgaaacctggggcgggctctcatgtttcgcctgcgcacccgcaggacaatgctgtggtgaacacccttctggcgatttctagcactgcggcaaagccgggagcagccgccaggaggaagaagaagaaggggaaggttgtgcaagttggccgtggcttttcggatagtgaagggtccgacgggacgcccacttcgccgattctgcggcgcgctcctcctcgggggaggcgcatgtccccgccgcctgccagtgacgccgaagcggcgacgagcaaaagtgcctcggcacctgccgctgtggcgaatgtctccggggtcaagcgggtggaggcggttccttcgccaactcgtcagcgagaaaggaaagctccaatggtcgaaatgaccgtgtcggacgcttatcttacctccccacacttcgttcccgcggatttcaccacgcggcctgagatcacccccttcgtgggtggggtgtgccatgttatcacaccgtccgacggccttgggcttttcaccgaactgaacaagtttggcgaaagctgcgcagctgtggagagcttgtttgtgcggggcctcgtcgcgcacttgagtgcgaagaaatctgccttggagaggctggacgggtaccgtctttgcctccggaaaaccgaggaggatcttcgccacaaggagaacgaaagacgcgttgtggcggataccctaagaaaggtgaatgcggagaacaaggctctcaccggagaaaacatatctcttcgctccgacctagaggcggcgaacaagcgggacgccgaaagggatcgccagcttgccgcggccgaggagaagattaggtgtcttgaggcccgtcttgtttcggccgaagctgctactgcgactttggtgccggcgacagagtccgccaagcaagcctattacaccctcaagctagctctcaacgacctgggcgctcgtgcggagggcgctccaagtgacgatgggacgacattcgacttctccgagtggacgcaggaagcggccgactcggttgtcgatgtggcttgtgcttatgaagactgttgtgcgcgtgtttcggcgggcttcgtacttagcctgctccacgcgcatagttgcgaccatgttgaggattttcccgattgggtgaaggaggattggcccgagaagtcggagtgctccggggcggccttaagggcctttcgaaaggggttctag

SEQ ID NO: 4122 - DNA, 468 bp, Oryza sativa
  Clone ID: PAT_MRT4530_11033C.1
ggattatcgttctaacttaaggcacaaggagtgtatgcacaactggttccaacattggctctttatggcatatcggtatattacgctgcatactcagttggaatgggacctgttccttgggttatcatgtctgagatattctccattgaaataaaagcaatagctggaagcttggtgacgctggttagctggattggttccttcgcaatttcctactcattcaatttcctcatggattggaactctgcaggtaccttctttctgttctctgcggcgagcttggtcacggtgttgttcgtggcaaggttagtgccagaaactaaagggaaggcactcgaagagatccaagaatcgttcacatgacagctcgaggaggatttgtatgtagaacgctcgttatcctctcaaattatttgtatcagtgtgttcatattactatatatatactaacttctggtttctgttggc

SEQ ID NO: 4123 - DNA, 317 bp, Oryza sativa
  Clone ID: PAT_MRT4530_11034C.1
ggcaaaaaaacaacaggggaatctcaattaggaatcccaggggggcaggttgtcggaacgggaaaaccggggtaacccaaattggaggtcgattccttaaggcttttgagatacaggaatccgagaaagggttgctacaaaaaaggatgactggacacgacaaaaagaatgggaacgaacggggtaccaggaaggccgcaaaacgattgaggggataccccttcattcccagggggaatttcagcaggggttagaagggggaagaacgcaagatggtaacccgacgatgattgggaaatggcaagggtgttacagcg

SEQ ID NO: 4124 - DNA, 1635 bp, Oryza sativa
  Clone ID: PAT_MRT4530_11035C.1
atgatggctgccgcatttcctctgtccaccgccgcaccgccgtcgccgccgctcgtcctccgccgttccgccgccgccgcctactcaccttcctctcccttcgagctctaccgcaaccaccgccgccccgcgcgccgggtgcactgtgccgcctccgcctccgccgcggcacggcggcgcgatgcttgctgcgcgctgcggccgccggccgctgctcggggtggcgcagccgcggcccaggggcaggcgggggcggcgccccacggtggcgcgggggaggggtccctgtggatggtgttcctcgccaccgcggtggccgtgtgcgggtccttcgagttcggcacctgcgtggggtattcggcgccagcgcaagctggaatcgtgaacgactttgggctctccaattcagagtacggcgtatttgggtctgtgttgacaattggagcaatgattggcgctctgactagcggtcgccttgcagacagtcttgggcgcaaaacgaccatggggttggcagcaattattggcattgttggttggtttaccatatattttgccaatgtgcctgtgttcatatctgaaatagccccaaaggatcttcgagggggtcttgcatcttcaaatcagttgttcatctgctcaggatgttcagctgcttacattattggggcacttctttcatggcgctcgttggttctagtaggattagtgccttgtgctttcctccttgttgggcttctgtttattccagaatctcctaggtggctggccaatacagggagagtcaaagaattcaatgcttcactgcaaaagcttagaggggagaatgctgacatatctgaagaggctgctgggattagagaatatatcgaatcacttcgtagcttacctgaggccagggttcaagatttgtttcagagaaagaatttgtttgcagtcattgtgggtgttggcctgatggtctttcagcagctgggaggaataaatgccttgggattttatacaagctatatcttttcctctgcagggttttctggaaagcttgggaccaccttgattggaatttttcaggtcggctttatgtcctttctgtcaatgaaaattccactcacattgtttggtgcccttctcatggatagaagtggaagaagagcccttctactggtctctgcgtctggaacatttctgggctgctttctgactggattatcgttctacttcaaggcacaaggagtgtatgcacaactggttccaacattggctctttatggcatatcggtatattacgctgcatactcagttggaatgggacctgttccttgggttatcatgtctgaggtaggaaaaaggaacaccgtcaagttaatattgtactcctattatgctcccgtattcttggagatattctccattgaaataaaagcaatagctggaagcttggtgacgctggttagctggattggttccttcgcaatttcctactcattcaatttcctcatggattggaactctgcaggtaccttctttctgttctctgcggcgagcttggtcacggtgttgttcgtggcaagaacaataatggcgagagagcataataatatgaccatcgcctctaggcatgacttagaaaggtaa

SEQ ID NO: 4125 - DNA, 378 bp, Oryza sativa
  Clone ID: PAT_MRT4530_11036C.1
atgcaccgatcagtagtccgaggttttcaccccggtccatttgcgttgtcagttgcgcgcacaggcacatccgaccagcgtcgtgatacatccctccgctcggtcgccagttgcgagcggactcacgggatgcgtatcggcagattgcatggtcttatcatcattacagtgttcgtggttgaggatgcctacttggcagttgcacaaatcgacagaaaatccaaacacaaatccatagaaattttaagccgctaccgctcattgtcgccgtcgtcgaccgaccaccagccgagcaccactgtccgtggcctggctgcatcagctctgcgctccccgcggcccggcggcggcggctccgcgctccccgtggcccagcgg

SEQ ID NO: 4126 - DNA, 379 bp, Oryza sativa
  unsure (1)..(379): unsure at all n locations
  Clone ID: PAT_MRT4530_11037C.1
cccatagtatatacggttgtttggtgccagtggaacacgggtggccaattatgtagtactccctccgtttcacaatgtganaggtgtatgtatgagcatttcccacatgtgcatgatgtggatggctgaatggaatgctgatctggcatgcaatgatggaatgtngggaaatcgctgagaaatggacttgacattgtggaaaccggagggaagtgagttgatgctgatgatgcatgtgttggaccaactgctgtgtgcttgtgctgcttgggatgatatacttattaggccatcacaaaattagtctgtacagccaaggaagataagaacattagcatttaagttcttttagtctatataaaaaaaaaaaaaaaaaaaa

SEQ ID NO: 4127 - DNA, 708 bp, Oryza sativa
  Clone ID: PAT_MRT4530_11038C.1
atggccggaggaggagatgagctgaagcttctggccacatggttcagcccgttcgcttccagagtgaagttcgtgttccacctcaagggcctgagctacgagaacatcgaggaggacctcaagaacaagagcgagctcctcctcaagagcaaccccgcgatcaagaaggtccccgtgctcctccacaacggcaagccgctctgcgagtccatggtcatcgtcgagtacctcgacgagaccttcgccgccgtcggcccgtccgtcgtccccgccgacccctacgaacgcgccgtcgctcgcttctgggtctcctacatcgacaacaagctggtggcgccatggttccaggtgttcaggggcaagtcgatggaggagaaggcggaggggctgaagcagatcttcgtggcggcggcggtcctggaggtggcgttcagggagtgctccaaggggaggcccttcttcggcggcgacgccgccgggatcgtcgacgtcgcgctcggcagccagctcgggtggctgcgcgcgtcccaggcgctgtccggcatcaagctgttcgaccccgccaagacgccgctcctgccggcctgggcggagcgcttcctcgcgctggacgcggcgaaggcgtccatgccggagtccggcaggctgctcgcgtatgccaagatgaggcaggccgagtccgacgccgccaacgcagccgcctgctga

SEQ ID NO: 4128 - DNA, 468 bp, Oryza sativa
  Clone ID: PAT_MRT4530_11039C.1
atggagaatgagaaaagtgacactgctgcaaaaagggtttccgcatgcggttggcctggccgtatgcgagaaaagctttttaaaattggaaatgatgaggacatcccagctacacttgacgtaaacacgggtgatggtgtacgtcatacattacataaagaaaatgaagatgatgtaaaccaagttgatggattgcgtctcagcaataacgatccagcatatcatggtccaattacatgcagccgtactaggaaaatacaacaagaggtgaactcgctctttactcaacttaacccaaattttagtgagaattttatactacctaaatgctctaactttgtattgctaaggtgtatgcccgaggacatcatcactatgtcaagaaggatgggttacattgagaacgacaagggttatgccgaggaggaatcagcccatacccaaccagcagctgtttacgccaactaa

SEQ ID NO: 4129 - DNA, 600 bp, Oryza sativa
  Clone ID: PAT_MRT4530_1103C.1
ataattccgcccgcgcctctttcctctctctcatccttttcgccttcctccctttctcccggccttatcttgttcttgtactctttgctctctacacatacatttcatcagtgtttcactacacaaactgcaggatttgtgttcagctaagctagatatcgatcgatcgatcgatcgcagtgaagtggtagagagagagagagatgcaggactgggcgccggtggtggtgggagtggtgctgttcgtggtgctgtcgccggggctgctgatcgagctgccggggacgcaccggtgggtcgacttcggcagcctccgcgtcaccggcaagtccgccgtcgtccacaccatcgtcttcttcgtcctcttcgccatcgtcgtcgtcgcgtgcaagctccacatctacaccggcgcgtagcgcggccccagccaggccatgccaagattgctttgggcagctcactcgcattcgtctctacgccgaccttgttcgttagtctctctgctgattcggttggatcttattgtcgatggaatacttggtgtgcaatgctcggcacgtttagttgatacgtgtgctgcaggttatttagagttttagc

SEQ ID NO: 4130 - DNA, 790 bp, Oryza sativa
  Clone ID: PAT_MRT4530_11040C.1
ccgcccctaccgcctcgcccgcgcgccggtcggccgcgccgtctcctccctcggcgtcgcagcagcctcccctccaccggcgtcgccttcgtttcgcgcggaaacccccggaggtgcgtccctgccggcaacagtggtgttgccgccactgctccgcctccagccgcctttgccgcctcgcctttgcaccggccgacgtcgccaccacctccctcggctccgcttcgccgtcctcatctccggcatcacctcctcctcgcctgaagctcgccggagtggcctcctcgtcggtgtccagtacctccccgtctccggccggctcctgttcgtcgccagtacgccgatcgacgtcgctgtctcctctatcgacgtcgcaacgtcgtcctctcctccggctgctcctctgtttcgccggaacgccgtcgcccgtgccggcctctccatcctcctcgtcgccgacgtcccttcggtcggccgctcctcctcgccggctcatcaccccgctgcaccaccatcgtcggcatcgcagcggcgtgttccacgccgtcctcgtctccgtgcagctactgtcggctgccctcgtcgcctcatcgccgtgtgctgctgcagccccgtcatcgtcttcgtccttggctccgcgtcgtcaagccttgtgtcggccgtgtctcgccttcgtccaaggatcgccgccgaagtcgttccctcgccgttcgcctccgtcgtccctgagtcgtctccgccgcgcccgttcttcgtcgtcgtacccacgcctcgtcgtgtggtggcctga

SEQ ID NO: 4131 - DNA, 1721 bp, Oryza sativa
  Clone ID: PAT_MRT4530_11041C.1
gcttgcatgcatcaactttccaaatgaatatttgtcacgtcccgataaatttatcccgaaataaaattcattctctattttctgccgccgttctcacctctcccgtgcccggctccctccctcggcgtcgcagcagccgcccctaccgcctcgcccgcgcgccggtcggccgcgccgtctcctccctcggcgtcgcagcagcctcccctccaccggcgtcgccttcgtttcgcgcggaaacccccggaggtgcgtccctgccggcaacagtggtgttgccgccactgctccgcctccagccgcctttgccgcctcgcctttgcaccggccgacgtcgccaccacctccctcggctccgcttcgccgtcctcatctccggcatcacctcctcctcgcctgaagctcgccggagtggcctccgctgtctcctctatcgacgtcgcaacgtcgtcctctcctccggctgctcctctgtttcgccggaacgccgtcgcccgtgccggcctctccatcctcctcgtcgccgacgtcccttcggtcggccgctcctcctcgccggctcatcaccccgctgcaccaccatcgtcggcatcgcagcggcgtgttccacgccgtcctcgtctccgtgcagctactgtcggctgccctcgtcgcctcatcgccggtcccggtcgtcgtcctcatcgtcgtggcattcgtccctccgtcaagccgatcgcgttcgtcgcccgcgtttcgtctagtgtgctgctgcagccccgtcatcgtcttcgtccttggctccgcgtcgtcaagccttgtgtcggccgtgtctcgcccgtgtaccggtgtcggtagtcgttcgtgtgtgcgtgtggtgaccgtgtttgtgtgcccgctcggtagccgcgtggtttccacgtgtgcagcccgcatggtgtctagtggagtccgtttgtcggccacccgtctcggttgacacacggggtccgcttccgtcgacccgtggaccgtctctgtgtacccggttttctttttatgtattgttattgtttctttataggcttgtagctttgcttgtgtgcttcgcatagcttctgtcgttccggaggttcccgaagcgtggttcgtggtcgtcgccaaaggttcggaaggctgttctctctctccccctcttttcaaaacccccaaaacggttttaggctgggctcgaggtgcgtggttgggttttgttagtcgtacctcgggtactataaggattaagctcaggcctctgttgcaaagcactaccgtacttccacatgtctagttggtaaggcatagtttgtggctcagtctggtcataaacaaaagtacacggatggagatggacgaagtcggggctcgatggatatctctagggcaaatgaaggccacacgagctgtcgcccggtagtcgagatgtcatggcacagggccggtgtcctactgctaggggctcaaccttggttacctgtctcgggaatcccggtcgtagccagggttgggtcggtactcttgtttatggctaggataggttgggaactatgtcacatctttcgtccgtatgccgtggtggtatgtgctacgtggttacacgtgagaaagatgtgtcttgtggcatttgtgggtgtgtcttactgagtacggtggttgtactcaatcttgctcaatttttccctaacccaaaagaggagttcctggaggatgaagactttggtgtc

SEQ ID NO: 4132 - DNA, 452 bp, Oryza sativa
  unsure (1)..(452): unsure at all n locations
  Clone ID: PAT_MRT4530_11042C.1
actaggtatcaaggggaaaggcaagaccaacagcatagcgcaagtgtcactgctcggtggtcatcacgcttaacgacctctgctgaatttggttctacgggacttgttagatggggaaaaatataaagtgcaaaccacatatacagtgacaacttagaaactaatattagcataaaaatgaatgtatgagatttatccatgtcncctagagtggcagtaaaaaaaatttcatgaataactntcagatttaaccatgggttaaaaattttattcgagatgacgtggacgaatatcaaatgtctattttttttttatcctacggtgattttgtaacatttatttttcggtgttttatgccatgcttatgcattccatgttgtaaaaacctggcatgttggtacaatattgaacnctgaagaaatatgtaaaaaaaaaaaaaaaaaaaaaaaaaa

SEQ ID NO: 4133 - DNA, 729 bp, Oryza sativa
  Clone ID: PAT_MRT4530_11043C.1
ccatcctcctcgtcgccgacgtcccttggtcggccgctcctcttcgccggctcatcaccccgctgcaccaccatcgtcggcatcgcagcggcgtgttccacgccgtcttcgtctccgtgcagctactgtcggctgccctcgtcgcctcatcgccggtcccggtcgtcgtcctcatcgtcgtggcattcgtccctccgtcaagccgatcgcgttcgtcgcccgcgtttcgtctagtgtgctgctgcagccccgtcatcgtcttcgtccttggctccgcgtcgtcaagccttgtgtcggccgtgtctcgccttcgtccaaggatcgccgccgaagtcgttccctcgccgttcgcctccgtcgtccctgagtcgtctccgccgcgcccgttcttcgtcgtcgtacccacgcctcgtcgtgtggtggtaaggatctctccttcactgcttccgtcctcgtcctttcggtgtcgccccgtgcccgttgtgcggctgtctaccccggtacccgtgtaccggtgtcggtagtcgttcgtgtgtgcgtgtggtgaccgtgtttgtgtgcccgctcggtagccgcgtggtttccacgtgtgcagcccgcatggtgtctagtggagtccgtttgtcggccacccgtctcggttgacacacggggtccgcttccgtcgacccgtggaccgtctctgtgtacccggtctgccgtggtcccttaggtttgacatgtgcggtc

SEQ ID NO: 4134 - DNA, 850 bp, Oryza sativa
  Clone ID: PAT_MRT4530_11044C.1
ccgcccctaccgcctcgcccgcgtgctggtcggccgcgccgtctcctccctcggcgtcgcagctgcctcccctccaccggcgtcgcctccgtttcacgcggaaacccctagaggtgcgtccccgccggcaacggtggtgttgccgccactgctccgcctccaaccgcctgtgccgcctcgcctttgcaccggccgacgtcgccaccacctccctcgcctctgcgacgccgtcctcatctccggcatcacctcctcctcgcccgaagctcgccggagtggcctcctcatcggcgtccagtacctccccgtctctggccgactgctattcgtcgcccgtgcgccggccgacgtcgccgtctcctcctccggtatcgcagtggcgtgttccacgtcgtcctcggcatcgcctccccttcggccgaacccgccggcattcgtcgtcgcctcctcgccggttcccatcgtcgtcctctcgtcgttcccggtcgtcgtggcgttcgtccctccgtcgagccgatcgtgttcaccgcccgcgtttcgtcaaggttgctgcagccccgtcgtcgtcttcgtcctcggctccgcgtcgtcaagcgttgcgccggccgcgtctcgccttcgtccaaggattgccgctgaagtcgttccctcccctttcgcctccatcgtccccgagccgtctccgccgtgcccattcgccatcgttgttcccacgcctcatcgcgtggtgtcgttcgtggtgcgtgtggtgaccgtgtttgtgtgcccgctcggtagccgcatggtttccacgtgtgcagcccgcgtggtgtctggtggagtccgtttgatggccactcgcctcggttga

SEQ ID NO: 4135 - DNA, 239 bp, Oryza sativa
  Clone ID: PAT_MRT4530_11045C.1
ggcacgatttttcttttagagtgagatttgcaaacatagtgcataatagtaatccaccatcatccttttttcccttcctggaattagtgctcatattttaatttgccatgcatggacagggaaggatgatactggcccatttatgtaatgaacccaaaggtctcaaaactggaatttgcatgtttctggtgtctccctgccgcaattgcaaatgtcctcacagcaaagaccaatgctgg

SEQ ID NO: 4136 - DNA, 656 bp, Oryza sativa
  Clone ID: PAT_MRT4530_11046C.1
tagatcgcgagcggccgtccgcgatctagaaccggacgcgtgggatcccacccaaccttagcgtcttaaacttttccttcggctccggaagcatgatcggcaaccctgcttggagagagagcccgtgtagctacgcattcgtgtccgagaaaggctggtacaatttcagccggcaagatttcggtcgtgctggcagcaagggcttatttgtcgagagtgatggagccaaaagtgtcccaactgtacttgactgggccatcaggggaaatgggtcgtgcccgtcaactgcaggagaggttgctcctgcttgtatcagcgcacatagtgagtgcgccaacgtcaccaacggagaggggtacctctgcaattgttccacgggatacgccggcaatccctatgtcatcggcggatgcataaatattaacgaatgcaagcaaaatccatgccgtgatgggacatgttatgacctcgaaggtggttacaagtgtaaatgcggtttcaatcgagtaaaagataaaaacgatgacaatatttgtaaacaaatactctccaaatcggatatagtggtgatcgcaataatatgtgccgtcgcaattttgtccatcgtactcattttcttgcgcatggaacatgagaaagaagaagcttgaagatac

SEQ ID NO: 4137 - DNA, 204 bp, Oryza sativa
  Clone ID: PAT_MRT4530_11047C.1
atgtcgatctccaagatcgctgcgccattggatgggtttcttgggggtaaatggagaggcggtcgaggagatgcacagggtgtggagcaagccaaagatgctgccatgtgggcccagggcgaagggaacaaggctggagtgagagagatggatgtccaaattagttttgtggggcttgacattggccttgttgatatattttaa

SEQ ID NO: 4138 - DNA, 312 bp, Oryza sativa
  Clone ID: PAT_MRT4530_11048C.1
gtgctatggtgcatagctaacataactggtatgacacaatgctactagattgcgtgtgccgtattattacctgttatatgtggtgtggatgaacatctatgaacctgttctattcgatcaggactggatggacggctaacactatctaagaagggactactgcagattgccaagctatttatgtgcctgctgatgacttgacagatcctgcccctgctactacatttgcccatcttgatgctactactgtgttgtcgcgacagagttctgaggttggcatttatcctgctgtcgatcctatggattacacat

SEQ ID NO: 4139 - DNA, 631 bp, Oryza sativa
  Clone ID: PAT_MRT4530_11049C.1
ctacaccacctcttgctccccattcactctctcaccttgagcatgcgcatacggaggcacggtgatatcaatgttgttgtggagagctaatctgtcggatggcattgtgatggcagagtagggcatgggcgatggatctggaggcctaggtcctacactcctacccatcgttcgatactggcaacgaggacgctggactacgtcggtttccttcatctcaagtttatggcacggtggcaccaaatccggcaagctcctcactattccatcatgctgctcattagcatttgtgtacagctgctgcgggcggtgtctcctcggctgctactacggctatgatcatgccctactctgcctcctcctacgcaccggcggtccgaccggcggcaaggggcggtcagaccagcaggtgacctgcggtcagaccggcggcggcgacagggagcggcaggcgatctcggcggttcgaccggagttcgatctcggtcagaccgacgttcatcaggcggtcagaccggcgcatacacctaggtcggaccacgatctatcgaatttgaggttgggtggaaaaaaggaaattggaggaggttcattaaagtacatatccatccgacgggactccattccctag

SEQ ID NO: 4140 - DNA, 261 bp, Oryza sativa
  Clone ID: PAT_MRT4530_1104C.1
atgggggccgccgtggaaggcggtatcggaccaagagcggtcatgcgtggcgaggcgaaaggagcggatgaccgcggtgtggcggaggagcagcgtgtccacgtccaaggcgctgatgccggggttgttgaggagatcgacggtagggagcgactcccggcggcggtgcgatgctcgggacaacgccgaggtgtggatcacctcgtagatatggaggcgggatatgatgttgtcaaggacatcgagggggagcgaccctag

SEQ ID NO: 4141 - DNA, 348 bp, Oryza sativa
  Clone ID: PAT_MRT4530_11050C.1
atggcgtttcaggtttggccgttgggtgtggaggttgccgtcaccgctcgcacctcgcagtcatccccaacggaacggcaccggggcccgcaggaatctgccatgagggcccagattccccgcgggcgatcaagtttctgggagcgcttattcggcgcgactgctttgctacgtctccattgcttcctctgcatcaccatgtctggggagaatggcatcaccatgtctggggagaacggcaggaacatcgacaccaacgtcaaccccaacaccaacaccgtctctagatatggacagaacaacccaagagggtgtgtttggataatgggttataaagagtggaattga

SEQ ID NO: 4142 - DNA, 198 bp, Oryza sativa
  Clone ID: PAT_MRT4530_11051C.1
atggggcgctccatccacgaggaagctcggcggctggggcaccgtgggttgctcagtggcggtggtgcccagatccacgtctcctccttcgaagctggcgaggagaccagtgaagaaggagatggagatggtggcgacgaagcacagggcgtggaggcggtgccaaagctggcggaggctgggcggaggaggcggtag

SEQ ID NO: 4143 - DNA, 126 bp, Oryza sativa
  Clone ID: PAT_MRT4530_11052C.1
atggagcggaggttcgacattggtggcttcaacaatggtggtaagcaaggtgctagaggtggtgcggaacaaggtgctgctgggggcgcctacttcgccgatggggcgctgggatgttggtgctga

SEQ ID NO: 4144 - DNA, 987 bp, Oryza sativa
  Clone ID: PAT_MRT4530_11053C.1
atggctggtcatgtcttcatgattcggcaagaatcggcgccgccggcgccaccgtggtggttcctctctctggtcttcctcggcgctgcctatgtcgccaccgtcaccctccgcctcctcgcctacctcgcgttctccctgcaccgtcagcccaaggacctccgcagccggtacggtgcgtgggcggtcattactgggccgacatccggcatgggccgggctatggcgctagagctcgctcgccgcggcctcaacctcgtgctcgtcggccgtgaccccgccaacctcgaggagatctccaacacggtcaggtctctccacggggtggagaccaagaccgtggtgttcgacctctcactcgtggcgactccccacggcgacgagccgctgcggcagctcagggagacggtggaggggctggatgtcggggtgttaatgaacaacgccggtgtgggggagccggctatggcgtacctacacgaggcggacgtggaggcgtgggtgagaatgatgcgggtgaacctgtgggcagtgacggaggtgacggcggcggtgctgccagggatggtggagcggggcaggggcgctgttgttaacatcggctcggcatcatcgcaggccatcccttccttccccctctgcaccatttactccgccaccaaacggcacgtacatgcaacaaacacacgggtagggattatggctgttcgtttgtaccggtacgtggctcatttctcccggagccttcacctcgagtacgcaagtgaagggatccatgtgcaatgccaggcgccgttcttcgtggcgacgaggatggtggagaacctggcggaggcgaggcgcctctcgccgttcacgccacctggagcagaggacgacgttgtctcagcaaatcagagcgtcgggggcgccggcgccgtcgtgacagcaggaagttcattcttggcgcttcgtcttgcgttcatgaacaataatagtgggcagtag

SEQ ID NO: 4145 - DNA, 2502 bp, Oryza sativa
  Clone ID: PAT_MRT4530_11054C.1
atggagtccctcactgtacgcccagccatagaggtcaaagcccccgggccaggcgccaggaggaggccgagctccatgaggcgggcctatgtaggcctaacaggtgtcaccggacaccggtattacaagagaaaatctccatcacatggagaagatgttgccccatcgcagccatcacacagacataatgctgctacatttaatagaagagatgttcctgaagatatcaattgggaagtggagattcaatttgatcctggcaaaaggaaaagaattgaggattatcatcccaatcaaaaggagatggtaagaagaaaatacttggacaatgggccttgtcaacctcgtccggatgatctccctgttacaaatattggtggtagagatagaaaatttaatcctgaatggtatgatgagtttggcagttggcttgagtatagtgagtccaaagataaagtttattgcttttattgctttttgttcagagaccctaataagaaatcagcagggtatgatgcatttgttacaagtgggtggtctagttggaacaaaaaacacagattgaaggaacatgttggtgatattgatagtgttcataaccaagcaatgagggattgtgatgctttactgaaaaaagagcagcacattgatgtttctttgaacaaccaaagtaatgctgagaaaattgcttattatactcggttaaatggctcaattgatgttactagaatcttactgaagctaggtatgccttttcggggccatgatgagagtgaggagtctctcaataaaggaaatttcaaggaatttcatgcttataccgcagagcaaaatccagctttacacaaggttgcaggtaaaaatgctcctggtaacagtcagtatacatcttcaaagattcaaaatgacatcatacgttgctttgcaaaagaggtactgcgttatattcttgaagaagttgggaatgatgttttctgcttgctggttgatgagtcaagggatgtgtcttacaaggaacaaatggcagtggtcttgcgttatgttggtaaatgtggcagtgttaaagagagactagttggccttgttcatgttaaagagacgacatctatgtaccttaagtctgccattgatgatttatttgcggagcataagctaagtttgaaacaagtgagaggacaaggatacgatggtgctagcaacatgagaggtgagttcaatggtttgcaatcactaattatgagagaaaatagctcggcatattatattcactgctttgcacaccagcttcagctagtagttgtggccattgtaaagaaacataaaggaatcggaaacttttttgatatgatttctcttttattaaatgtggttggtggatcttccaagagaagggatatgattcgagatataaatgcagaacatgtgcatgatgctttagaatgtgggttacttataactggttcaggattgaatcaggaaatatcccttcaaaggcctggagatactcgttggagctctcactataagacactgaagagtttggttcaattgttccctacaactgttaaagttctagagtatgtggaagagaatgacagggatgacaaaaatagtaggcaagcagctggcctccttgtttattttcagttatttcagtttgtgttttatttgcagcttatgttgaatatcttggcaatcacaaacaccttttccgtaactttacaaagaaaggatcaagacattgtcaatgctgttaattgtgtaaaatcaactagaaatcacttggatgagtttaggaggagtggttgggaatctattttagctgaggtgcataacttttgtgagaagtatgacatttcagaattggagatggaggatgcatacataaatccaaagaggccacgccaaaaaactgggattacaaacaagcatcattttgaagttgattgttttaacgaaattgttgattggttgcttcaagaattggacaatcgctttaatgagaaaacatctcagttactcatatgtgcagctgccttaagtcctaggcaatcatttcatgatttcaatttagagcatttgatgagtttagcaaaactttatccaaaggattttgatgatggggaactaatggatcttagacatcatctttctctttatatcgctgatgtgcgtggagatgatagattcgctaacattgaaactatatgtcagctttcccaaaaaatggtggacacaagaaaacatatttgctatccattggtttaccggcttttaaagctagcattggttttgcctgttgccactgctacagttgaaagatgtttttcagccatgaaaattgtgaagacgtatttgcgcaatcgcattagtgatgaacacttgagtgattgtgttatttgctatgttgagaaacaagaattgatgaaagttaccaacagtgcagtaattcaccgatttgagaccttaaaggcacgtttacatgatgtttttactaagtga

SEQ ID NO: 4146 - DNA, 295 bp, Oryza sativa
  Clone ID: PAT_MRT4530_11055C.1
caacatagaaagggggactgtcaggttcaaaaaatcttggaacacgggtacagaaggctgggaactatcatcgatgcatgacacggagtgatgccatgcacaccactttatcttgaacacacagagggccaatggctgcaagacaaaatgaatgtaactacaagcttgaactccacggccccatcctgtacaaccttatcatctgctccgaggccaggagacctcttgcgaaaaacagcaaacaccacgctgtgcggaagaagacaaattattacagacacaaatcgacgacacg

SEQ ID NO: 4147 - DNA, 317 bp, Oryza sativa
  unsure (1)..(317): unsure at all n locations
  Clone ID: PAT_MRT4530_11057C.1
gcctcggcgagcgttgtcagccaggatgggctacccgatgtactcgctgccacgctgccgggcggtggtgaagcgccagtgcgtgggccacggcgcacccggcggcgccgtggacgagcaactccggcaggactgctgccggttgttcgtcgcggtcgacgaccgctggtgccggtgcggggcgctcgncctctgggtgggggcgtcttctgggagctcggggccgccggtgttgggcaccccgtgggctgggtgttccccggctgtctgctttgggccttgttgctcgcggtggcgcgccttccggtgttttgccc

SEQ ID NO: 4148 - DNA, 661 bp, Oryza sativa
  Clone ID: PAT_MRT4530_11058C.1
ctttatcctaacatggcacacaatgaaaactatatgggaaatgggaccatgggaggagttgaaaaaaaatgttttgccttgctttcttcccattagtcgtgtagtttctctccgtagggaggttctcaactttagcatgactagaaggagtccatcagtgtagcctgagcacagttctatttgctaactctagccagcccagacttgtgcctatctgaccacgttgctgaggaatacttccattcgagtttagacacggagtctaccatgtattttgatatttgcgcccaacgatcattcgcacacaagatgacaacggaagatacggaactcgatcggatacttgacaacatctctttttttcattgcgacagcatccaggaaatcgagcctacaccagatgaacattcaaccgttgaatcggagccatctacctccatacaccaagattcaaccgttgaattctcattcgaaccgccagaaacaaaggaagaagaaattcagcctttggaattatcattctagtttgagggtgatcttttgaagattatggaaacacctcaaactattctatgcaaaaaagaccaccgcaatagctctctcatttctctcaagttagtttagtagtatctagctggtggaataggaatatagtagaaat

SEQ ID NO: 4149 - DNA, 678 bp, Oryza sativa
  Clone ID: PAT_MRT4530_11059C.1
ccggccgggaccctcgttgtcatatcaaatctgtcactcgttagaccagactaccattcccactctcgctttttaactacattactcaactaattctaatacccacacctccaaaaaccatcaacatgcgtttcacatccatcctcgctgccggtgctttcgccaccatggcctctgcccagagcaagaccgtctctatggaccctgctcaggcttcccagatggactgcctcaaggactgtgaggctggcgatgtcaagtgccagtcttactgtatcactgttccttctcccaacgagcaggacattgagaagaccaccaagtgtgttgccgcctgccccaagggtaagggctccgaggccgatacccagaagtacaccacctgcatgaacgagtgtatcgccgacaactactggaagtccgttgacggtaccccccgtggcaccgacgtccccgatgtcaagagccaggcctccgaggctgcctcctccgccgctgacaaggccaccgctaccggtaccgcttccgagtctgatgctaccgccactgctgccgctaccaactccgagtctggttctgaatccagctccgaggagaccagcactgccaccggctccggcactgccactggcaccgctgcagaggtatccgagactggcaacgccgcctcttctctca

SEQ ID NO: 4150 - DNA, 2134 bp, Oryza sativa
  Clone ID: PAT_MRT4530_1105C.1
atccatttgaagtccgtttgcaagaaaactctcctgccttctagcactcttcgtcttctccgctccccacaaaaaaaaaccctagctcacttccttcatcctattctccggcgatcctccggcagcaatggaccttgagaaatcttcctcgaacaccgcatccatgaagaagctacaggacgacggtgccctccccggtcgcgggaccatgcagagggaggctagagctgcgttggatggaatccatcagggtatctggatgcgtcggattccgacttcgggatggcctgaagtcgcgttacatccccttcagtgccccacttctcgcagcaagtggcaaacgagatggttctacctccagatagagaacttggaccccgtccttgttattcctgaggaccagccagaaaagatcccagagtggactgctaaacccgccttgactccctccctccaatcctttatcgacatcattgatgatctccgaaaacgggggttgtcgggatatgaagtcgctgccgacttcgtaggtctggatagtgacactgtggggcgccgcgtcggccagataatgatcagcgcactttcggaggcggacgacattcctgtctcactctgcgacaagggctcggccgaacgcaccgccgtgattaacgctctccctctgacggacgccatcggaccactcgtggatcaccaggcggcgacgtcgttgaaggagggcgtcgccaaggaggcatcagacgctgttgctgccaccacaagcggcagcaatcctcatggagaagagaaaaatcttcacaagatggtgcgggcgaaagcggcgcacagtggggctgatgctgcttccagtgcgtcccctgtggcgacctcgacggaagttgtggccgctactaaggaccaggagcggcgcagactcgagcaccggatgtcggagctcgagggccatctgacagccatccgagcttcgctgcagacattgttcaccggcctgcaccaactcgccggggagtgcggtgtcacgacttcgatcccggcgcatcctgatgagtggtcgctgacgtcgtcgctcgcggagctggctaaggcgatggaggcgatcccctctagccatgcggccaggagacgtccaacggtatttacaccgggggcgtgtcatgtccctacgtgcatgaggctggcgcatcccgatttaaacctcaaagaagctttggatcggggagtcgccaataacgcgccacgtgatcccgagtacctttgtcattgtagatatgttgatgttgaggatgtccagcagtacgggcagcccgatacaccggtagtcgttccggcgctcatgcttgagccgcacgtgccgaaggctgaagtcaatcaaagcccgtccgcggagacgaagatggcgatgacatccttagatttcgagaacgcgttggctaatcgagatcgtcagatccagtattggaagacgaaactcgaggtggccgaactcgaaagggccatcgtggaggcgaagaaggaccaggccatggaaactctccgaggtcacgaggtgtggttcaactcgtacctcaagagttgctgcacggccatggcggaagtttgcagggagctccgagttccccgcgaagatcccgaggagtccgctgctgggtatatctcgtggatgaagggggcctgcgcacagctcgaagggattggcaagcgcatcgacgaggccctgaagcaggagtgccgtcgagcgagccgctacgcctggggacacgtgctggcttgcatccgagatcaccgcctgcagctgcacctcgagttccttcacaaagggttctctcgttctcggagaacatccacggagatcgacggtcttgtgcagtcgatggcgccgcttgccgagaaggttttctcctccatggattggcgttggccgtcctgcttctgcatcgtcttcgagcaactcgtcgctactcaggaacttggtgagtggggtccgccagtcgtctgtggtctcgatatcggcaacgacgtgttcctcctctgtagcccccaagctgatgtcggggacaaccgtgctaccatcatcgcttgcctctttcaccgatggctttatcaggatgtccagaaaaagtgccaggcatag

SEQ ID NO: 4151 - DNA, 308 bp, Oryza sativa
  Clone ID: PAT_MRT4530_11060C.1
attccgtcctcatttctaaaagaaactcaaaaaaatcggagggctgcatatctacatatgagggtcattcttaacttcctggtataaccatccaaaaaccaatgaactttcctttcaacctttaagtgcttaaatctttgccaccccctcaatttgtttttaacatactaaccaattttgtcataccacctaactacttaagccttacatctttaaaaccatcaacattacctattttgggtacctggcttggccccactcccttcacctattggtgaaatctttccaccaaacctgttaagggccaa

SEQ ID NO: 4152 - DNA, 336 bp, Oryza sativa
  Clone ID: PAT_MRT4530_11061C.1
atggcgagcaatcatatcagaacatgcagtgaaggtttcgttaaatatgatcgtcatttagaaaaagagttcaagaagggcgccaacccactgtggagatggagaaggattgcatcggctgaagagagcacaaagcaaaaggaatcaaatatgaattacagagacaaagaactactaaccaacggagaattcaacacaacaatagcccatggcaatgcaacatcactgatccagaccttcatggcgaacttgagtgcatgttcaccacggcgtcgacgattcaccaacgaccacagcagcgcctggacgaaggagaacgcgcagaggagtttgtga

SEQ ID NO: 4153 - DNA, 387 bp, Oryza sativa
  Clone ID: PAT_MRT4530_11062C.1
atggacgaggttgatggagattccatgcggcatacgatgggagattgtgtgcgtatggaaagtggagtcaaactccgaaggagtccaaatttgagaagattagagtttaagttggaaagagataagtttgtttcttatacgggaatgtttcctagtggattaggacttcttgcacaagttggattcgtggctttaggctatctacctcgagtaatcacaccggcaagtatacggcaaccagaccgatggcttaccaatggtcagaccgatgggtatagggcagttagacctgcggcagcgacaggcgcaggcggttcgataggcggtcagactggccgatcaatactgctcagaccggctgcaagggcatggtcagaccagggctag

SEQ ID NO: 4154 - DNA, 1832 bp, Oryza sativa
  Clone ID: PAT_MRT4530_11063C.1
tgcatcgtctgccttgcggctgctgcgatagatgttaggccaaccgcgtcatcttatctctctctctctctctctccccccatcatttcatctgatctagtatctcatctcctcctcccctccttttccttctcccccaaccaactcactcttcatcttcaacaccttgctgttcgtcctcgtctcgtcgtgctgattgttcaagaacaggagaaagaaaggaagaagcagtttgattgatctgtttctgttggggggagctcggtgatccatgcatggatggcaaagaactcctctcaccgtccgaactgtcatactatgcgcaccagcagcatcagcatcagcatcagcagcatcagcagcaacaccggatgctcgggggcggaggaggcggcggcgggcatagcgcgtcgccgctcgccgggatgcacggcggcccgtcggtcatccgacccatgcccaacatggggatgagccccaccgcgatcctccagtccatcggcccgggcccgctcgccggcatgcagttccagatggacgccgcgccgccgccgccgccattgatgcacaacagcatggcctccgtctccgcctccgccggcgccggctcacccaccgtgccgccgtccgcgacgcccatggagccggtcaagaggaagcgaggccgcccgcgcaagtacggcccggacgggaccatgaaggtgtccaccgccgccgccgcgcagcaccagcagcagatgctgagcgcgccgccgaggatggggtccgtgtccggcgccgacatggttggcggcggctcagggatggacgactcggcgcagaagaagcggcgcgggcggccgccggggacagggaagaagcagcagctctcatcaccggttaagctttcagggggcaatgcgttcagtggctcagctggaacgagcttcacccctcacatcatcacggcatctccttcagaggacgttgcagggaagatcgtggcgttcgccaaccattcgtccagggcggtgtgcgtgctctcggccaccggctccgtctcccgggtggtcctccgccacccggccgacggcgccatgtcaagggttcacgcctcctcccactacaagaaccctgccatctacgaggggctgtacgagatcttgagcatgtcggggtgttacaacctgatgaacgaggggcagagcgacgggctgagcgtgacgctgtgcagccccgagaggcatatcattggaggcgttctcggcggagcattggtagctgccagcaccgttcaggtggtacttgggagtttcgtgcagggagggtcgaagcccaagtcgaagaaggccgggaaacagcagcagcaacaggcggcggcggcggccttcagctcggactcgctgaccggaggagggcaggacgcgtcgccgagctccggccataaccaaaatctaacgccgccgccccctgtaacaacgacgggagggtggcctagctccgggatatttgacacgagaagttccaacattgatatcaactcatctagaggctagcttcatctctcaatttgtcgactcttccatatgtgctccagaaatttgtttttctgattcccaaagaattacccccaaaattgtactcctctctgtaatagcctgttcagtttttgagccgttaattcttatagattattattattcactaggcaacgttgcattcatgcatgcatgcatgctcagagttgtgtaatcccaacaggataatcttgcttttctttcaacgacatgtgctactgcccaacctgtaaaaaaaaaaaaaaaaaaaaaaaaaaaaaaaaaaaaaaagggggg

SEQ ID NO: 4155 - DNA, 435 bp, Oryza sativa
  Clone ID: PAT_MRT4530_11064C.1
atggcgggcggcaagggcggcgcggttgctgctctagtggtggtggcgctcctgtgcgtgatgtccggtggctgcgtggagagccgccgtgtggcgaggatgggcctcgacatcggcttgggtagcgggcagggtattgggctagggattggacttgggcttggggtcagagcgggtacgggaggtgtctctgcttctgggtctgggtcaggttccggctcggtggctggggctgggtctacctccgggtcaagatctgggtcggtctcgattggaggggctagttcttctgctgggtcgagtgccggatcgtatgctgggtcaggatctgggtatggtgagggtggaggatatgggcgtgggtcgggtaatggatcaggtttagaatttggagaagggtatggttatggatctggttctggtggaaatccttga

SEQ ID NO: 4156 - DNA, 690 bp, Oryza sativa
  unsure (1)..(690): unsure at all n locations
  Clone ID: PAT_MRT4530_11065C.1
ggggggggtttttttttttattggatttcatttaattcacatagagaaatgaaaatacatggaaaatacacttggcatgggaactattacaccagcatcatgtccacttcaagggtttccaccagaaccagatccataaccatacccgggggggagttggggagaccttttccattacccgacccacgcccatatcctccaccctcaccatacccagatcctgaacccgacccactaccgccaccatagccatacccttatccgccacccgacccagctctagacccggccgaggaccctgctcccgatccacctgacccagcatacgatccggcactcgacccagcagaagaactagcccctccaatcgagaccgacccagatcttgacccggaggtagacccagccccagccaccgagccggaacctgacccagacccagaagcagagacacctcccgtacccgctctgaccccaagcccaagtccaatccctagcccaataccctgcccgctacccaagccgatgtcgaggcccatcctcgccacacggcggctctccacgcagccaccggacatcacgcacaggagcgccaccaccactagagcagcaaccgcgccgcccttgccgcccgccatcctcgttttttcacccgnnacgcgtgggcgnacgcgtgggcgnacgcgtggg

SEQ ID NO: 4157 - DNA, 267 bp, Oryza sativa
  unsure (1)..(267): unsure at all n locations
  Clone ID: PAT_MRT4530_11066C.1
ataaatatatanagcgcggagcttncatatattgtattcttttatacctggagccaacaccatatagnacagagcatataccactcttacatcaagtcagagagagatcatttgaaacaaaaacaaaagcatagcacggccagtaaaatcaaaagacgatgtacattcattttacacacacaacacccaaaaaaacatcttctaattatatatgaaccattaaacaaccctctatattacgattactgctttaattgccaccaaact

SEQ ID NO: 4158 - DNA, 1416 bp, Oryza sativa
  unsure (1)..(1416): unsure at all n locations
  Clone ID: PAT_MRT4530_11067C.1
ccggccgggacctccactctactctgctcctccccaatccaaacccgctcccccaccacaccacaacctgttcgacgaaatgccgccaccgtcgccgccgctcttcctctcgctcccctcgccgccgccgccgccgctgccgcacctcctgcctagccacaggccggcggctgcactgacgctagccccggcgctgtccagcaggagggtttcttccgtctgccccgtggcctcccagcgccactccgactacttcgacccccgtgccccgccgcctccgccgccgcgcgacgggtacgggggcccggcgtactcgcctcctgcggcgcaaggtgggcagcagaatgggagggtgttctctacgtacagcatctacaagggcaaggcggcgatgtcgctcgaccccaggccgccgcagttcgtgccgctcgatgtaggtagaggcggcgccgctgcatgcgagttgcgcgattgcgagtctggggcttacaaggttgtgaaggagggattcgtgctgctacagttcgcgcccgctgtggcgactcgtcagtatgattggactcgcaagcaggtgttctcattatctgtgtgggagatgggtagcttgcttactctaggtccaactgattcttgcgagttcttccatgaccctttcaaggggaggagtgatgaaggtaaagtgcggaaggttctaaaagttgagccaacaccagatggcaacagtcgctttttcaatctcagtgttcaaaaccgtctcctgaacatcgatgagaatatttacatccctataaccaaaggagaatttgctgtgattgtatcgactttcaattatatcataccacatcttatgggctggagcacatttacaaattctataaaacctgaagattcacgggcgtacactaggccacaatccgggcctgaatatgaatggcggaggtgaccaaagggtgtctgaagggagatggcaactgtccaaaggatagttcttggtggctttgttagaaagtacttggtccacaatttggacgggcaatctctgatctagttagttagcgaatgaactttcatttcttgcctttgttacatttcttcttagagcaggtgggtggaagccgttttatgtaaaatgtttctctgctgtctagatttggaggtcttgatatggtagacaactgctaggatctggcattttgggggcaatgacattgtgacccaatcaggtctgatggacaaagatgggaggaattgcagaagccctaattaacgaacgttcgtgcagtttggttactagtgaacaccttatccactcccgccccccnactttcagctttgctccggggctctgttttcatttagggatgaaagtgcttgccttcgttgctttttgtgttaaaaaaaaaaaaaaaaaaaaaa

SEQ ID NO: 4159 - DNA, 224 bp, Oryza sativa
  Clone ID: PAT_MRT4530_11068C.1
atggctctaccacacaatccccaccgcacgtcagctagggaaagcgacggtctggagtgccgcctcactcctcttcctctccctttgttgccacacctcctggaaaccgtcgacacccaccaacaagtagttttcgtggctgccatgaagacattaactctgtgcgccttgattgaagaggttcaacattttccagtgattgaagctctggtgacttttgggag

SEQ ID NO: 4160 - DNA, 441 bp, Oryza sativa
  Clone ID: PAT_MRT4530_11069C.1
aaaaaaaaattatcaatccttggcctgtacagtgtagttaacccccattttagcgatactttatagaagctggagtcacattcagctaccacgaaaaagcccaatcaaggttactaaactcatgcttacccatagaactagttatcttgcccacactgacctatgagagggcccactaagacacattggcttgtgacattaatctgacttgccaactatggcacagatttgtccaacattcttggcaggcttgctgtggtccgccaaatgttgggtctggatgcatacacactactatgctggaaggggtgcatccttacacttatctactctgccctgaatataaaaggtccagggatattgaaaccgccaaaagttggccgtgtttaaaccttctggctgctgcagggtgttcccttgatcacaacacaaagcgatcac

SEQ ID NO: 4161 - DNA, 232 bp, Oryza sativa
  unsure (1)..(232): unsure at all n locations
  Clone ID: PAT_MRT4530_1106C.1
ttttttttttttgaggaaaacacaccacatgcacgatgcatgcatgaactagtgtctccattattcatatctgcatgccttgcaaactaatcagtcatcttctcaatcatcatcatggggtagtacatatacaaaaaaaaaaanttacagctcaaattattaccaaatgcatcgntcgatcgntcaccaccaatattatgatacaggaaaagantgcgntaattaaccccaa

SEQ ID NO: 4162 - DNA, 369 bp, Oryza sativa
  Clone ID: PAT_MRT4530_11070C.1
atgccttctatacagcatcctttgactgtactggaccatcgcatcactaagaaagagcaagcaacctgggaagaccttgaagatttgaagacaaggtttcctggacttcctgcttggggacaagcaggctttcaaggggtagggattgtcaggaacacgccaagcaacgccaaggtagcggtacaaaaagatacagaagaggagatccgtcctgatgaatctgaagagcaagaggaagaagctgaagctccagtggagagcgatggcgcgaagcaaggaggaggagaacaagacttggtggccaagcgtcggtcgtcaaggcctatcaagcccaacccacgttatcaagtctctcaatgggttgcgtaa

SEQ ID NO: 4163 - DNA, 1026 bp, Oryza sativa
  Clone ID: PAT_MRT4530_11071C.1
atggtgaggccgccgtgctgcgacaaggacggcgtcaagaagggcccgtggacgccggaggaggacctcgtcctcgtctcctacgtccaggagcacggccccggcaactggcgcgccgtcccgaccagaacagggctgatgcggtgcagcaagagctgtaggctccggtggaccaactacctgaggcccgggatcaagcggggaaacttcaccgaccaggaggagaagctcatcgtccacctccaggcgctcctcggcaaccgctgggcggccatcgcgtcgtacctccccgagcgcacggacaacgacatcaagaactactggaacacccacctcaagcgcaagctgcagggcggcggcgccggcggtgacggagacggtggcgccgccggcgacgcggtctccccgaagcccgccgcgcagaggcccgcgtcgtcgtccaaggggcagtgggagcggcgcctgcagaccgacatcgacatggcgcgccgcgcgctccgcgaggcgctcacgtcgctcgacgacgtcaagccaccgcatcagcccgacgccgccaacgccgccgcggggggaggcggcgccaccaccggagcagcagcgtccgccggcgccgatagccccgccgcgtcgagcacgtcgggggcgtcgcagtgctccccgtcatccgccggctacgtcctcaccaccgagaacatctcccggatgctcgacgggtgggcccggaagaagggcggcggcggcggcaggcgcgccgccggcagcgggccggccacccccggcgccaccgagagcgcgtccggctcgtcggaagcctccgaggtgtcctacggcggcacggccttgtccgcagcggcggcgcccgcgtccgccttcgagtacgagacaaagccgaccgtcaccgccgccgccgccgccgacgccggcgacgagacgcagctctccgccatcgagtcgtggctgttcgccgacgccgacggcatcgagagtggcagcttgctcgacgcggccatggattacaccttctaa

SEQ ID NO: 4164 - DNA, 248 bp, Oryza sativa
  Clone ID: PAT_MRT4530_11072C.1
tatgtatatttttttttttttttttattttgtaacccgagatagccgaccacgtcacttgcatgtttgtgcttgagctgagcccgccaacgccgcgcgccatgcgcccaccgagctgaggcacacgagacgccgagaggcagggcaaggcaagaacgccatgcgcgcgctccggccgccgacagcaccggctccggctgtgacgccgtcgccggagccattaccaaatgctgagatgtttgaaggggg

SEQ ID NO: 4165 - DNA, 1284 bp, Oryza sativa
  Clone ID: PAT_MRT4530_11073C.1
atggcaacattgccgcaaatggccgcgaccaaggagcgtcaagaggcggctaacccgaccacgacgaccaggacgctggtcgagtccgtcaccaactggatccgcgtctactccgacggctccgtcgaccgcctcggcccgccggaagccgccgcgttcatggtcctcgtcccgccgtacgacgacccacgcgacggggtcaccgtccacgacgtcgccacggaccatggcgtcgacgtccgcctgtacctgacgacgacggcgccggccaggcgccgccctgttctcgttcatttccacggcggcggcttctgcttgtcccacgccgcgtggtcgctctgccaccgcttctacgcccgcctcaccgtggacctcgacgtcgcgggcatcgtctccgtcgtcctcccgctcgcgccggagcaccgcctacccgccgccatcgacgccggacacgccgcgctgctctggctccgtgacgtcgcgtccgggggcagcgacaccatcgcacatcctgcggtcgaacgcctttgcggcgccgccgacttctcacgcgtgttcctcatcggcgacagcgcgggcggcgtcctcgtgcacaacgtggcggcacgcgccggcgaggctggggccgaggcgctcgacccgatacgcctcgccggtggtgtccagctccacccgggcttcatcttgccggagaagagcccgtcggagctggagaacccgcccaccccgttcatgacgcaggagacggtggacaagttcgtcgtgctcgcgttgccgccgacgaaagacaccgagaagttcatctgccgcgccgatgtttacggcagcgagcccagtgacctcgccggaaagttcgcgccggtgcccaggtgcgagaaaggtggcaggctcttcttcactagctgcaagcggcacaaggggagtagcaccaggaaagagcgaaccgcgggggatggcacctgggtgaggcagaacagcaagggggtgaagaacaaggcaggggtcaaggtcggcgagacgcagaacttccgtttcaagaaggacgggagctacaccgactggctgatggaggagcaccactgctgccggcagcaagccgtcgccggcgacgaggagcccgtcatctgccggatgtatgtgtcgccgagggcgcctccggattccgcggcgcgccaggaatccgctgcttttgtgcagcagcagccggcgccgcaggtttccgagccgccgtgcgacaagaagaagagagatgatgtggcagaagaagcccctgccgcagcttag

SEQ ID NO: 4166 - DNA, 180 bp, Oryza sativa
  Clone ID: PAT_MRT4530_11074C.1
atgacgcgtttgaattgtcggttcggcgccaggtcgaaaatttataagggcggcggggagagaacaacggccggcgacacaagcagagcagcagatatttttgcttcgtactactacagtcgcacgagattccaggggcttttaactatttgccactcttacggatccaaagaggaatga

SEQ ID NO: 4167 - DNA, 1632 bp, Oryza sativa
  Clone ID: PAT_MRT4530_11075C.1
atggcaacattgctcctctgggccgctgctgcgatgccaacagtggcggatatcggccgcgaccaaggagggtcacgaggcggctaacccgcccacggcgtccgggacgccggtggcgtccgcgaccaacgcgttgggcgtctagtccgaccgctgcgtcgggcgcctcggcccgccggaagccaccgcgttcacggtgctcgcccccccgtacgcggccccgcgggagggggtgaccgtcgacgacgtcggcagggaccatggcggccacggccgcgtgtacctgtcgacgaacgacgccgcggcggcgtctgcttgtcccacgccgcgtggtcgctctaccaccgcttctacgcccgcctcgccgtggagctcgacgtcgcgggcatcgtctccgtcgtcctcccgctcgcgccggagcaccgcctccccgccgccatcgacgccggacacgccgcgctgctctggctccgtgacgtcgcgtgcggcaccagcgacaccatcgcgcaccatgcggtcgaacgccttcgcgacgccgccgacttctcccgcgtgttcctcatcggcgacagcgcgggcggcgtcctcgtgcacaacgtggcggcacgcgccggcgaggctggggccgaggctctcgacccgatacgcctcgccggcggtgtcctcctccacccgggcttcatcttgccggagaagagcccgtcggagctggagaaccctcccacgccgttcatgacgcaggagacggtggacaagttcgtcatgctcgcgttgccggtgggaaccaccagcagggaccacccgtacacgtctccggcggcggcggtgacggcggcggagggagcccagctgccgccgatgctggtgatggtcgcggaggaggacatgctccgcgacgcgcaggtggagtacggcgaggccatggcgcgcgcgggcaaggcagtggaaacggtgttaaacaagtttcccgcgcaatgcatacgtgttttcgtttctccgatccgcttacgaaatttcgatttgatggagaaacacgtcgagaagatgctcagtttaggctttcgtttcaacccgtctgcagaggatctcatcaccttctacctgccacggctgatcgccggcaagccaatgaaagacaccgagaaattcatctgccgcgctgatgtttacggcagcgagcccagtgacctcgccggaaagttcgcgccggtgcccaggtgcgagaaaggcggcaggttcttcttcactagctgcaagcggcacaaggggagtagcaccaagaaagagcgaacggcgggggctggcacctgggtgaggcagaacagcaaggaggtgaagaacaaggcgggggtcaaggtcggcgagacgcagaacttccgtttcaagaaggacgggagctacaccgactggctgatggaggagcaccactgctgccggcagcaagccgtcgccggcgacgaggagcccgtcatctgccggatgtacgtgtccccgcgggcgcctccggattccgcggcgcgccaggaatccgctgctttcgtgcagcagcagccggcgccgcaggtttccgagccgccgtgcgacaagaagaagagagatgatgtggcagaagaagcccctgccgcggcttag

SEQ ID NO: 4168 - DNA, 455 bp, Oryza sativa
  Clone ID: PAT_MRT4530_11076C.1
ccgtccggcacaatgtatggtgagttgcgactagcaacatcacactatagctaaatagaagcggctatgcaagggacatacagataagcagagatcagtgacaaacatagtgcgcattcttaacgtgcgcgtacagttttcatgactcacactgacccctagaggacatagcagctagggaatgggagggcaatagataggctgcaccgagcgatgcattgtaagaagctgctgatacgtccatctaaaagatagaaggatccagtgacgcttatgaccggggtgatgtatgtaccaccggagccgtgatagatggcgtgataggcaccacgaccacaagacacatagtgccgcctcagcttcgggatgatgaattcagagccgaatgagcactcattcgagtgagaacttacattgcgaagcgacttgcgagcgaggcatatataatcgaatga

SEQ ID NO: 4169 - DNA, 3045 bp, Oryza sativa
  Clone ID: PAT_MRT4530_11077C.1
atggagccgcgggatcagtgcgtcgcgccacatcaccctccagcaaggcagcagcgggcactccttccaccaccatcgccacgccttgctcttcctgcgcctccagccacgccgaccatgatctccgtcgaaggccatcccatcaagcctctcttgcagagcgagatggaagaaaggcgtcgtctcggtctctgctacaactgcaacgaaaaattcggccgtggacacaacaaggtatgccagcgcctcttcttgctggacatggcaaacgattccgacgatgagtctcagggcgccggcgacgacgacacggagccgcacatctccctccacgccatcgccggcatccgccttagcgcgaccacgcagctacgcatcacgatcggcgacatcactctcttggcattactcgactcgggctccaccaacaatttcatctccgaggaggcagctacatgcacatccatgaaactgcaccaacgcgcaagcatgaaggtcattgtcgccaacggagagcaggttccctacctcggcgtcctgcgccaagcatcgttcatcatcaacggagacaacttcaccgccgatctcttcgtcctacccttggccggatatgatgttgtccttggcactaattggcttgcgtctctgggccctatcctttgggattttagctccaggaccatgtctttttggccgcgggatcgtcaagtccgatggcaaggagtggcaggaccggaggcaaccactttgcacaccgcatccgccggcgacaaccttctcgaggcgctgctcaccgtgttcgccgatgtcttcaccgagcctcaaggtcttccgctgccgcggagtcgcgaccacaacatcatcctcacgccaggggcacaaccggcggccgtccggccataccgatacccggccacgcacaaggacgagctggagcggcagtgcaaggccatgatggagcaaggcctcatctgcaggagctcttcagcgttctcctcgccggttttactcgtcaagaaagccgatgcaacatggcgtttctgcgtcgactaccgcgcactgaatgccatcaccatcaaggacgcttttcccatcccggtggtagatgaacttttggacaagcttcatggcgccaagttcttcaccaagctggacctccgctcaggatatcaccaagtccggatgaacccggccgacatcgccaagacggcgttctgcatgcatgatggcctgtatgagttcctgcaccgactctacgtcaagcgttccaagtgcgcgttcggggtctcctccatctcctaccttggtcacgtcatcaccgtggctggcgtcgccatggatctggcaaaggtgcaggctgtccgtgactggcctcaaccacagtcggtcttggccgtgaggggcttctcggcttggcaggctactaccgcaaattcgtccgcgaactacggcaccatagcggcaccattaacggcgctgctcaagaaagaaggcttcctgtggagtgacgatgcaacgtcagcattccaagcgctcaagacagcggtcacgtcggcggcggtcctcatcttgccggacttctccaagccattcgtcgtcgaatgtgatgcctcgtctcatgggtttggcgccgtgctcatacaagacaagcatccggtcgcatacttcagcaagccggtcgcccctcgtcatcgctcgcttaccgcatacgagcgcgaactgatcggcctcgtccacgccattcgtcattggcggccatatctatggagacgccgtttcttgcaccattgggtcggcaagctcctcggcttcgacttcaccgtcgagtacaaaccgggcgccatgaacacggtggccgatgcactttcccgccgcaacacagaagacagcgccctactcgccatctccacgcctcggttcgactacatcgagcgtcttcggcaagctcaagctactgaccccgctctcgtcgcaattcgagatgagatcactgccgacacaaggctaccaccatggtcaccaatcgacggtatggtggctttcgattcacacatctacatcccaccgtcatcaccaatgctagccgagccgctgaccgccatccacgacgacggccatgaaggggtgcagcacaccatccaccgtatccgccacgacttccacatccccaacatacgtcgagtggtacaagactacgtcagggcatgcgcgacttgccagcagtacaagtcagagcatctccacccaaccggcctcctcatgcccttgcctgtgccgatagctatttgggctgatgtcgccctcgacttcgttgaggcactgccacgcgtcagtggcaagtcggtcatcctcacgtccatggtctccgaccgtgacccggtgttcacctctacgttctggcgcgaactgatgcggctcatgggcacgaagctgcacatgacgacggcgttccatccacaatccgacggcgagtcggaggcagcaaaccgggtcatcatcatgtacctgcgttgtttcaccggcgaccgaccacgacaatggctccgatggctcccatgggccgagtacgtctacaacacggcctaccaaacttcgctacgcgatacaccgtttcgtgtggtgtacggccgcgacccaccaaccattcggtcatacgagccgggcgaaacacgggtggcagccgtcgctcgcaacatggaagaacgggacgacttcctagccgatgtgcgctatcgcctggagcaagctgtccagaaggcattctacaactggcatcaccgtgcagtctcctatgaggtgggcgactgggtttggcttcgcctctgccaccgagcgccagcttctctcccacagatcacgaaaggcaagctcaagccacggttcttcggcccataccacgtcatcgagctcatcaacaacctcgcggtgcgcctcgcacttcctgcacgcgctcgtcttcatgatgtcttccacgtcggcctactcaagaagttcgtcggcactctcccggacgcaccaccgccactgccggccatccacaattaa

SEQ ID NO: 4170 - DNA, 1055 bp, Oryza sativa
  Clone ID: PAT_MRT4530_11078C.1
ggcaaatccccaaatcgaacccgccgcctcccaaaccctcgctctcccagccccaagaacctcgccgccgccgccgccgccttcggccaccggccaccgccgcctcccgaccggccgccatggcgcgaaacgaggagaaggctcagtccatgctgaaccgcttcatcacgatgaagcaggaggagaagcggaagccacgggagcggcggccgtacctcgcctccgagtgccgcgacctcgccgacgccgagcggtggcgctccgagatcctccgcgagatcggcgccaaggtcgccgagatccagaacgagggcctcggggagcaccgcctccgcgacctcaacgacgagatcaacaagctcctccgcgagcgcggccactgggagcgccgcatcgtcgagctcggcggccgcgaccactcccgcagctccaacgcgcccctcatgaccgacctcgacggcaacatcgtcgccatacccaacccctccggccgcggccccgggtaccgctacttcggcgccgccaagaagctccctggcgtccgtgagctcttcgacaagccacccgaggtccgtaagcggcggacccgctatgagatccacaagcgcatcaacgcagggtactacggttactacgacgacgaagacggcatgctagagcggctcgaggccgttgccgagaagcgcatgcgcaatgaggtcatcactgagtggcaccgtgtggagcgggtgcggcgggaggccatgaagggggtagtgagcggcgaggtggcctcggcaggtgggcgcggcggggaggctgctagggaggtgctgttcgaggaggtggaggaggaggttgaggaggagaggaggctggaggaggagaagagggagagagagaagggcgaggaggctgggaaggagtttatcgcgcatgtgccgctacccgatgagaaggagattgagcggatggtgttggagcggaagaagaaggagctgctgagcaagtacaccagcgacgccctgcaggttgagcaggaagaggccaaggagatgctcaatgtgcgccgctag

SEQ ID NO: 4171 - DNA, 330 bp, Oryza sativa
  Clone ID: PAT_MRT4530_11079C.1
tatatattaatatttttgatacaaaacaaacatattataaaatatatttaatattgttttgaaatccaattcggcctccggagacgatactaacttcaaacggatctagaggcttcatgtcaactccgacttaggtgatcttggacttgatgaaaagcttaccttgtcacctttaatacgcatccggtcttatatccaaattcatctcgagtcaataggaatcgtcaaaacaggacagtgttgttgctgaaaccaaacttaggccttagatcttgtaatatactacgcccatctcggaagtgtctccctccacctttatgaattagcact

SEQ ID NO: 4172 - DNA, 1347 bp, Oryza sativa
  Clone ID: PAT_MRT4530_1107C.1
ccgcccttctaagatcacaaggtgagttcctccccctccaaatcttgggagaaagatgggccctttgctttctctcacctccaaatcccctgcttcctgatccgttttcagcagccgcagtagctcggcgagccggcagccgacgggtccaatggcgcaggatgattcggttgtttctgctcagtggctgcatgagcacttagggcagcctgatgttaaggtgctggatgcttcctggtacatgcctgtagagaagagggatccatggcaagaataccaggtggcccatatccctggtgcgctgttcttcgacatagatggcatagttgacctgacaactgatttgccacacatgctgccatcacaagaggcttttgcagccgcagtttctgcgctcgatataaaaaaccatgataaagttattgtttatgatggaaagggatttttcagtgcacctcgtgtatggtggatgttcagagtttatggacacaataaaatttgggtgttagatggaggtttacctcagtggcgaacttctggatttgttcttgagagtagcacccctggtgatgtagttcagaaaactaaagctgctaacagtgttgttgaaaggatttataatggtcaactggcaagtgatgtaacatttcagactgaatttcagcctcatatattctggacactagaaaaggttaaacataacatggatgcacagtctcaccaagtcgttgatgcccgatcaaagggcagatttgatggtgtagcaccagaaccacgggaaggagtaagaagtggacatatcccagggacaaaatgtgttccattccttgagatgtttgatgatgcaccaatgcttctccctgcagatgagatccgtaaaaagtttgagcaagcagggatatcccttgatcgccccattgtagtcacttgtggatctggtgtaactgcctgcatacttgctttgggactctatagaattgggaagcaagatattccagtttatgatggatcttggacagaatgggaagctctaccggatcatgattatccaaaagttacctccaatggttcttaaaatcatcagctccgaaatgatggattcatctgctgcatttttcaccattcagtttagattgtcagctggactgtgttctctttgacatgcttagcgtttgaatcaaaaggaagcggaaatgtgcactcttggcaattttgatgaggccatattcaatattaaacttagatcgatgatgtactgaatgttatcgttaaacaataataagcataccaattgattttatatcagaaaaaaaaaataaaaaaaaaaaaaaaaaaaaaaaaaaataa

SEQ ID NO: 4173 - DNA, 249 bp, Oryza sativa
  Clone ID: PAT_MRT4530_11080C.1
atgtccagcacgatcctcaacagagctgtatcatctgacaaaagccccactaacgtcacgtggaggcacaggggattggtgacgtatcgccgtagaggtacaggagccatgctttggctggtggtggcggcctggcggggggagggtggaggaaagtacgggattgcccctggggaatggggattagccggcgtggacttttcagagtcaagggacgaccctgacagggatcctttagtaaataaataa

SEQ ID NO: 4174 - DNA, 454 bp, Oryza sativa
  Clone ID: PAT_MRT4530_11081C.1
gataaaccgacccagtcatgcagcagcagtgttgccacacagctcaggctggtagccccaccatctcactacctcagcgcccattagtattgttcaagcggattgtggccaacaagcgtacaaactgccacgccaatttagtggtggtcttactttgatccagactcaagcgtcaagccccaaactcttgttgacccttccaacattgcccatccactatgtggtatctaccctaactactatagtgctccccacggagcacttgcccctgttggtggtgttctggtactgaattgtaaccatataatagttcgtatgttaaaaataaagtcaaacatcatcatgtgtgactgttgaaacttagggtcatataaatctaaataaaatcattttacctatttaaatagccttcctttatgaggataaatcctattaaaaaaaaaaaaaaaaaaaa

SEQ ID NO: 4175 - DNA, 801 bp, Oryza sativa
  Clone ID: PAT_MRT4530_11082C.1
atgacgccggtgacgtacgtgttgcagaaggcgagcaccagcgcgacgaggcaggcgacggcgacgtggtggtactttcagctcggtgtagaggcgcagtacaacaatggtggacatgaccgacaggaccacatacccggcgacggcggccacgctgggcatccggtcacggacgaacacttgcttctgccgccgggcggaggggcggcggcagcggtgagcgcggcggcgagtgaggaagggtggagggacggcggcggcggcgaagtgagcgcggcggcggaggaggcgaggcggcggcggcgaggcgagcgtggcggcggaggaggcgaggcggcggcgaggcagggcggcggcgaggcggcggtggcgaggcgagcgcggcggcgaacgaggcgaggtggcggcgaggcagggcggaggcaggagcggcggcggcggcggaggaggcgaggtggcggcgaggcagggcgaaggggcatcggcagcgaggcagggcggaagggcggcagcggcggcaaagcgagcgcggcggcggaggtccacgccggcgacgggatgaggacgacgacggatggggatgaccagcttgctcatctaggcgccgtggaactccttgccgccgctcgtcttcgcgaagactccggcctccccgtccttcttgacgacgccgacgacctccgcgccgccgctgctgctgccctgcctcgcgatcgcctcgccgtcgcactcgccgccgccgccgcccctccgctctgcctcgccgccgctgcccctccgccctgctcaccgtgcgcgtga

SEQ ID NO: 4176 - DNA, 596 bp, Oryza sativa
  Clone ID: PAT_MRT4530_11083C.1
aaaaaatgcatatgcaacagataaacaagttgagaacatacatggcttttccccctttcaagaatgatgctcatacttcaatgcagcacctgttgtttagactgaaccaggtgtcaatctagacccaacataggcacagatggaccatcttaatctaaattaccttcatccttttgacattattcttttccttaaatattagagagacagacaggaccactgaaccatgatacatgataatgatatctctggttccatgtcacggctagccagcgaagcttaagcggttgaggatgcaggggaatctgatttctgatatacaaatatgatacatgtgtggaataacttgtgcgactgacttgaccaaacatcgcgttgctaattcgtcatcaacaataagttccaaattgtcaggattcaaaacttcaccactatagtagctgaaccaatgttgagaagttcggcttataatctcagtaggaaactccaataggaatagctaattggctatagctgttcatgtttgaatccttctttggaggcttcacaattgaaagtacaaacaatacaaaatatcgtatatcaatgatatacta

SEQ ID NO: 4177 - DNA, 960 bp, Oryza sativa
  Clone ID: PAT_MRT4530_11084C.1
atggccatggcgggcgccggcgactggccgttcgccgccgacgaagcgtacgccgactcgtcggccatattcgccgagctcggctgggccaacgggctcgccgtcgtcgacgccgtgggggagctactgccgccgctggatccaccgggcgagctggccacgccgccgccgccgccgctggatctgccggagacgccggccgggtcctccgcggacggcgccgcgtcgtcgtgctccaccgacgacgccgacggcgggaagccggccgccgcgtccaccgaggcagcgagcaagtcgctgacgcctgggaagaagagggcgcggcaaccgcggttcgcgttcatgacgaagagcgagatcgatcacctggaggatggctatcgctggagaaagtatggccagaaagccgtcaagaacagtccttttccaaggtgcacgaacagcaagtgcacggtgaagaagcgggtggagcgctcctccgacgacccctccgtcgtcatcaccacctacgagggccaacactcccaccacaccgtcaccttcccccgcgccgccgccaccgccgccggcttctcgcacatccacgccatggccgccctggccgccgcacccttctccgcgcaccaacaactgtacagcaacctgcagccgccgccgccgacgatgccgcttgctgctactactccggcgtcgtcgtcgtcgctgctacagctgcctctgcactgcaaccatgagctgcaggttgttgccagctgcggcggctacccgtcgtcgtcgtcgtcgccgccggcgagtgttcttcccgtcgacaaggggctccttgatgacatggtgcctagggcaatgaggcatgatggccgtgcgccgccgccgatcctgtcgtcgtcgtcgctcgggaaggctgccgtcgtgatcgccaagccgtcgccgacctcgtccgcccctccgtcgtcgccgtag

SEQ ID NO: 4178 - DNA, 159 bp, Oryza sativa
  Clone ID: PAT_MRT4530_11085C.1
atggatggattcagtttcagagtgagctgcacctcccaggcacagcacgcagctgggctgcaggaggtgcagggggagaggaatcattcaggaattaccgaaaatttttctgcaggcttggcacccggcaaggctgcagcaggggagcctgtgctggag

SEQ ID NO: 4179 - DNA, 247 bp, Oryza sativa
  Clone ID: PAT_MRT4530_11086C.1
gacgttcgaaccgccactttggattccccactatggacgccggcggcggaggccacggcggcgccatggcggtgtcggcggcggcggcggtgatggactaggcggacgccgtctttttcttccgccgcgggaaccggtgctgctgcttctgggggccgtgggcgttgtcgtcgtactcccgcgccggtggccttgttgtggcagtggaggaggagtggtggtacctcgtttggggagggggagggga

SEQ ID NO: 4180 - DNA, 104 bp, Oryza sativa
  Clone ID: PAT_MRT4530_11087C.1
atatgcggggtcccctatctgtacaaaaccggtcatccgaggtctttcggcggtattgaccccggttttggtctacgtggcggctgagacagcgtgggacccat

SEQ ID NO: 4181 - DNA, 207 bp, Oryza sativa
  Clone ID: PAT_MRT4530_11088C.1
atggtagcccccggccaaacacggttcctccgtgggaggatctgttttggcccgagcgttacaaacttacaggactgctgtctagggataaaacttgcgcaggtgttcgatgttccaaggattgggcagcgggttccatcctcggttgccaacctcagggatcctggtcacgagatgccaatgaccaggaagggtccctcccactga

SEQ ID NO: 4182 - DNA, 870 bp, Oryza sativa
  Clone ID: PAT_MRT4530_11089C.1
atgtcgaccgccggcggcggcggcggcggccggcgggtcaccatcaggtccatctcctgcaggggcgtcaaggcgttcgtccccttccagaagccgccgctctacgccgccgtgtcgctcgccggccgccgggagaagacgagcggcgaccccgacggcggggagaacccggactgggacgccgccgtcttcgccttcgacctccccgccgccgcggatggtatgctgcagttcgaggtgaaggcgcaggtgccgctgctcgggagcaagctcgtcggcaagttgtgttgcttactacatgatcttggaataagttcaacggaggactctcaacttgatagcgagaaatcgagggaggccgacggctggcgggcgagcacggcggcgggcctgtgtggcagcggagcggcggcgggcggcgagcggagcgcggcggatgagttcgccgtcgtgcctcccgccggctcctgcgtctccgccacccacactgtctaccactacgaggcggcggtcagagcaacccccgtccttgtcgtgcttcttcccttcgtcggaagcgagcggaaggcgaagcaggagagcgagctcgtcattgccaaaacaggcgacgtcatcgcctcaacctactacatgagagcgtgggagcgcgacgccggcgcagaggcggacgcgttgctagaggagctgtggaacgtgaaggccaagctcgagctcgccgagacgaaggcggtggcggcgggcgcgctggcggagaaggcgcgagatgcgtacgagcgtgacagggaggacatgaggtgcacagtgcgccgtgctccaccgctacccgcacctcgacctggccaggatcgtcgtcgcgcaaccgggcgataa

SEQ ID NO: 4183 - DNA, 663 bp, Oryza sativa
  unsure (1)..(663): unsure at all n locations
  Clone ID: PAT_MRT4530_1108C.1
atgggatgcgcgtcgtcgaagcagttcaagcggccgccgggtgttcttgcagttacggtgaacgaggtggaggcgctgcgcgagctgtacaacaagatgagctattccatcatcaaggacggcctcatccacaaggaggagtttcagcttgccttgttcaggaacagcagaaaggcgaatctcttcgcagacagggtgtttgatttgtttgatctgaagagaaatggggtaatcgaatttggggagtttgtacggtcgctcagtgtgttccacccaaaagcgcctaaatcagagaagactgcgtttgcattcaagctctatgatctaagagggacaggatatattgagaaagaagagctcagggagatggtcttggcacttctagatgaatcagacctacatctttccgaatgcgctgtcgaggcaattgtcgataatacattcagtcaagcagactcaaatggagatggcaggatagaccctgaggaatgggaagaatttgttaaggcgaacccggcatcactaaggaacatgtcacttccctatttgcaggacattaccatggcgttcccgagctttgtaatgcattcagaagcccatgactgaaaatncagntcccattgggacggttttcaagnaaccaaaagttctccatttgttgct

SEQ ID NO: 4184 - DNA, 1122 bp, Oryza sativa
  Clone ID: PAT_MRT4530_11090C.1
atgtcgaccgccggcggcggcggcggcggccggcgggtcaccatcaggtccatctcctgcaggggcgtcaaggcgttcgtccccttccagaagccgccgctctacgccgccgtgtcgctcgccggacgccgggagaagacgagcggcgaccccgacggcggggagaacccggactgggacgccgacgtcttcgccttcgaactccccgacgacgaggatgacctcgccgtcgccggcggcgacggcgcggcggcggcgccgaggcacgtgagctaccaggtgtgcgcccccgacggcaaggcgaacggcaagctcagcttcaccttcgccgtcaccggcggcggcgcgtaccagcagccgcagttgtgttgcttactacatgatcttggaataagttcaacggaggactctcaacttgatagcgagaaattggccggatggtggggagcctggcgtagtccggtgtggctcggagtcaagcgtgcgggcggtcgagcggtggcggtgtcgcgatgggttcgccttcgtgcctcccgccggctcctgcgtctccggcacccacgctttctaccactacgaggcggcggtcagagcgacccccgtccttgtcgtgcttctgcccttcgtcggaagcgagcggaaggcgaagcaggtaggcgacagcggcagatcagcgccgggcgacgcgcgatagcggggcggctggcaaaaggcgagcacggccgcaggcggcgaactggtggtttgctgccagatagtgccgccaccgcgcgaaggcgagtggaaggtggtgacgcagctgtgcagggcatcgtgacaccatcgcaggagagcgagctcgtcattgccaaaacaggcgacgtcatcgcctcaacctactacatgagagcgtgggagcgcgacgccggcgcagaggcggacgcgttgctagaggagctgtggaacgtgaaggccaagctcgagctcgccgagacgaaggcggtggcggcgggcgcgctgtcggagaaggcgcgagatgcgtacgagcgtgacagggaggacatgaggtgcacagtgcgccgtgctccaccgctacccgcacctcgacctggccaggatcgtcgtcgcgcaaccgggcgataa

SEQ ID NO: 4185 - DNA, 1767 bp, Oryza sativa
  unsure (1)..(1767): unsure at all n locations
  Clone ID: PAT_MRT4530_11091C.1
atggtcaactacatctacgacaccttgtggtcccgccgagacaagaaaattgataagaacgcatatgattggaccccaattcaactagcgatagatgaagcgtgggcccaatacgtgcaaagaggaggcctcaggaagacaggacatgacaccctcatccacaaaaaagacttctcggtgaagcaacaaataggtgaccagtgcggattccatgtgtgccacaatatgcgacttctgtatagagaaaaggtgaagactttggctgagtttgagggcacaataaccaagtctctgactaccagctttgaggaggggcgtcaaggcgttcgtccccttccagaagccgccgctctacgccgccgtgtcgctcgccggccgccggggaagacgagcggcgaccccgacggcggggagaacccggactgggacgccgccgtcttcgccttcgacctccccgccgccgcggatggtatgctgcagttcgaggtgaaggcgcagggcgctgctcgggagcaagctcgtcggcaaggatgtccgntgccgctggcagacctcgccgtcgccggcggcgacggcgcggcggcggcgccgaggcacgtgagctaccaggtgtgcgcccccgacggcaaggcgaacggcaagctcagcttcaccttcgccgtcaccggcggcggcgcgtaccagcagccgcaggtggatcatccaactccaatctcctcctcttgctgcgcgccaccgccgacgtcgacgacgacgacgacgtcgggtgcgccgtatccgcctccggcgatggcaagctacccgccgctgccatcgctgtccgcgacaccgtcagcttcactgtacccaccgccgccgccgagcagctaccctcctcctccaccgccgccgccgccgccgcctcacgtgacgcaaagcttcgcaccaaacagcagctacccgccgccgcctcctccgtcgcagtacatcgccggctacccgccgccaccaccgagcaacttctacccgccaccgccggcaggctacccggcgcccagtttcccctctccgacgagcacctacccgccaccgccgccgccggagtcagcctcatcgcagtatccaccaccactgccaagatcggcgccatgctgcgatcgctcggtggaccgtgcgctgccgtcgtacatgtcgccgccgagggaggccgacggctggcgggcgagcacggcggcgggcctgtgtggcagcggagcggcggcgggcggcgagcggagcgcggcggatgagttcgccgtcgtgcctcccgccggctcctgcgtctccgccacccacactgtctaccactacgaggcggcggtcagagcaacccccgtccttgtcgtgcttcttcccttcgtcggaagcgagcggaaggcgaagcagtgccgccacggcggaaggcgagtggaaggtggtgacgcagctgtgcagggcatcgtgacaccatcgcaggagagcgagctcgtcattgccaaaacaggcgacgtcatcgcctcaacctactacatgagagcgtgggagcgcgacgccggcgcagaggcggacgcgttgctagaggagctgtggaacgtgaaggccaagctcgagctcgccgagacgaaggcggtggcggcgggcgcgctggcggagaaggcgcgagatgcgtacgagcgtgacagggaggacatgaggtgcacagtgcgccgtgctccaccgctacccgcacctcgacctggccaggatcgtcgtcgcgcaaccgggcgataa

SEQ ID NO: 4186 - DNA, 715 bp, Oryza sativa
  Clone ID: PAT_MRT4530_11092C.1
tctctctcttctgtcaacccagccatgggatactactacccacagtgccgctgccagccacaaccaggctgcagccatgtccactaccaccagctttgatggcaatcctgtggcaccctccgccatggcgggtagctacatggcaccaagcccctggacaggttctcggggccatgagggtggtggtcggagcgtggcgcaccagctaccacatgaagtctcacttgatgaggtgcaccctggtcctcgcccgcgtccccaccgcgccggcgggcgcgtgcgtgctctgcaggggaacggtccagccccagcaccacgcatcgatcctgggtccggcagcaccttcgaccaaaccagcaacacgatggattggtctctgtagaggctgttccagctgccatcgatctgtcgtcccgcaaggcgagtcatggaactgaagaacctcatgctgcctgcccttattttgtgttcaaattttcctttccagtatggaaaggaaattctaaggtgactggcgattaatctccctgtgatgaataataatgcgcgcccttgaactcaattaattgctgtgccgcatccatctatgtaactctccatgaatttttaagtatcagtgttaatgctgtattgtcgaggacttctgctcgatatgttatttctcttatgtggtccccatgaatctttttctgcttaaaaaaaaaaagaggggggg

SEQ ID NO: 4187 - DNA, 2662 bp, Oryza sativa
  Clone ID: PAT_MRT4530_11093C.1
atcggtaaaggttaggtcggtatgctgttgagtcgtacctggagcagatcttatctcatggatttttccatgcagatccgcatccaggaaatattgctgttgatgatgtcaacggtgggaggcttatcttctacgactttggaatgatgggaagcattagtccaaatatccgggaagggttgctcgaagcattctatggagtttatgaaaaagatcctgataaagtgcttcaatcaatgattcaaatgggtgtccttgctcctactggagatatgacggctgtcagaagaacagctcaatttttccttgatagcttcgaagagcgtttagcagcacaaaggaaagaaagagagatgtcggccgcggccggggcggccaccctcgtcgcctcctccgcctcgctctccgtgcccgaccacctccgcctccgccgcttccgcctccacctccacccgcgcccgccgccgccgcatccccagctccggtcccgctccctccggcagcgccgccgcttcgtgctcgccgtgctgcaggaggaccggtccccctccgcgccggatgaggaggcgaggaggtacgggctcaacgggagcgccccgagcagcggggtcgggtacgacgatgccgccgtggaggcctacctcgggaccaacggcaacgggagggggaacggtgcggcggcggtggtgaagcccgccgcggagtcacggagcagcgccgccttggtgtccgcggggcctgggccgggggatgatgagaggaggaggaaggagcgggtggaggagatcggcagggaggacgcctggttcaagcagagcggcggggattccaagcccgaggtgtctgtcgctcctggaggtcgctggaatcggtttaaaacctattcgacgattcaaaggacgttggaaatatggggctttgtttttaaatttatattcagatcttggctcaataatcagaagttcacttatcgaggagggatgacggaggagaaaagggtaatgaggaggaaagttcttgccaagtggcttaaggagagtattttgagactaggtcccacatttatcaaaattgggcagcagttctccaccagagtggacattcttccacaggaatatgtcgaccagttatctgaattacaggaccaagttcctccatttccttcagagacagcggtgtcaattattgaggaagagctaggggcatctgtgaataagatttttgatcgatttgactttgaaccaataggaggaacttggatttaagaagcaattaactaaggaggagaagtttgaaaaagaagaagcaaaggcttgctgctatcggagaggatcttttgtcaattgctgctgatcaaccatttcgatttcctgccacctttacttttgtggtcagagcattctcagtactagatggtatcgggaagggccttgatcctagatttgatatcacagagattgctaaaccatatgctatggagttgcttagatttaatgaagctggagttgaagttattgtaaaggatgcaaggaggaaaggttccagagattttgtgggagtatactacacctcaggtcttaacaatggaatacaaaagattgcgcaaatcaattgagcgtttggagcaaggtgatctcaagcttcgtgtcaaaaggttaggtccagaaagagcattcccaagagttgcagctgtacagaaacacaattggatatggagttgccgcaggtagtttggtaaacctcgccaccgttctctacctcaattcaactccggttgccagcgaccatagcatactctctctgcgcggttcttcggcctacaagtccttgtcggccttttgaaggtcaagaagttggatcaacaggagagactgataaccggcactgcttgagtcccgggcataaaaactggtgagaagcttgaacccgtgatttttttggtgtcatccacagcggctatatatcttccccgttttttgtttctttctgtccaaattttagatcccctacacgttgtagcatagccatcggtgtacgataactgtatatgtagatgcggtgaatagatgaaaatgtacatagtgtacaatagacattcactgaggtgttaaggtgcttttgtggttgcaactcaatcttaaatctctcagatgaaagcatagaaactaaatataataacaaagagattgctaaaccatatgctatggagttgcttagatttaatgaagctggagttgaagttattgtaaaggcaaacttgagagttttaagcgctcttggttttattttacctcaggatgcgaggaagagatgggaaaggcagtcccgtgcattctacaatttatttcgccagcccgacagagttgaaaagcttgcgcaaatcattgagcgtttggagcaaggtgatctcaagcttcgtgtcagaacattggagtcagaaagagcattccaaagagttgcagctgtacagaaaacaattggatatggagttgccgcaggtagtttggtaaacctcgccaccgttctctacctcaattcaatccggttgccagcgaccatagcatactctctctgcgcgttcttcggcctacaagtccttgtcggccttttgaaggtcaagaagttggatcaacaggagagactgataaccggcactgcttga

SEQ ID NO: 4188 - DNA, 348 bp, Oryza sativa
  Clone ID: PAT_MRT4530_11094C.1
atgtcgaccgccggcggcggcggcggcggccggcgggtcaccatcaggtccatctcctgcaggggcgtcaaggcgttcgtccccttccagaagccgccgctctacgccgccgtgtcgctcgccggccgccgggagaagacgagcggcgaccccgacggcggggagaacccggactgggacgccgccgtcttcgccttcgacctccccgccgccgcggatggtatgctgcagttcgaggtgaaggcgcaggtgccgctgctcgggagcaagctcgtcggcaaggtgtccgtgccgctggcagacctcgccgtcgccggcggcgacggcgcggcggcggcgccgaggcac

SEQ ID NO: 4189 - DNA, 194 bp, Oryza sativa
  Clone ID: PAT_MRT4530_11095C.1
acagcttctcagagagtgccgtaattggaaggggtgcttgtggcactgtctatataggctatcatgcctgatgggagaagggctgccgtgaaaaatctgaagtgccagggagaaggttccaatgtcgataagaagctttcgagctgagataaccacactcggtaatgtcagggcccggtacattgttaagctgc

SEQ ID NO: 4190 - DNA, 192 bp, Oryza sativa
  Clone ID: PAT_MRT4530_11096C.1
atgggttccccgtgccgctctctccgtttcgcccctctttcccctgccttcccgtcggcggagctcgccggcgcgaccccccagcgccgccgcttttgttgttggttgattccgaatccggtgctggaattcggccaaaccgtgaacgaatttggagccaatttctgcctctccgattcctactcttactag

SEQ ID NO: 4191 - DNA, 570 bp, Oryza sativa
  Clone ID: PAT_MRT4530_11097C.1
atggcggaggaggcatggagggagcggttccggcagcgcgtggcggaggtggacgacctcttcgttgaggcgttcgagctcctcgtcgacaacgcgcgtattcacctggaggcgcagatgctcgtgggcgacgcggcggcggcagagcgcgccaggatccagctcgcgcagggcgcgctcgaggacgcgtccggcaagctcgcctcggcgatgtccctcatggtaggggccaagctactcgtgctccgcggaggaagccacgaccccctgatgccttaccacgacatcggccatcttggggacgagtacgccgcggagaagaacgcgtgcgccaagctccgtggagccgagagggaagccgaggaagcgtgcgcccgtattggcatgtgcagcggacacctggagacgatcagccttctgctggaccatgagaatctccctggcgtcaacgacttgatcgagaacgagcgcctggatgcggctgttgatgacctcctggcggcgattgggaaggtggagtcggggaagaagatggccaacgacgcccggctggatgtcggcgcgaactga

SEQ ID NO: 4192 - DNA, 1482 bp, Oryza sativa
  Clone ID: PAT_MRT4530_11098C.1
ttttcttatcccatttctggttcggtcagatctcagtcgctttgaagtagatggctcgtcgttctacccgtcaaacccgtgctcctaatcgctttggttttgaagaagagccagttcagtcagagattcccgatcaaccagttaaccaagcagatgagcaagaagctgagagtgatcatacggttgcttccgaatcagttaataatgcaagaggtaatcaacccccacccatggaccttcaccaaatcctagccatgcaaactcagatattacaaggaatgattcagaatataattgctatgcaacaacaacacacacaagagcgtcaaccccatatggttcaagataatgggcgatcaaaactgaatgatttcttgacatcacgtccgccggagttctctcaaacaactgagcctattgaaggtgacgattggatcaaagatgtggaaaggagattaaatctggtacagtgtactccgtatgagaagaccctttacgctgctcatcagttgagaggacctaccgcagattggtgggataactattgtgctaaccatacagatgctggtaccatcgtctgggcagaatttgcataagtctttcgctcagcacacatccttgaaagcataattgatttgaagaaggaagaatttgcaaatatcaggcaaggatcctctggtatcaacgagtatttgagtcgcttcaacagattggcccgatatgccctagaagatgcagacactgataaaaagaagatcagaagatttttaaaaggaatggatgcgaaactgcgagtgaaacttttggctcacgacttctcgatgtttcagcaaatggtcgataagtccttgttactagaagatgcagaataagagatgcaagaatagaagagacgcaaagtaatatccttagagattcaagcaaaagaaggtttgtgtcaaaaaaaacaaactcgccagcacagtactatcagagagtatttcagtattccaatggtttcggttctacgtctcgctcgacaatgtcagaatctagtcagcaaaccacagtgatcaacagtaaaagccttgaaggaagtaactccgtgtcatgccctccacctccgaaaagacgtggtcataaggcaggagtcgaatgtttcatctgccatgagatgggacactattcatggtactgccctcagaaagtcaagtcaaagcaagttcaaccaacagcgagcctccctagcgtacccggaccaaaaagctcaaagtcaccaaacagtggatctgtctcgctaacctcaccgcctgttggacaaagtcatctgaaccatgtgcaagtggaaacaaaaggaaaagccgtgcccacggtcatgggcggatgtgaggtggttcccgttacgtagatctgtttgcctgtgctttatgaaaagttgttgtggattgggaattgtcaccagaatcagcctacgtggcagatggatgacctgagtggtcagaa

SEQ ID NO: 4193 - DNA, 465 bp, Oryza sativa
  Clone ID: PAT_MRT4530_11099C.1
ggaaacgtaaacgtatgattttgatataaaagggaagggtaaattgggggattgtaaaacagaccccagaaaaaacttaaaaattcaagaaaaaaattttttaacagggtacaccctagggcaacttttatttaaaaattttataacttgggcccttccaaaaaaaacccaaaaaaattttaggggcccaaccctttgttccaaaagggcaaaaaaaaaaccctaaaaagttttggccaaaatattttttttaaaggggcctgttttgcccggtggacgggcccaaaggttaacattttcaaatttttgggggaaaaaagaaataattccgcccaggagccattaaaaaggttcgcctggaagttttcccgacaagaaccctaataaaaattttttttggtgggttggccagttccttgccttgattggaggtaaagggaccaaattttgggatggaccgggggg

SEQ ID NO: 4194 - DNA, 1611 bp, Oryza sativa
  Clone ID: PAT_MRT4530_1109C.1
tagtggatccccgggctccacccccgattgtgctctctctcctccgctccgcggcgccgctctccttccgccgccgccgccgacgacgacgacgacctcctcctccgggtcgacgaaaccctagccgcggcgcggaggcctgctgcttccggctcccgctcctccctgccgagttcccgcgaacccttcgctgccggtgaaggaaggcgaggatggacggcggctacggctcggtcacaatcgtccacgacgcgcgctcccccgaggacgtcttccaggacttctgcggccgccgctccggcatcgtcaaggccctcaccatcgaggtggagaagttctacaagcagtgcgaccctgagaaggagaacttgtgcctctatggactgcctaatggaacctgggcagtgactctaccagctgatgaagttcctcctgaactaccagagccagccctcgggataaacttcgctcgtgatggaatgcaggaaaaagattggctgtccctgatagctgtccatagtgattcatggttactgtctgtggcattttactttggggctcgttttggatttgataaaaaggccagggaacggctcttcatgatgaccagtagtctccccactgtctttgaagttgtgtcaggaggtgtgaatacacaatcaaaaaccgccaacggcagtagcaaaaacaagtcaggctctaagccaccaaagcggcccaattctgacagcaagccacagaagcaggtccaggcaaagtatgaggaagagaacggcggcagaggaaatggaggtgatgaagatcaagctgaaaccatttgtggcgcctgtggtgaggcctacgcaaacggcgagttctggatttgctgtgacatttgtgagacctggttccatggcaaatgtgtccgaatcacccctgccaaggcggagcacatcaagcattacaagtgtcctggctgcagcaacaagaggaccagagaatgagcgtccattttttctttctaatgtgatcctgatagtagtggcaaaaaatagatagtagtttacccgtgaacttggggaacctcaattcctactgggtgaccgtcgttgcggcagccctggttgccccgctgtattagtagtagctacgttacttcttgtatcatactggacatagttggtagtgccccagtaatagtagtatcaataggccatcttctgcctccttggttggatggattggttaagtgtctaaactctctgattaatgatgtgattttttagtcaaaaaaaaaaaaaaaaaaaaaaaaaaaaaattgcttctaattcatttttttccctgttgatttgcatgaccttttctcaaactggtcattttaattctatctgatctatcactttactaaagaattcccacgtggctctatactatgtgcaaggatgcgagtacttatatgctgattccagagtcatggtagacttgtgagtctaggttgttctactgacacctgccatgatttaaatctgataattgatcatttattaatgatccgctctgctagctatgttaagtgtcacataacccatatttttcacaatagactcactgtgtcatgcatttatatgaaca

SEQ ID NO: 4195 - DNA, 700 bp, Oryza sativa
  Clone ID: PAT_MRT4530_110C.1
gcgggagaggcggctcccgccgccgctcttctcgtccccggacgccccctcgccggcggcggggcggcggcggaggaagggggaggacgaggacgacggggaggaccggcggcggcggtaccacgtcaacgtcggggacgccatccgggcgctgcgggaggagctccccgccgcgttctaccgggagcccagcttccatatctacagagatgatattgtcttcaaagatcctatcaataatttcacgggtattgataactacaaaaggatattctgggctctacggtttactgggcaaattttcttcaaagcactatggatcgacattatcagcatatggcagcctgtcgaggatgtaatcatgatccgctggattgtccatggcattcctagagttctctcggatggccctggcagatttgaaggcacctcagagtataagtttgacaagaatgggaagatctatgagcataaggggaatcccccgctgatgaccgccgccgacatgccggactccctgcagaggcagtccagcttccaccctggcagctcgccgccgccgccggagcccggcctcttctcgctcgacgcggcggtggacaacggcaagccaccggacgatggcgtcctgcccgcctcgcaggaggccgcagcgccgccgctcgccgacgccgggacgacggcgtcgtgggtgggctga

SEQ ID NO: 4196 - DNA, 1362 bp, Oryza sativa
  Clone ID: PAT_MRT4530_11100C.1
atggcacgtcgctccacccgtcagatccgtgcccctaaccgctttggttttgaggaagagctagttcagtcagaaatccccgatcaaccagttaaccggacagatgagcaagaagccgagagtgatcatacggttgcttccggatcagttaatgatgtcgcaagaggtaatcaacccccacccgtggaccttcaccaaatcctggccatgcaaacgcatataatacaaggaatggttcagaatataattgctatgcaacaacaacacacacaagagcgtcaaccccatatggttcaagatgatggcaaatcaaaactgaatgatttcttggggtctcgtccaccggagttctcccaaacaaatgagcctattgaagctgatgattggattaaagatatggaaaggaaattaaatctggtacagtgtactccgcaagagaaaaccctttacgccgcacatcagttaagaggacctgccgcagattggtgggataactactgtgctacccatacagatgctagtaccatcgtctggacagagtttgcaggagcctttcgctcagcacacatccctgaaagcataattgatttgaagaaggaagaatttgcaaatatcaagcaaggatcctcttgcatcaacgagtatttgagtcgcttcaatagattggcccgatatgccccagaagatgtagacactgataaaaagaagatcagaaaatttttaaaaggaatggacgcgaaactgcgagtgaaacttttggctcacgactttccgacgtttcagcaaatggtcgataagtccttgttactagaagatgcagaaaaagagatgcaagaatacaagagacgcaaagtaatgtccctagagattcaagcaaaagaagatttgtgtcgaaaaacaaactcgccagcacaatactatcagaaagcatctcagcattcaaatggttccggttctacgtctcgttcgactatgtcagaacctggtcagcaagccacaatgatcaacagtaatagccatgaaggaagcaactccgtaccatgccctacaccttcaaaaagacgtggttataaggcaggagtcgaatgtttcatctgccatgagatgggacactattcgtggtattgccctcagaaagtcaagtcaaagcgagttcaaccaacgacaggccttcccaacgtatctagaccaaaaagtttgaaggcaccgaacagtggatctatctcactgacgtcaccgcctattggacaaagtcatctgaaccatgtgcaagtagaaacaaatggaaaagttgtgaatctcgagcaagttgaaggagcaggagaagaacaggttccacaggcaagagcagagccacagtaa

SEQ ID NO: 4197 - DNA, 1386 bp, Oryza sativa
  Clone ID: PAT_MRT4530_11101C.1
atggcacgtcgctccacccgtcagatccgtgcccctaaccgctttggttttgaggaagagccagtccagccagaaattcccgatcaaccagttaaccaggcagatgagcaagaagctgagagtgatcatatggctgtttccggatcagttaatgatgtctcaagaggtaaccgacccccgccagtggactttcaccaacacatggccatgcaaacacatataatacaaggaatggttcagaatataattgctatgcaacaacaacacacacaagagcgtcaaccccatatggttcaagatgatggccaatcgaaactgaatgatttcttgggatctcgtccaccggagttctcccaaacaaatgagcctattgaagctgatgattggattaaagatatggaaaggaaattaaatctggtacagtgtactccgcaagagaaaaccctttacgccgcacatcagttaagaggacctgccgcagattggtgggataactactgtgctacccatacagatgctagtaccatcgtctggacagagtttgcaggagcctttcgctcagcacacatccctgaaagcataattgatttgaagaaggaagaatttgcaaatatcaagcaaggatcctcttgcatcaacgagtatttgagtcgcttcaatagattggcccgatatgccccagaagatgtagacactgataaaaagaagatcagaaaatttttaaaaggaatggacgcgaaactgcaagtgaaacttttggctcacgactttccgacgtttcagcaaatggtcgataagtccttgttactagaagatgcagaagaagagatgcaggaatacaagagacgcaaagtaatgtccctagagattcaagcaaaagaaggtttgtgtcgaaaaacaaacttgccagcacaatactatcagagagcatctcagcattcaaatggttccggttctacgtctcgttcgactatgtcagaacctggtcagcaagccacaatgatcaacagtaatagccatgaaggaagcaactccgtaccatgccctacaccttcaaaaagacgtggttataaggcaggagtcgaatgtttcatctgccatgagatgggacactattcgtgggattgccctcagaaagccaagataaagtgccttcacaaagtcaagacaaagccagtccaaccaacgacaattcttcccaacatacctggatcaaaaggctcgaagtcaccaaacagtggttctgcctcattgacctcactgcccgttggacaaggtcgtctgaaccatgtgcaagtagaaacaaatgaaaaggttgtgaatctcgagcaagttgaaggagcaggagaagaacaggttccacaggcaagagcaaagccacagtaa

SEQ ID NO: 4198 - DNA, 207 bp, Oryza sativa
  Clone ID: PAT_MRT4530_11102C.1
cccacgcgtccgcgcacgcgtaggggcgcgactatctccatcctccttgcatacaaaactgaagaggcgagagaagagattaatccttagaggtaaccatgactgtgcattactctacatgatatatggattttatgatgtatgctatcgccgatcaaatgtgcgtctatggaagggctacactgatagagacaactgtgtggatgt

SEQ ID NO: 4199 - DNA, 780 bp, Oryza sativa
  Clone ID: PAT_MRT4530_11103C.1
atggctcgtcgttctacccgtcaaacccgtgctcctaatcgctttggttttgaagaagagccagttcagtcagagattcccgatcaaccagttaaccaagcagatgagcaagaagctgagagtgatcatacggttgcttccgaatcagttaataatgcaagaggtaatcaacccccacccatggaccttcaccaaatcctagccatgcaaactcagatattacaaggaatgattcagaatataattgctatgcaacaacaacacacacaagagcgtcaaccccatatggttcaagataatgggcgatcaaaactgaatgatttcttgacatcacgtccgccggagttctctcaaacaactgagcctattgaaggtgacgattggatcaaagatgtggaaaggagattaaatctggtacagtgtactccgtatgagaagaccctttacgctgctcatcagttgagaggacctaccgcagattggtgggataactattgtgctaaccatacagatgctgcacacatccttgaaagcataattgatttgaagaaggaagaatttgcaaatatcaggcaaggatcctctggtatcaacgagtatttgagtcgcttcaacagattggcccgatatgccctagaagatgcagacactgataaaaagaagatcagaagatttttaaaaggaatggatgcgaaactgcgagtgaaacttttggctcacgacttctcgatgtttcagcaaatggtcgataagtccttgttactagaagatgcagaataa

SEQ ID NO: 4200 - DNA, 1629 bp, Oryza sativa
  Clone ID: PAT_MRT4530_11104C.1
atgaggtatccctgggtcggcttgggaaaggctttgtcgcgaacctctgacaccggccagtgtttggactggactctgggagtccgagaaaatgaaaaaggctctgggagccgattaatcaagtggaatggctctgggaagccgagaagtaatgatctgacccgggagaccgttggttccgctgctgctgttgttgttggtgttcgcctcgtccgtgtcgtcggttgtattctcgggctgtctgagttgcaacctaagttaagtcagatctcagccgctttgaagcagatggctcgtcgttctacccgtcagacccttgctcccaatcgctttggtgttgaagaagagctagttcagtcagaaattcccgatcaaccagttaaccagacagatgagcaagaagctgagagtgatcatatggctgcttccggatcagttaatgatgtctcaagaggtaaccgacccccaccagtggaccttcaccaactcatggccatgcagacccatatattacaaggagtgattcagaatataattgctatgcaacaacaacacactcaagagtgtcaaccccatatggttcaagataatggccgctcaaaattgaatgatttcttgagatctcgcccaccggagttctctcaaacaactgagcctattgaagctgacgattggatcaaagatgtggaaaggagattaaatctgttgagaggacctgccgcagattggtgggataactactgtgctacccatacagatgctagtaccatcgtctggacagagtttgcaggagcctttcgctcagcacacatccctgaaagcataattgatttgaagaaggaagaatttgcaaatatcaagcaaggatcctcttgcatcaacgagtatttgagtcgcttcaatagattggcccgatatgccccagaagatgtagacactgataaaaagaagatcagaagatttttaaaaggaatggatgcgaaactgcgagtgaaacttttggctcacgactttccgacgtttcagcaaatggtcgataagtccttgttactagaagatgcagaacaagagatgcaagaatacaagagacgcaaagtaatgtccctagagattcaagcaaaagaaggtttgtgtcgaaaaacaaactcgccagcacaatactatcagaaagcatctcagcattcaaatggttccggttctacgtctcgttcgactatgtcagaacctggtcagcaagccacaatgatcaatagtaatagccatgaaggaagcaactccgtaccatgccctacaccttcaaaaagacgtggtcataaggcaggagtcgaatgtttcatctgccatgagatgggacactattcgtgggattgccctcagaaagccaagataaagtgccttcacaaagtcaagacaaagccagttcaaccaacgacaatccttcccaacatacctggatcaaaaggttcgaagtcaccaaacagtggatctgtcctgctaacctcaccgcccgttggacaaggtcgtctgaaccatgtgcaagtagaaacaaatggaaaagttgtgaatctcgagcaagttgaaggagcaggagaagaacaggtttcacaggcaagagcagagccacagtaa

SEQ ID NO: 4201 - DNA, 1146 bp, Oryza sativa
  Clone ID: PAT_MRT4530_11105C.1
atggctcgtcgttctacccgtcagacccgtgctcccaatcgctttggtgttgaagaagagctagttcagtcagaaatccccgatcaaccagttaaccggacagatgagcaagaagccgagagtgatcatacggttacttccggatcagttaatgatgtcgcaagaggtaatcaacccccacccgtggaccttcaccaaatcctggccatgcaaacacatataatacaaggaatggttcagaatataattgctatgcaacaacaacacacacaagagcgtcaaccccatatggttcaagatgatgaccaatcaaaactgaatgatttcctgggatctcgtccaccggagttctcccaaacaaatgagcccattgaagctgatgattggattaaagatgtggaaaggaaattaaatctggtacagtgtactccacaagagaaaaccctttacgccgcacatcagttgagaggacctgccgcagattggtgggataactactgtgctacccatacagatgctagtaccatcgtctggacagagtttgcagaagcctttcgctcagcacatatcccagaaagcataattgatttgaagaaggaagaatttgcaaatatcaagcaaggatcctcttgcatcaacgagtatttgagtcgctttaatagattggcccgatatgccccagaagatgtagacactgataaaaagaagatcagaagatttttaaaaggaatggatgcgaaactgcgagtgaaacttttggctcacgactttccgacgtttcagcaaatggtcgataagtccttgttactagaagatgcagaacaagagatgcaagagtacaagagacgcagagtaatgtccctagagattcgagcaaaagaaggtttgtgtcgaaaaaccaactcgccagcacaatactatcagaaagcatctcagcattcaaatggttccggttctacgtctcgttcgactatgtcagaacctggtcagcaagccacaatgatcaacagtaatagccatgaaggaagcaattccgcaccatgccctacaccttcaaaagacgtggtcataaggcaggagtcgaatgtttcatctgccatgagatgggacactattcgtgggattgccctcagaaagccaagataa

SEQ ID NO: 4202 - DNA, 199 bp, Oryza sativa
  Clone ID: PAT_MRT4530_11106C.1
atcggcctcacatagccacatgtaaatgataatatgatgtgtgatgtttcttaggacaatggattaataatttgataaataatgttagtcaatgttcatgtaccaaatgtccaaaccaatctcaaaatcgcgaagttcatttttttgctaagagttgtgaagcgtggctacatgcaagtctcgagtggggttggctgta

SEQ ID NO: 4203 - DNA, 587 bp, Oryza sativa
  Clone ID: PAT_MRT4530_11107C.1
aagctggtgccttacgcggcgactcccttcgggattctgtcccatccttcatctactgcccgtgcccggcccgcttccgcctcctgccccccctctctcttcattggcggtctttcttacgatacaaatgagactgctctcaaggatgctttctctcagcatggccatattattcaagtgaaggtaatatgccacccagtgacagggaaatccaaagggtatggctttgtcaagtttgcctcagaagatgaagctgctgcagcattgcacaagatggggggtgaggtgattgatggaaggaacataagggtacactatgcaaacagcggatgatctggtgccacttcttcttggaggagtaagtgtcttgtcttgtgtcggggtgcatggagagctcaactaaggcatgtatttgtagatatgtagtctttcgttttcatggctagcaatatgcacctctgcatatgtgggtttcaatcttgtcccatctccccaatacacaagtcatttgatatatcatctaaacatttattctgtattctgctgaatttagacaactggaatatatcaaagcaagcttaatttcc

SEQ ID NO: 4204 - DNA, 711 bp, Oryza sativa
  Clone ID: PAT_MRT4530_11108C.1
atgcggaagctaaactttttggatatttcggatattccgaaaatctcagtttttacgccagctatgagtaagagagagatatcatcgggatttttgcatgttgatgtgttaccgaagttcaaatccttgagggagctcacaatgagccgggtcttttccaaccctatcctcgtgaggttgcacaaatgcactcctccttccactaatggtatctcttccctttcggaggtgtcctcaaccaccaagagtaacaaatgccacaaagatttcttggggatgaatcgagtactcaataaatcttcacgaaatcaacaccaagcactcaaacaaactcaaatcaaccactctctcacacacatgaaatccgagattgaagatcggtggagacaaagaaaattatttttcggagctgctacagtactttcggaatttccgaaaagtgcagatttcagcaaaactcagcagaaaaaaagaatttcagaaattccaaaaatatttcggaaaaaccgaaaacttccagaagacattttaacttcactgccagtttcggaaattccgaaaaaaatttcagacaagtccgaaaatttacagaaccgattttggcttcacggccattttcggaagttccgaaaatcactttcggataactccgaaatttccaaaagcaaaactctcctttcagtaattccgaaaactcatttcagacaactc

SEQ ID NO: 4205 - DNA, 488 bp, Oryza sativa
  unsure (1)..(488): unsure at all n locations
  Clone ID: PAT_MRT4530_1110C.1
ttcctactggcaggtattgtctttcaggctcatctgattcaatgataagattatgggatctgggacagcagcgatgtattcattcttatgctgtgcatactgattcagtctgggcgcttgcaagcactccttcgtttagtcatgtttatagtggtggaagagatcagtcggtgtacttgacagatttaagcaatcgagagagtgtcttgctctgcacaaacgagcacccgattctacaattgtccttgcaggatgatatgatttgggttgcaacaactgattcttctgtgaatggatggaaagctgaagcgcatgaacccctaaagcttttcaaaaaggttcttcattcttagctggcaatttgtcattctccagggcaagggcttctttagaaggatcagcacctgtccctatacacnaagaaccatcttcattattctggagttccagcaataactcagcatgagatcctgaataatagagacatg

SEQ ID NO: 4206 - DNA, 520 bp, Oryza sativa
  Clone ID: PAT_MRT4530_11110C.1
tatcgaccagccttgagctccaccgcggtggcggccgctctaaactatggatcccccgggctgcacgaattcggcacgacgtccacatgggcaacgtgagggcgttcttctcgcgcaagggcaaggggaacatcatcggcaggtccaggtcgatgcgggacgcggccatcaacgtggactggtcgccgaggccgtcggatctcgccgccgcgaaccccgcccgcccgcggcggatgaccacaccgatcgggtgtcatgaacttcgactctaactgcgactggcggatctctcgggccgagcttggcggcgctgttccgcagcgttgtgccaccccgtcaccttactaacaaggtggctccccatcaatgccacgaacgccccaacttcctaaccggcgaaacggcttacatcttccccttcgggcgaagttccccccgcccaatcaccgccccccccggtccggcgaaatcccccccgtctgcccaaatgaatggaccttgcgccaccccccttccggcc

SEQ ID NO: 4207 - DNA, 108 bp, Oryza sativa
  Clone ID: PAT_MRT4530_11111C.1
atggatggggattggtgcggtgtgctgatgggagggaaaagcggggtgctggagtttgctagtgcctgccaggctgccagcgtcaagaattatgggacttttggttag

SEQ ID NO: 4208 - DNA, 296 bp, Oryza sativa
  Clone ID: PAT_MRT4530_11112C.1
ttgctactggacatactatactactactagccagtaagctagctaactaactacgtggctatggcccccaccgtgatggcctcctcggccacctccgtggctccattccaagggctcaagtccaccgccggcctgcccgtcagacgccgctccaccaactcgggcttcggcaacgtcagcaatggcggaaggataaagtgcatgcaggtgggggccaatggggggcataaagaagttcgagaccctatcgtacctgccacaattaaccgggagggacttttggaagcaaatcgagt

SEQ ID NO: 4209 - DNA, 347 bp, Oryza sativa
  Clone ID: PAT_MRT4530_11113C.1
ttatttattattttttactggacaatagatttaattaatttgggggagattaaacagcttatggcacacaacagaaatattgcatacattgatatttagaagctctcctatatccccatgaagagaagcaacttattctcaggattagggctactgatatcaaaacaacatcacaaccagtacttagtaccttaattaacacaaaaatttatgtttaaatctcccctcacatcaagctcaaaaattaattttcacacatccatgatcatcaactcaattagttgtttgtatcaccatgtactagttcctgccaccttcattattaacacctcattgattgcttgtac

SEQ ID NO: 4210 - DNA, 235 bp, Oryza sativa
  Clone ID: PAT_MRT4530_11114C.1
gctgcgcacctgttgggaagggcgatcggttccggcctcttcgctattacgccagctgccgaaaggggaatgtgctgcaaggcgattaagtttgggtacggcaagggttttcccagtcacgacgttggacaccctcaatctgccatagaacggaagagacgagcctggtcagaatctgaggatgatgagccagtgcagaggccagtgcaacctagcgcaggcgagaacgatctga

SEQ ID NO: 4211 - DNA, 1353 bp, Oryza sativa
  Clone ID: PAT_MRT4530_11115C.1
atggcgagctacgacgacggaaccaatctcgtggacgatgaatacgatgacctggatgatttcatcgtcgataacgacgacgacgtggtgttaggtgaggagcagcaagatgaatttgaggaggaggaagaagaacaagaggaagaggaagaggaagaagagcctccggtcgggcaagtggagatccttaccctcagggagcaattgaaggcggacatcaggagaaaaaatcaggcacaacagggcgccaccgccggcagggctagctgctcgtcgtcggtgcagcctctggccaaggatagatttggtagcttctttgggccatccagaccttcacttgctcgcagagtcatcgaggaaggctgttcatcaataatcaaagaaaaacagaacgtaccatccaacaaaagcagtgtttcttctgcttcaaaaaaacaaccaatcccaagcgggcagcagcagaaaccgaagtttgttaaagaggagaaaagaaaggtcgatgcactccgtcagaatcgggattattcatgtctgttctcggatgatgctgatactccacaggctacaaaggaacaacctgacaacatgcctgttttgcctatgaaatatgatgttggagacattgcatcaaccagcaaacttataagtcagaccgacaaagtatcaaaagacagcggattgaagggaccttccattcagagtcgtgtaggattagtcggaaaggagcctcatccaaatacgaagaggacgatcgcttcttctgccaaaaatggatccagcctgcctgccatgaagaaaattcagagggtacagccatcctcaaatggccagaagatgcagcaaacactgcagagcaagaggcctcaggcaatgttgtcacaaagccacgggcagcagtctctgcaatctcggaagcctaaaccatctctcaatggccagaatttcaggcaaaaggtgtcagccccattagcacaaaaacatttggctccttcctcaagacctaagccatcaagtgcagttcacaacgatcacggaaagggaaagacaaggcgtttagtcaaaaggaaatctaaggaggatggatgtgatgaagaggaagttgactataaatcaatcatcagaggaatgttcaactacaatcctgcaaaattcgttggtagagatgaagatgacagagacatggaagccaattatgccagcatacaaatggaagagagaagaagtgcaagacttgcaagacaagaggacgacgaggagctccgccggatcatggacgaagagaggcgtgagaagcaggagaggaagaggaaaaagctagcgcaaaaggcagtagtagatgccagccaggactga

SEQ ID NO: 4212 - DNA, 1089 bp, Oryza sativa
  Clone ID: PAT_MRT4530_11116C.1
gcctatctaactgttgtcgacatggcggtctgaaggtctgacttgtagtcgacaacagtgtagccttcctcctcgaatccgtgcccggcgagatcagagatagcgctttcgtctctcctgacagtatccggagacaccgtagggtactagccatgcttatccctgaagtcaatatccggcggcgtgtcttgacgtatgtaggctgtggaggaggaggaggaggaggagagggagtacaagagcgacatgaggaagctggaggagctcatgtccaagctgaacccgcgcgcgcaggagttcgtgccatcgtcgcgccgcgcgccgccggcggcggcggcgcaggcggcgggcgggctgtccgccgacgcgccggtgttcgtctccgccgccgagtacttcggcggggccggcgccggagccgggcagctgcaggtgggcggcggcggcgggaggagaaggagtggattcaaccagggaaggaggaggacgggaggccggacacgacgcgccgatagggaggatagtgtgcggaggaccgtctatgtctctgacattgatcagcaagtgactgaacagaagcttgccgaagtgttttctaactgtggacaagtggtagattgccgtatctgtggtgatccacactcagtcttgcgttttgctttcattgaatttgctgatgatgccggtgcaagggccgcactaacactaggaggaaccatgcttggttactaccctgttagagttttgccttccaaaacagctattctgcctgtgaatcctaaatttcttcctcggacggaagatgaaaaagagatggtctcaaggactgtatattgtactaacatagataagaaggttacagaagaagatgtaaagattttctttcagcagctttgtgggaaggtttctcggctgaggctccttggtgattatgtgcactcgacgtgcattgcatttgttgagtttgctcaagcagaaagcgccattctagccctgaactatagtggaatggttcttggcacacttcctatcagggtgagcccttccaagacacccgtgcgtccgcggtcgcctcgcgtgatgtcaaac

SEQ ID NO: 4213 - DNA, 234 bp, Oryza sativa
  Clone ID: PAT_MRT4530_11117C.1
ttagaaaccccttctttttccctcctaccacaccacttcctgatcctgctcccatggcgatctccgggagaggacaggtacgcggaggacggcggtggcggcgactccggcggggggaagctttggaacctctgccgtatgcccttctggcagcccggaggcgcgcccgcaatgggatacgggcctgcaacttctatgttgtactaggcggctgccgggatccaccaccatttc

SEQ ID NO: 4214 - DNA, 1283 bp, Oryza sativa
  Clone ID: PAT_MRT4530_11118C.1
ggaggaggaggagagggagtacaagagcgacatgaggaagctggaggagctcatgtccaagctgaacccgcgcgcgcaggagttcgtgccatcgtcgcgccgcgcgccgccggcggcggcggcgcaggcggcgggcgggctgtccgccgacgcgccggtgttcgtctccgccgccgagtacttcggcggggccggcgccggagccgggcagctgcaggtgggcggcggcggcgggagggactccagcagcgacggatccagcaacggcggcgggcagccgcagaatcgccggagaaggagtggattcaaccagggaaggaggaggacgggaggccggacacgacgcgccgatagggaggatagtgtgcggaggaccgtctatgtctctgacattgatcagcaagtgactgaacagaagcttgccgaagtgttttctaactgtggacaagtggtagattgccgtatctgtggtgatccacactcagtcttgcgttttgctttcattgaatttgctgatgatgccggtgcaagggccgcactaacactaggaggaaccatgcttggttactaccctgttagagttttgccttccaaaacagctattctgcctgtgaatcctaaatttcttcctcggacggaagatgaaaaagagatggtctcaaggactgtatattgtactaacatagataagaaggttacagaagaagatgtaaagattttctttcagcagctttgtgggaaggtttctcggctgaggctccttggtgattatgtgcactcgacgtgcattgcatttgttgagtttgctcaagcagaaagcgccattctagccctgaactatagtggaatggttcttggcacacttcctatcagggtgagcccttccaagacacccgtgcgtccgcggtcgcctcgcgtgatgtcaaactgagtccgggttgttcctgaagcttgaggctgtcaccaatggcaggcagagcttgaaactctagtcatggcgtttagaaatgctgtcgcttcgcggaatcggtaactgccgtttctgagagtatcatctcatcatctcttaggtccaagtagaaggccgacctgctgatgttcgtctgttcagagacccatctgtaggttgggagaggctacattttcgtttcttttgttcagtatgctatgttcagtatcctataacagcctttgcaggcaattccgacaataatatctacgtattttctgtctcaaaaaaaaaaaaaaaaaaaaaaaaaaaaaaaaaaaactcgagctcgtgc

SEQ ID NO: 4215 - DNA, 274 bp, Oryza sativa
  Clone ID: PAT_MRT4530_11119C.1
atggagatccaatatgagcttaattcggatagggatccgaatagaagtcctacgggccttggaggcccgagtgatggaccctatatattcgtgaggggtgtgaccggcggatgcattgcatcaccgtgggaatacggcgaggagaacgcacgaggaggagaaggtcgagccggtgcgatcgactactttctctacatcgacgcgcgctacttcgcgagaattccttcgacttcttagcgccttcttccgctgcgcagcgcgtcgagtggtaacg

SEQ ID NO: 4216 - DNA, 207 bp, Oryza sativa
  Clone ID: PAT_MRT4530_1111C.1
atgggcggacagaaacgagaaatccagccgatcgaatcgaatcgtagtccctgctcatgtagggggcctaacaaactcacacgtcgcatcacgagccagagtagcatagtattagcgcacgaagctgcctggcacccaggcatgggcgtaaacaactcgcgtactctacagtctactgcaccacgcacgccgcaaggtgacaggtga

SEQ ID NO: 4217 - DNA, 577 bp, Oryza sativa
  Clone ID: PAT_MRT4530_11120C.1
cccggtgtccagcaagagatccatcaagccgtcgcgatgacgacgaggccttctgttttttccaccgttgtcgcggcgatcgccatcgccgcgctgctgagcagcctcctcctcctgcaggctaccccggccgcggccagcgcgagggcctcgaagaaggcttcgtgcgacctgatgcagctgagcccgtgcgtcagcgcgttctccggtgtggggcagggctcgccatcgtccgcgtgctgctccaagctcaaggcgcagggctccagctgcctgtgcctctacaaggacgaccccaaagtgaagcgcattgtcagctccaatcgcaccaagagggtcttcaccgcgtgcaaggtgcccgcgccgaactgctaagcctttgcatttgaccattgttcagtgaggcagaaaacctgtcaccgctcgcagtacttctctcgagaaaattagcagtaataaactcagttgagtgcataacaatcttggcatgtactgtgcatacagtgtacttcaagctacccaaactccgaagcagttctgtcttccatactgacaagtgacaaaaaaaaaaaaaaaa

SEQ ID NO: 4218 - DNA, 479 bp, Oryza sativa
  Clone ID: PAT_MRT4530_11121C.1
gacgatgagagctagacgtggctagggaaggggttctaaagaatctacgagggcggccaagatcactttgagtggcgggaggccacgtttgaatacttaccggcgaaggattggcttgaccgcatgtgaaatcggctggcgacgtgtcggcgccaatccggacgcgacacgcggcggcgacgagggtgaaaacaaccgactcgggggtgaatggtttgaattaagcgaaatcgcactcggcggcggcttggacgagagcgcacggcgtcgagcggcgatttctggcagcggtcgttatcccggctttgttgtcgtcaagattggtgcggcgacggcggtctgagggcgtcgaacggctagctgccccgaggccgacgcgcggcgtcacagcgcgcggcaaagtaggacgaccgggcagcgcgcgtgaaggggtggaagaggcaaagaaatccacggattttgagtggggtgtggtcccc

SEQ ID NO: 4219 - DNA, 264 bp, Oryza sativa
  Clone ID: PAT_MRT4530_11122C.1
atggcgtgccgtgaaaagaaggttaagatgggtcctgcagttcccgtggccgaggcggatcgtccaccaatggtatttccggttagtaaaaagctccatcttgcagtaaacgtggcgctgagctcctgggggaagaaggtgaggatcccgaagccggtaaacattccgcggtggataacaataaccgtcaagtggggtggcactgaaactgtggcttttgtagctccattttggggcagtgtcacagtttcaggtccggtttag

SEQ ID NO: 4220 - DNA, 601 bp, Oryza sativa
  Clone ID: PAT_MRT4530_11123C.1
agccccggttgtaaaatcaaagtatgtttgattcttattctgtgatgaacaattggcatatgtgattattggttttgatatttggagattatcggcggagtggttttggagatgattggattttataggtgatgaaaaggtactgctggagttttggtccggtcagacctgtgcgcatcgagcggtcaagatcaatgcacgtggttggtgaagattccatatggcatatgatggagatattgtgtgtgcgtatgggatgcggagtcgaatttggaaggagtccaaatttggtatgattggagtatgtaaagttggtttcttgtacgggaaggtttcctaggtggattaggacttcttgtacgagtttgattcgtggctttaggctgcctacctcatgtataaatagagagggaaggttgtatttgctcgggcttggcggtctaaccggcgagataccggcggtcagaccggcggtggcgttaggaggcaaggcgacttcgggacgattagaccgggcaatctatattggtcattccgatggcaaaggcgcggtcagaccggtagatcaacctcggtcagaccgatctgaatcgaattgagg

SEQ ID NO: 4221 - DNA, 224 bp, Oryza sativa
  Clone ID: PAT_MRT4530_11124C.1
caacactcactaccgggaattttacaggtgctgatgaaacccaggtgaccacaaacatcctatcatgcggatggatgccctgagctactaagctgtctcaccgtaggctaacacaaatcagggctaccatcacactcctgaagacaagcaagcgtgcttctgatacttgcacacacacagcgaatcatgaactacacactatagggttgacgcatacgcgtaca

SEQ ID NO: 4222 - DNA, 609 bp, Oryza sativa
  Clone ID: PAT_MRT4530_11125C.1
atgacgggaactagggtcgcctttggggtaccagggctgaggggaaggaagcctttccctctgaggcagcgcacccacacccaccctatgtcaggcggcgtgggagcagatgaagtgcctcggtgggggccacctgaggacgaccacatgctttgcttccggcccaaggcatggacagctattcagttcaggttggtttgggcccctctccaaggaggagagcgtagagacagtgcatgtggtatccccttgaactataaaaggaagaccttgctctacgagcaaggattgacaaaccacaagtcagtcatctcacatctcacggtcacggtggggcactcgacggtgttcgtcgtgaagactgatagcgaaggcaatggcgacaaacatagacataagacactcactgattcatttcgtggctcgctggcggctgctaacttggaacaaaatgtctcatgtcaagcgaaggaagctcgacgaagagtggcaccggaatggtcgtacttgtgcattcccatactcgcatttgactgcacctggtctatgctgctgctgaaccgacgacgaccatcccgggaacaaacacatcgcctagcgctgccctga

SEQ ID NO: 4223 - DNA, 5373 bp, Oryza sativa
  Clone ID: PAT_MRT4530_11126C.1
atgagcttgctgcggaaccgccgcgccgcggcggcggcgggttcgggggagcagacggtggtgcaggcggcgtacaacatcatcccgatccaggacgtggtgatgcacggggaccacccgtcgctgcaggtgccggaagtgcgggcggcggtggaggcgctgtcgcacgcgtcggacttcccggcgccgccgctggcccgcgtctgggacccgcaccgcgccgacatcttcgactggctcggcgccaccttcgggttccaggcggacaacgtccggaaccagcgggagcacctggtgctcctcctcgccaacgcgcagctccgcgccgcgccgggattccccaaggaccaccccatcgacgtcctccacctcaccgtcgcccgcggcatccgcaggaagctcctcaagaactacacctcctggtgcgcctacctcggccagaagcgccacttccgcgtgcccagcggcggcggcggcggccgccgcaccggcgccgccaccggcaacgacgtccgcatggacctcctctacacggcgctgtacctgctcatctggggggaggccgccaacctgaggttcatgccggagtgcctctgctacatcttccactacatggccctcgacctccaccacgtcgtcgagcagtccatcgacatcgagacagggcggcctgcgatgcccgccgtgtgcggcgaggacgccttcctcatccgcgtggtgactccgatctacaacgtcctcaagaacgaggtggaggccagccggaacgggaccaagccgcactcggcgtggaggaattacgacgatgtcaacgagtacttctggagccgacgagttttcaagcggctccggtggccgctggatccatcgaggagcttctttgtggagcctggaaagactgggcgcattggcaagactggctttgttgagcagcggtcattctggaatgtctaccgaagtttcgatagggtatgggtgatgcatattctgttctttcaagctgcgatgattgttgcatgggatggtaaaaccccatgggttagcctcagattccgggacatccaggtccgggtgctgtctgtgttcatcacttggggtggactgcgctttgttcaggcaatgcttgatgcgggtactcagtacagtctcgtgtcgagggagacaaaaacagtggctgttcggatggtgctcaaggtgcttgttgctgcagggtggacaatcacattcagtgtgctctataagcgaatgtgggatcagcggtggcgagatcgcaggtggtcctttgctgccaataccagagtgctgaattaccttgaggcagctgctgtgtttgtcatcccgcaagtgcttgcgattgtgctcttcatcatcccttggattcgaaattttctggagaaaaccaattggaaaattctatatgtgctgacctggtggttccaaacacgtacatttgttggccgtggtctgagggaaggtctcattgataacatcaagtactccatattctgggtgtgcctccttgtttctaagtttagcttcagctactttctccagattaagccgatggtggggccaacaaaggtaatcttcaaactccatgacatcaagcgtaactggtttgagttcatgcctcacacagagcgccttgcagtaatcatcctgtggctcccagttattatcatttacctcatggatatccagatatggtatgcagtcttctcatcactaacaggggcgcttatcggccttttctcgcatctgggggagattcgcagtgttgagcagctgcgcttgaggttccagttctttgcaagtgcaatgcagttcaatttaatgccagaggagcacctggataccgttcatggtggcatccgcagcaagttctatgatgcaatcaatcggctgaagctgagatatgggtttggccgtccatataggaagattgaagcaaacgaggtggaagctaagaggtttgcactggtttggaatgagatcattcaaacatttagggaagaggacatcattagtgataaagagcttgggcttcttgagctgccggcagttgtgtggagaattcgtgtggtacggtggccttgtttgctgctaaaaaatgagcttcttcttgctctcagtcaggcagcagagctggtggctgatgacaggacacattggaacaagatatgtaacaacgagtacaggcgatgtgcagtaattgaagcttatgacagcatacgtcacttgctgctggaaataatcaaggagagaactaatgaacacattattgtcaatcagctattccttgcatttgatggtgcaatggaatatggaaagttcactgaagaatataggctaaccttattacctcaaattcataagtatgtaatctccttagtggagcagcttctattgaaggacaaggatcagatcaagatagttcgtaccttgcaggatctgtatgatcttgcagtgcatgattttccaaaaatcaagaaggactttgaacagctgaggcgagaggggctagcactatcaagaccaaccgaatctcagctgctttttcaggatgccataaaatgcccagatgacaatgatgttagcttctataagcaggtgagaagactccatacgattctcacatccagggattctatggacgatgttccaaagaaccccgaggctcgtcggcgcataactttcttcagcaactccctgttcatgaacatgcctcgtgctcccaccgttcagaggatgatggcattcagtgttttaaccccatattacaatgaagatgttctgtacaacaaggaccagcttcgtcgtgagaatgaagatggcatctcaatcttgttttatcttcaaaagatttatgaagatgattggaaaaactttttagagcgcatgcaaagggaaggaatggctagtgatgatggcatttgggctggaaaattccaggatctccgactttgggcctcgtacagggggcagaccttagcacggactgtgaggggaatgatgtactactacagggctctcaagatgcttgcttttcttgataatgcatctgaagtagaaattacagagggaacaaaacagctggcttcttttggttcagttcagtatgagaatgatgtatatcccatgaacgggggtttatcacaacgacctcgaaggaggttagagagaggaacaagtactgtaagtcaattgtttaaaggccaggaagatggtgctgctatcatgaagtacacctatgtggtcgcttgccaaatatatggaaaccagaaaaaggcgaaagatcaacgtgctgaagatatcctaactcttatgaagaaaaatgatgccctccgtgttgcttatgtcgatgaggtccatcctgagattggtgatacgcaatactattctgtccttgttaaatttgatcctgtcttacagagagaggttgagatataccgtattaggttgccaggtcaactgaaacttggggagggaaaacctgaaaatcagaaccatgccatcatattcacacgaggtgatgctgtgcaaacgattgatatgaaccaggataattattttgaggaggccctcaagatgcgtaacctactagaacagtacgactattatcatggaagccagaaaccaacgcttttgggcgtccgggagcatgtttttactggatcggtgtcttcacttgcttggttcatgtctgcacaagaaacaagctttgttacccttggacagcgagttctagctaatccgttgaaggttcggatgcattatgggcatcctgatgtatttgatcgcctttggtttttaacccgaggtggtataagcaaggcatccagagtaatcaatatcagcgaggacatatttgcaggtttcaactgtaccctacgcggtggcaatgttagccaccatgagtatatccaggttggtaagggacgtgatgttgggctcaatcagatatcgatgtttgaagcaaaggtttctagtggcaatggtgaacagaccctaagtagggatatctacagacttggtcataggctggatttctttaggagtctttctgtgttctatacaacagtaggattctacttcaacacaatgatggtggtcttgacagtttatacatttgtttggggacgcctctatctagctctgagtggtcttgaggctggaattcagggtagcgctaatgctaccaacaataaagccttgggtgccgttctgaatcagcaatttgtcatacagcttggcctcttcactgccttgccaatgattatagagaactctcttgaacagggttttctgcctgctgtctgggattttttcactatgcaaatgatgttttcgtccgtgttctacacattttccatggggacgaaaagccattactatggccggacaattcttcatggcggtgctaagtatcgtgctactggccgtggttttgttgtgcagcataagagttttgctgaaaattacaggctgtatgctaggagccacttcataaaggcaatagaacttggaatagtattgactgtgtatgcagctcacagtgtgattgcaagggatacacttgtttacataatcatgatgatatctagctggtttctagtggtatcatggatcatggctccatttgcttttaatccatctggctttgattggttgaaaacagtgtatgactttgatgatttcatgaactggatctggtaccctggtagtatcttttctaaggctgaacacagctgggaagtttggtggtttgaggagcaggatcatctacgaacaactggtctttggggaaagattttagaaatattgttagatctcagatacttcttttttcagtatggggttgtataccagttgaagatcgcaaatgaaagcagaagtattgctgtttatctgctttcctggatttgtgtggctgtgattttcggcatttttgtcctaatgtcatatgctcgagacaagtatgctgcaaaacaacacctttactaccgggtcatccaatctggtgtcattattcttgcagtgctagtgctgataatatttctgaaatttactaaatttcaaatcattgacatcttcacaagccttttggcattcattcctactggttggggcttgatttccattgctcaagtgattagaccattcattgagtctactgtggtctgggccagtgttgtttctgtggcacgtttgtatgagatactgcttggggtgtttgttatggcgccagttgcattcttttcctggttgcctggatttcaggaaatgcagacgagggtacttttcaatgaagctttcagcagaggcctccagatatcccgcattcttgctggcaagaaaacaattgcagtttga

SEQ ID NO: 4224 - DNA, 183 bp, Oryza sativa
  Clone ID: PAT_MRT4530_11127C.1
tcgccacttatgccacttttggcgcgtgtttctcaaacagtttggtgtcagccctaaacagtggatgctgcgtaattgatactctctcccgggtaaagccagaggatttccatctacccaaacaaagaaaattaggggagtttctcccgttagccggggattgttttgcctcaaagtccgctt

SEQ ID NO: 4225 - DNA, 328 bp, Oryza sativa
  unsure (1)..(328): unsure at all n locations
  Clone ID: PAT_MRT4530_11128C.1
ggaaccccccgggtgaaattgtgtctgatgaggggtgctgtgtgtctgcactgatgagggtgtgtgtccactgtgagtggcgcccaaaatgggctgggaacttgganactggtgttatacacactggtgatgtgccgtccacgccacgtataaccctccctatggaaacttaatggttattttctaagtttaattgtgttacgttaaatcgctgttcatatgtctggttgttaagtccaccctgtgcttgtttgggtatgtggttgtgtatctttatcatccngtgaattatgaattctctcttgagtaaaaaaaaaaaaaaaaaaaa

SEQ ID NO: 4226 - DNA, 199 bp, Oryza sativa
  Clone ID: PAT_MRT4530_11129C.1
cccaaacaggcggggggtcgaaagtgtttggtactttggtttggggagctgtgtgtgctgacgcggatctgcgttgagacgagcagaggggggagcgccggaattgggtggtttggcccgggaggcgccggaaagtgggggagcctttggattccccgaacccgccatggtgatccggcacgagtagtggtggtggtgg

SEQ ID NO: 4227 - DNA, 1678 bp, Oryza sativa
  Clone ID: PAT_MRT4530_1112C.1
gcgtcgtccccttcgcggagcctccccttcgtgggcgcgctccattgctctctcccctcccacccaatcctattatgacattacgatgcctatccccattgccttcctcttcctcctccccctcctcctcgccgcctcctcccatgccaccgcctcctcccatgccaccgcctccgtcgtcccacaacctcgagggttctatataaactgtggatcggagaaggaggagcagatagggagcatcaagtggatacaggatgaggggttcatcgccgtcggcaacatgtccgccgtcgacaagccgaacatcctgccgctgctcgccaccgtgcgctacttccccgacgcgacggcgaggaagtactgctaccagctccccgtcgtcaaggggtcgcggtacctcgtccggacgacctacttctacggcgggttcgacggcggcgacgttccgccggtgttcgaccagatcgtcgacgggacgcggtggagcgccgtgaacaccaccgacaacttccggcggggcatgtcgacctacttcgagatggtggcggaggcgcaggggaagacgatgagcgtgtgcctggcgcgccgcgccgacacccggtccagccccttcatctccgcgctcgagctcgtcagcctcgacgactccatgtacaacaccaccgacttcgacaagtacgtcatgagcacggtggcgcgcagccggttcggcgccaagggcgagatcgtgagctatccagatgaccagtacaaccggtactgggcgccgttcacggacgcgaacccgacggtggagagccactcggcgatcacgccggaggagttctggaacgtgccgccggcgaaggcgctccgggccggcgtgacgacgagccgggggaagaagctgtcggtgcagtggccgccggtggagctgccggcggcgacctactacgtggcgctctacttccaggactcccgcacggcgagcccctacagctggcgcgtcttcgacgtcgccgtcaacggcaaggagttcttccgggagctcaacgcctcggccgccggcgtcatggtgtactccaccatgatgcctctctccggcaagatggagatcgtgctcacgcccaacgagacgtcgccggtcggcccgctgatcaacgccggcgagatctaccagattgtgccgctcggtggccggacggccaccagagatgtggttgcaatggaggaacttgccaggagcatcaagaacccgccgccggactgggccggcgatccttgcctgccgcggcagaattcgtggaccggggttatctgctccgagggatcacccgtgcgcgtcgtatcactggatctaaaaaatcatggtctttcaggatcgctccctgacagtattggaaatttgactgggatgaaaaatatctatttcggtggcaacaaactcacaggctccatacctgatttgagcagcatgcacatcttggaagaattgcattttgagggcaatcagttaagtggaccaatcagcccatcgctgggaacactcaccaatctcaaggagctatacctgaacaacaacaatctcaccggccagataccagagagcctgaaaaacaaacctgaacttgacatgagaaagatacagtttgatgatgaagggagaagagcgaaggcttcagaaactgtaggatga

SEQ ID NO: 4228 - DNA, 1392 bp, Oryza sativa
  Clone ID: PAT_MRT4530_11130C.1
atgaagatgagggcggcggtggccgacggcgacggcgacgacgacggcgccggcgcgcccgtccaagtcagcgtggaccccgccgcctaccgggactggtccgcgctcccggccgacctgctgctcacggtgatggagtcgctcgccatccccgacctcttccgcgccgggaccgcctgcgcctcctggtacgccgcctactccatcgcccgccgcgcccgtatccccatacgggattcggctccgtgcttgctctactccggcgaaggcgacgacgaccccagcaaggccaccctgtacagcccctcgagcggggactgcttccgcgtgcggctcccggacccgccgctccggagccgcaacctcgtcggctcagcgcacggctggctcgtcaccgccgacgagcaatccaacctccacctcgtgaacccgctcaacggcgcgcaggtcgcgctcccgcccgtcacggccctccaccatgtggagagcttcgtggacgaggaagggaacatagtgtatagtgttgatgagtctctggggcccgacgatccagaagccaatctccccgaattcgaggagctcgccgaccgggaagtccccgtggaataccctgcggagaagctgcgcctgttcatgtaccacagggtgattctatcctgcagcccatccgtggggagggaatgtgttgccctgctggtgcacagaccggatgggatgatctccttcgcccgaccgggcgacgagagatggacccatatcaaccggacaacgagcaatggatcgctcaaatgggataccggctataccgatgcgctttacaacaagaatgatggcttgttctacctgttgagctttgacggttctatatgcgcgttggatctaagtgggtcaagtccagttgcgaggaacattgtgaagaaaaatacacagtgggataatcctagcaaatacattgtgctggcaccatggggcgatctcttggaggtgtggaggttgagagactttgatgaacctgatgaaactcctgaatgttcttctgctgagtttgaggatcgatctgataagtggttaacagaagaaattatgctatataaagttgatatcgataagcagaaacttgttaagataagcagcatcggggattatgctctgttccttggtttcaattctgtggtgtgccttccaacagagaattttcctatgttaaaacctgattgtgcttatctttctgatgaattttatgaagaaatatgtgtcaagaggcataactggcgagaaataggcatttgggatttgaaaaattgcaaactgcagagccttggtgatgtggagtctcttcatgcttggcgtaattggccatcgcctatttggataacaccatctcttagttag

SEQ ID NO: 4229 - DNA, 243 bp, Oryza sativa
  Clone ID: PAT_MRT4530_11131C.1
atgaccggaagcatgatttttcatggcttacaacatatgcagaacaacattcaaaccctaaatgatgtggctggtgcaggaatttcttgctcggtggtaggtgctgcagcacttccattctgtggaggaaaagtagcagaagcttcaaaaattgatttgtttgaaatatcaaggcatattgaagaagctacagagaccggaaaagagaatttgttggttgtaacaggatacagaaacttttag

SEQ ID NO: 4230 - DNA, 594 bp, Oryza sativa
  Clone ID: PAT_MRT4530_11132C.1
cccggccaaaaacggccaaaaaaaaaaaaaacccggggggcaaacaaagagggggggacttcccccccagaaacaaaaaaaaggcctagtccaccctcgggaggagccgggggggggagccccaaggggggggggcaccccccccctggaaaagggggtcccttttttttggggggccccgggggggggccttaaactggaggggccacaggagggggggggccccctggagggggggcccgacggtaaggatccgggggacaaaacccccagggcaaaggagggagggcttccccaagccctccaaaaggacttggggggacggaaaaggaaccctggggggggggggcttcccgaacccccttgggaaaacaaatccccggacccttttggggggggggcccccaaaggcaacaaagggcccaccccggcccaccagggaaaggggggcctggtaacccggggggaaaaccccatggaaaatcggccccacccgaaaaagcggcaaaaccttccggggcggggggggcggggcattgaaccccgggggggggcccaaaaacaaaagttgggccccggggcggaggaaaaacc

SEQ ID NO: 4231 - DNA, 214 bp, Oryza sativa
  Clone ID: PAT_MRT4530_11133C.1
acgcgcaggtgtgctgtgactaggcgccacgatctgtagagaagaagatctacggtgaattccttgtgaatgctcatgccgaggatgtgggtgctggcttcaacaactccaacaggcgtcttgatgctatcagggaccacctgccggagccttatgaacagctgggtgagaactgcagagttttggagagtcactatagagaaatgatggatgt

SEQ ID NO: 4232 - DNA, 431 bp, Oryza sativa
  unsure (1)..(431): unsure at all n locations
  Clone ID: PAT_MRT4530_11134C.1
cacgcangnaccgnnctcngcgcgttccctngtcagcacagggngtatcctccacagntcggggncttntccgggcncggtttnntaccggnagcctaccnttcnnangccgcncctcatgnanggcacatgggatngtaccacttcggccntggngnnggcggcgggagtcantncgccggcaagctcaaggccggnatgttcgnngnngnnaagtngaagtgnagcgnntagntagctgnacgnncnntattngtgnccaccagcnttntgccntnntncacgtacgtataatntntgcncnagtatnagtttcaaccatgtggcgtacgcgtatatacacatacctaantaagaaatnaatacagngcanncaggcagacngatctgtgtgtanacatgagcttaaaaanaaanaannnaanaaanaa

SEQ ID NO: 4233 - DNA, 279 bp, Oryza sativa
  Clone ID: PAT_MRT4530_11135C.1
aaagtgaacttattgttttaagatggagtgtataccgagcacgaaaatacaatgatggcatgaatacctggatataggcatccccttcattctaaaataaacaaattttgtgtatggagggagtagagcctcgtcagattgcaactgttattattataagccgaagctgtaggtgcactgggtgatgggtcaacaccagagaatcaagcataaagaaactgaacatgtggatgatcgagaattacagcagccacagtatcccagaagttccataacatt

SEQ ID NO: 4234 - DNA, 786 bp, Oryza sativa
  Clone ID: PAT_MRT4530_11136C.1
atgtgtgtcgcactaagtacgacagctgggaacaactgtggccgacatgtcatgcgttctcgatgtggctgcatgcttgtagcaccaggtgctcagggcatcgatgtgaacatcaaagaaatgaatgctcaaacgaatatgaaaaatcaacaacatcatatattttgggccagaggaagtattatccactactctccatacaaattggaagcacagatgcaaaatgtggtcattcttgcttctaggcttatctcaatgaaggccagccaacattttgagcagcttgaagaggagatgtattatcacatggtcatgttggttggaccacggtcagagtatcgcatacggtggatcattagaaacccggtcatcttcagtcagagcagtgaatccggatgcaaattctctgtagcgcacccaaccatctatgctaactggtatgcaattgcaacatatggtctcataaccatcaggcaattcctagcacgaatgtgtagtatagaagtaggactaggaagacacggagaatcaaacagcacaatatttttggctgcatcttcttatgtacccaatcgtgctggtttgaaccatttattacctacatgcaagcagcaatggtatggcaacctacaggccaatgaaaccatggtcgacagcttttccgattttcctctgttattcccctcatcatgtgaggtcgttacatgcataacaaacaccgacttcaccggatctaaacgactgagcgcaccatccacgctccagatccagctctatcgctactaa

SEQ ID NO: 4235 - DNA, 387 bp, Oryza sativa
  Clone ID: PAT_MRT4530_11137C.1
ggccaagacaggtgccccacctgccaggtctgcttcaagcgcgggcataccgcagcagactgctggtatcgcttcgacgaggactacgtcgcagatgaaaagcttgccgctgctgctactaactcatatggtgctacagatcatattaccggtgagctagagaaacttaccaccaaggaaaagtacaacggcggcgagcagattcacacggctagcggagcagctaagaaaaatcttatatctgctagtcagttagccgctgataattctgcttttcttgaacttcactcgaaattcttttccataaaggatctggtaacgaaggacattttgcttgaagggaaatgtaggcatggtctctacctgatccctaactcctttggctga

SEQ ID NO: 4236 - DNA, 330 bp, Oryza sativa
  Clone ID: PAT_MRT4530_11138C.1
atggtgggttgtgagcacatggttttgaaggtcgtgcttatgtcaattaatgaccggttcacgagctactgttgtgagacatttaccgtactaacaacaagccagaatgggcaacggctggacacatggtatagcaaggcttgttgtggtgcgccagactgagaagcagcgaaaagtccgtgggggtcgctggggagtccatgcctctggttttttttgagggggtgattattatccaggaaaggtgcgctgctttgagttgagctatgcgaggggtcttgtcataactacagactccacctaggacttcttctccaaagcttctcttac

SEQ ID NO: 4237 - DNA, 1149 bp, Oryza sativa
  unsure (1)..(1149): unsure at all n locations
  Clone ID: PAT_MRT4530_11139C.1
cgggaagattttggccggtggaatcatggccaagacaggtgccccacttgcgaggtgtgcttcaagcgcgggcataccgcagcagactgttggtatcgcttcgacgaggactacgtcgcagatgaaaagcttgccgctgctgctactaactcatatggtatagatacaaattggtatattgatacaggtgctacagatcatattaccggtgagctagagaaacttaccaccaaggaaaagtacaacggcggcgagcagattcacacggctagcggagcaggtatggatattagtcacattggtcatactattgtgcatacccctagtcgtaacattcatctaaataatgttctttattttcctcaagctaagaaaaatcttatatctgctagtcagttagccgctgataattctgcttttcttgaacttcactcgaaattcttttccataaaggatctggtaacgaaggacattttgcttgaagggaaatgtaggcatggtctctacctgatccctaactcctttggctgatcaaccagcaaacaagcccttggcaccgtcaagctatccttgtccaggtggcatagccgtctaggacatccgtctcttcctattgttaagaaagttattagcaaaaataatctcccatgcttagttgagtcagtcgatcagtctgtgtgtaatgcttgccaagaagcaaagagtcatcagttaccttatgttagatctactagtgtgtctcaatttccccttgaacttgttttttctgatgtttggggccctgccccagagtctgttgggagaaataaatattatgtgagttttattgatgattttagtgctaaaatataagtctcaagtctttgagaagtttaaagaatttcaggttctagttgaacgaatgtttgatagaaagattattgccatgcagactgattgggggggagaatatcaaaaacttaattcctttttttgcaaaaataggaattgatcatcatgtgtcatgtcctcacactcgtcaactgaatgggtcagctgagagaaaacactggcatattgttgaagtgggtctctctcttttatcttatgcatcggggatcctctagagtcgncctgcaggcatgcgagaataaggatntcaaatcacag

SEQ ID NO: 4238 - DNA, 1824 bp, Oryza sativa
  Clone ID: PAT_MRT4530_1113C.1
ttaacggaaaatctgtcttgctgtgctgtagacgccaacaattgacattgtagttgcattaccagttagagcgggcagccatgaaccatgcctttcactgtgctcacaaagtgcaacttctttttcctcttcaccaacatcatgaagcacggctgcagtccaaggcttgtggccagcacgtaccacacggtcagctatttccctcagtaacagtcttatctcctttatttcagggtgtgaatcatcactcaccacaaacttgtgaaggtaaccattaatttcaatcgaactacagccagcaacaacattaacattgttttccttcatctttttcctcatatagcttactctatcccactgggaattcgatgcgtacaaatttgagagtagaacatagttttctggattgcaaggttctaactcaaggagcttctttgatgctgattgcactatatcaaatctatttgagttcttactggcaacaagaagagtcctccaaattactgaatttggagggatagccatgccagtaacaaatgaatatgcttcatccaaaaggctagaacgacagaaaaggtcaaccatgcaaccatagttctccattgaaggtttgatacccaattcttgcatagtagaccaatatcgtcggccttcattcactaacccactgtgagcacaggctgacaacacacctataaaggtgacattgttaggcctcaccttaagctctagcattcttgagaaaagcttcaaggcaacctctacaagaccatgtatcgccaatccaacgatcattgcactccatgcctttgtatctctctccgccattgcatcaaacactccctttgcccgctctatcaacccacactttgcatacatatcaattaatgctgtgctcagctcaagatcgactgtgatacctttcctatcgataaaagcatgcacccatctccccaaatcaagcgcccctgccttggcgcatgccgaaatgacactaaccatggtgacctcatccgggttcacatctgctgcctgcatctctcggaacagccccaaagcctcgttaaccatcccgaccctggagtacccgccgatcatggcactccacgcggccaaattcttgtccccaaccatgccatcgaacactgtcctggcgagcgcaacctcctcgcacttggcatagaggttaagcagcccggtctgcacgtaggggctcggttcaagcccccggcggaaagcctgcgaatgcagctgccggccctccccgagagccggcacgacggagcacgccttgagcgcgaacgcgagcgtgaaggagttggggagcggggacccggcgcgcagcattcggcggtagaccaggacggtgtccgcggccggggcggcgccggcggcggaggagagcgcgcggatgagggagttgtagcagaaggcggtcggctcggggatttggtcgaacaggttgcgggcgtaggatggcgcggcgccgcaggaggaggaggaggaggaggaggaggaggcgaggagcttggagagcgcgaaggcggctgtgaggcgagggaggcggagcctgatgaggcgcgcgtgtgcggcgcggagcgcgaggaggcccgggcagcatcggcggacgagcgcgacgacgtgggcctcgaggaggtggcgcgggagcgaggcggcctcgcccggtttgagctgctggtggtgcatgcgctgcgcgtacgcgtggggatcggcacgcgcggcaaagtagacgacgccgcgacggctcggtagtagcagctacactacccgcggcgtgtgctcgtgccgtcgtgccgcgctgag

SEQ ID NO: 4239 - DNA, 264 bp, Oryza sativa
  Clone ID: PAT_MRT4530_11140C.1
atggtgcgcatggctggtgtggaccgggagtggtcacacagcatggcacatgtgctggcactggacgcacggacgtggccaggaggggacgttcctggaacaagttgcaacttctttttcggaagccgatttccaaagaactccagggggttcgcgaggctaagcttcaccccggccgccccttccacgtcgggattcatcaccggaattcgcatcccctcgcgctccggtgagttcaacctctaccgccgccttcggccatga

SEQ ID NO: 4240 - DNA, 2820 bp, Oryza sativa
  Clone ID: PAT_MRT4530_11141C.1
atggccaccaccgccgcgctccccttccacccaacccctcgccggaagctcccgcctgccagcgccggcgcctccctgaggcagctctgcaaggacggcgacctgcgggaggccctccgccagctcgccgcccgctcggcgcgcgggcgcgcccctcctcccacggaccactatggctgggtcctcgacctcgtcgccgtcaggagggccgtctcggagggcaggcagttgcacgcgcacgcggtggccacgggcgccctgggcgatgatgacgcggggttcctcgcgaccaagctgctgttcatgtacggcaagtgcgggcgcctcccggatgcccaccgcctgttcgacgggatgcccgcccggaccgtcttctcatggaacgcgctcatcggggcgtgcctgtcgtccgggggcgccggcgaggccgtgggcgtctaccgggcgatgcgggcgtcggagcccgtggcgggggcggcgcccgacgggtgcacgctcgcgtccgtgctcaaggcgtgcggcgcggagggggacgggaggtgcgggagcgaggtgcacgggctggcggtgaagagcggcctcgaccggagcacgctcgtggccaatgcgctcgtcgggatgtacgccaagtgcggcctcttggattcggcgctgcgggtgttcgagtggatgcgcgacgggagggatgtggcctcatggaactcggctatatcaggctgcgtgcagaacgggatgttcttggaggctctcgacctgttccgacggatgcagagcgacggcttcagtatgaattcttacacaaccgttggtgtgctacaggtctgtgcagagcttgctcagctgaaccatggaagggagctacatgcagcgcttctgaaatgcggtaccgagttcaatatccaatgcaatgccttgcttgtcatgtatgcaagatgcggttgggtggatagcgctctcagagtattccgtgagattggtgacaaggactacatatcatggaactcaatgctctcctgttatgtccaaaataggctatatgctgaggccatcgatttttttggcgaaatggtacagaatggtttcaatcctgatcatgcttgcattgtgagcttattgtctgcagtgggtcatttgggtaggttaatcaatggcagggaggttcacgcatatgctgttaagcaaaggcttgatagtgatttgcagatagctaatacattgatggacatgtacataaagtgctactccgtggagtgctccgcccgtgtatttgacaggatgaggattaaggaccatgtgtcatggacaacaatcattgcctgttacgcgcaaagttctcggtattctgaggcaatcggaaagtttagaacagcacagaaagagggcattaaggtggatcctatgatgatgggaagcattttggaagcatgcagtggtttgaaaagcatctcactgttaaagcaagtgcactcttatgctattagaaatggcttgcttgacttgatactgaagaatagaatcatagatatatatggagagtgtggagaggtttgctatgcgcttaatatatttgaaatgttagacaaaaaggacattgttacctggactagtatggtaaactgttttgcggagaatgggctgttacatgaagctgttgccttgtttggcaagatgctgaatgcaggcatccaacccgattctgtagcactagttggtattctgggagcaattgctggattgtcatccttgacaaaaggaaaggaaattcatggtttccttatcagaggtaaatttcccgtggaaggtgctgtggttagctcccttgtggacatgtattctggttgtggaagcatgaactacgctctcaaagtttttgatgaggcgaagtgtaaagatgttgttctctggacagcgatgattaatgctactgggatgcatgggcatggcaagcaagccatatatattttcaagagaatgctggaaacaggtgtatctcctgatcatgtttcttttcttgctctactctatgcctgtagtcattcaaaacttgtcgatgagggtaaattttatctggatatgatggtaagcaaatacaagttacaaccatggcaggaacattatgcctgtgtagttgatcttcttggtcgctcaggacagaccgaagaagcttacaagttcattaaatctatgcctttggaaccaaaatctgtggtgtggtgtgcactccttggggcatgtcgtatacacaagaaccatgagcttgctatgattgcaactgataaacttcttgagttggaaccagataacccaggtaattatgtccttgtatcaaatgttttcgccgaaatgggcaagtggaataatgtcaaggagattagaaccaagatgacagaacagggtttgagaaaagacccagcatgcagctggattgagataggaaacactgtccacactttcactgcaagagatcactctcacagagactcacaggctattcatctcaaacttgccgagataactgaaaaactgagaagagaaggtcagtatgtcgaggatactagttttgttctgcatgatgtgagcgaagaagagaagatagatttgctgcataggcacagcgagaggcttgcgatatcgtttggtttgatcagcactgcctcaggtacacctctaaggattgccaagaacctcagagtttgcggcgattgccatgagttcaccaagctagtgtccaagctatttgaaagggaaattgtggtccgagacgccaacagattccatcatttcagtggaggcacttgttcttgcggtgacttctggtga

SEQ ID NO: 4241 - DNA, 615 bp, Oryza sativa
  Clone ID: PAT_MRT4530_11142C.1
atggtgcgcatggctggtgtggaccgggagtggtcacacagcatggcacatgtgctggcactggacgcacggacgtggccaggaggggacgttcctggaacaagttgcaacttcttttccggaagccgatttccaaagaactccagggttaagcccggcgtcgccgcgcccgcaaccgccgccgtgtccacgccttcgccttctccgggccgcgttggccacacccgcgacttccctgtcgccccctctcgctttttccccatctcgccgaactccctcgtgctccccatcgctcccgcgccgtgcaaccacccgccgccgccgtttccgccactccggccgccgctagccgccactagggtcgccgccgcaccgcgccgtcgccgccgtcgggttcgcgaggctaagcttcaccccggccgccccttccacgtcgggattcatcaccggaattcgcatcccctcgcgctccgggcaccccgaatcccgtccgtcggttgccgtcgtcctcccgtggctcgtcgtcgccgttcgccgtcgtcttcctccgcgccggccaccctcggcttcgtccgtgccgtcgaggatacctgtggagtggtgttcccgctgtag

SEQ ID NO: 4242 - DNA, 1932 bp, Oryza sativa
  Clone ID: PAT_MRT4530_11143C.1
ttttttttttttttttagggaagaagagtgcatgaaggaaatattaggttaaaatgggctccattttacgacacatgagaagctagacagcatatgaggaaacagggaacatttgctgccgccgtcagaaagcagtttacaccataactaaagcgttcaggaagtcctaacaaccaataatctgagagttcttgacagacgaacagaacaaaaccagaagatcccactctttctaaagcctagggcgcttccaaacaactagtatccgtagctcggagggtaggggggtggcgcaccgccatagcttccaccgttgtgaggacctgcgccgccaggaggagatccgtatgatgttcctccgtacggtgggtaggagctgtagcccgtgtcgactggttgagcaggaggagcaggagcttgtggggggccttggggagaagcttcagccatgaaattcttgatcagttgctgggcagtttgaacttgtgaagcacttcctgatatctccacagtcatttctccaggaacaccttcctgaatacttattgttgcaccactatgcctgcgaatgtagctgatactagcaccagctgccccaatcacggcatcagcgtaggaaagaggaacttgcatgctgtgtgttatttgagaagaaccatgtggtgggtgttgattccctgaggcaggaggagcaccagtaggaggtgcatcacggccatatgaagaaattccatagtgtggttgcttttcgacaggaggtacatcaggaggaggataatagtggtcttgaggccgaggaggcatgaactgtggattaccaccataacctgggccaccaggaggaacgtttgatggatgaccccacggtggaggaggaccccacgtctgaggaggtggcataggttgctctctgtgcgcattgtgcactttcatctgcatttcgaacaaagggagcacactgcggtcaacaagaaattttcttaaatgacttgcaatcagttccactgctttgtggacatctagaggttcaccttgtatctcaacaactcggtcgtcacttaatgcaacaggtggtacactttcaagaattcggagaacacacttagaagcatcctgtatggatttaatggttgctccttgcttgccaatcaggctgccagcttgagaagctggcaccagtagccgtgttggccctacagtaccagcagcacgttgaggttgatcagattcaccatctaaaccatctgttatccgcttgtgaactctaagcaatccatcaacagcaggaggtaatggtgcatctggttcatcttttgctgaaatcattactgctctatctggtacccctggtggtccatcaagcacctttatgcgagctctggactcctcacacattttcttgataaactccccttttcggccaatgacagcgcccactttttgggctggaacaagtatacggaacacactttctccaggccaacctggccatttcttctcatcagttactgcattggcctgctgctctccctgagcttctccaccataggcatgcccttcttctgaggggatagcttggtcctcttcatgctgatgccccacatttccatcatttatgttcacctgatcttcattgtatgggatccctgattcttcatagcttgagtctttggtttcttcgtcatatgtattttctggatcttccttgtactgctcaggcacatcactgagaggaatcgcctgctcctcattatcaagattactggcaatcccactcatgtcctccgcaggattctcgatgttcccatccatattttctcacggaggaagaggacgaggcctcgccagagagggagtcccgccgccgccgccgtggagggttttgagaggagaggagaggagagcacgggagccgtgcggatttgaaaggaa

SEQ ID NO: 4243 - DNA, 536 bp, Oryza sativa
  Clone ID: PAT_MRT4530_11144C.1
gtcggccagccgccgccgacctcgccggtcgccgccaccggcgtcgccggcagagacaagagtaacgacgaagaaagattcttttgggggtgatgtgttccaaataccgaagactgattctgattgccgcttctgtttgttggaggaccagaaaacatctcacaaatattttgggttggcataattattatgcagtctcgtgaggtcttaatctccattgcacaagaagaatccagtaaatgatgcacagctgttatctcgtctcattaggtacaaggttgacaaattcttactgggaacaacacaattagacagcagtttataccggcaagcttgttctaaataatctttgtaccggcgagaaatttacttatcagatcagactccaggcaactactgaagggaagccccaggattcaatcagagctactttcgtgtcaagaatgagttgcacggtgctctattgtatcctacagttggcctgcctctttctgagcttggttcagcatgtctaaatgcaataacttcactaccac

SEQ ID NO: 4244 - DNA, 394 bp, Oryza sativa
  Clone ID: PAT_MRT4530_11145C.1
gagaggagtcaaacggtcaaaccttgttggatgtttctcgatgcttccagtaactagtgtcttctagcatttccgtggtttgggccttgttgaagtgggccacatcaagcccaaaagcccagcccaatctagaattacttctgcccatcacccatcaaattctggcagaattcacatgaatttcccccatctttgttcataatgaaatccagttcatgagtttgtttctggcaacaacattttcagtgtaagatgcctggagccctggactggaggggcattacgttccagctttattattgctgctggagttcacacaggcatgatcatcatcattactaatcaacaggggagtgcagtagtggtacctacaggaaacatgctctctcatgag

SEQ ID NO: 4245 - DNA, 1115 bp, Oryza sativa
  Clone ID: PAT_MRT4530_11146C.1
ggccctcttgcacttccgcgcgccctcgtccgcgctccaccgctagcttatctcaatctcgccacgaggaaataaagcctagcgcatattagccgttggttggtttagtatacgtacgtagggtagcttagcttagagcacgtacgtacgcatcgatggcgcagcaggcggagaaggcggcggagctgcaggacccggagatccgggcggagctggaccggcgcgcccgcgacgacggcaagaccgtcatcaagagcggcaccggcggcaagagcctcgacgcccaggagcgcctcgccgaagggcgtaagaagggagggctgagccgcacgacggagtccggcaaggagcgcgccgacgacgacaccggcgccgtgctcatcgagcccgacgacaagatgctcaaggaggccaaaaagaacctgggccgcaagtgagacgtacgtgcactagcgtgctggtgtgttgtggttgctcgatcatatagtagtgtactagtgtgtgcatttccttggtgtatccatgtgcatgcatgcatggcaggcgtacgtattagtattactctacgtgacgtgtaagctatgctggctacaaaattttggtccctgcaggattatattgtagccatatgtatgttagtatgtatgtacgtgttcttcacgtactgccctagctactagcaagtcgatctagctatatcgtgtgtgtgtacgtatattgtgatcgatgtacgaagctgctgctttctacatcctggctacaaatgtaattgtgtttgtgtgtctccgtacgctacgtttctgtgtgtctgtagccatgcattgtcctcttcaaggctccaatgttatataacaataagtggttgatttctactgaaaaaaaaaaaaaaaaaaaaaaaaaaaaaaaaaaaaaaaaaaaaaaaaaaaaaaaaaaaaaaaaaaaaaaaaaaaaaaaaaaaaaaaaaaaaaaaaaaaaaaaaaaaggggggggcgcccttttaaggaaaccaaattttattacccggggttgggaaggaaaaatttttttttaggggccccaaaaaaaaaataacggggccgggttttaaaaactggggacggggaaaaccccggggt

SEQ ID NO: 4246 - DNA, 333 bp, Oryza sativa
  Clone ID: PAT_MRT4530_11147C.1
atggcgcagcaggcggagaaggcggcggagctgcaggacccggagatccgggcggagctggaccggcgcgcccgcgacgacggcaagaccgtcatcaagagcggcaccggcggcaagagcctcgacgcccaggagcgcctcgccgaaggcccgtgtcctttttatgtttcttctctcttttgtgctatatcttttacacggcgtaagaagggagggctgagccgcacgacggagtccggcaaggagcgcgccgacgacgacaccggcgccgtgctcatcgagcccgacgacaagatgctcaaggaggccaaaaagaacctgggccgcaagtga

SEQ ID NO: 4247 - DNA, 397 bp, Oryza sativa
  Clone ID: PAT_MRT4530_11148C.1
tttttattttttttttattctcttttttcgattatttttattcgtagcgtacggagacacacaaacacaattacatttgtagccaggatgtagaaagcagcagcttcgtacatcgatcacaatatacgtacacacacacgatatagctagatcgacttgctagtagctagggcagtacgtgaagaacacgtacatacatactaacatacatatggctacaatataatcctgcagggaccaaaattttgtagccagcatagcttacacgtcacgtagagtaatactaatacgtacgcctgccatgcatgcatgcacatggatacaccaaggaaatgcacacactagtacactactatatgatcgagcaaccacaacacaccagcacgccggacgcgtg

SEQ ID NO: 4248 - DNA, 1545 bp, Oryza sativa
  Clone ID: PAT_MRT4530_11149C.1
atgccgccttgcgtgtggggatcgcacacacctctctctcttctctcccccccggccgcttgggcgggcgagaggatggagggcgaccaggccggcggcgacctcaccgacatcgtccgcgccgggggaggggccatgccggggagcgtcgtcgtcgacctcccgtcgacggccgccgagtggcagctcccggctgagccgatgctcttcccgccgccgccgtcgttgtcgtcgacgacggacggctgtggcgccgggggagcggcaggcgccgacatcttcggcggtggcggcggcgaccttttctccggcctcgtggacccgttcagcagcgactactcgtccggcgcggacttcttggacgccatgccggacgcgatggcgaaggtcggcttcgacacagctgtcggcggcggctgcggcggcggcggcggaggtggtggtgggagcggtggacacctgttagacatgagcaggaagcctctcttgcccagagggatgccgatggcggccgtcggtgggctggcggcgccgagggtgatgccatcgccgctgtcgccgcgagccatacggccgtacccgccgatctccgcaggcgacatgatgaagctcggcatcacggcagggcaggcggccgggtgcgccatcgacgccgccgtcgccggcatgcagatgtcgtcgccgcgctccggcgggatcaagcgcaggaagaaccaggcgaggaaggtggtgtgcatcccggcgccgacggcggcgggaggaagacccagtggtgaggtggtgccttctgatctctgggcttggaggaagtacggccagaagcctatcaagggctcaccctacccaagaggctattatagatgcagcagttcaaaaggttgctctgcaaggaagcaagtagagcgcagccgtactgacccaaacatgctcgtcatcacctacacctcggagcacaaccacccatggccgacccagcgcaacgccctcgccggctcaacccggtctcaccacagcaagaacagcggcggcggcggcggctcgggttccaagggctctcagaacgacaagtcacagcagcagccaagcgttaaagaagagcagaaggatcaggcgacgacggcgacgacgacgaccaccagcacaatcactaccacgaatagtgcttctcctgtggttgtgaaggaggaagaggcggcactggcaggatcgtcggaagcattggagttggagagagtcatggacactactgcagctggagtagtagaccacagtgagctcatggatcatgttttcagtgagagctacaagccgatgataccggagactggccagccggatgatttcttcgcagacctcgccgagttggagtcagatcccatgagcttaatcttctcgaaggagtacatggaagccaagccaagtggtggcgatcatgcccaggagaaggcaatggccaaggaattggatccattcgacatgctagactggtctactactactaactcttcggcagggagctcatttgagcaagggaagagaggctaa

SEQ ID NO: 4249 - DNA, 1100 bp, Oryza sativa
  Clone ID: PAT_MRT4530_1114C.1
ttttttttttttttttttttttttttttgatcttaatcagaataagattattgtgttcaagaggaaaaacataaatgcttctagagacactggatacagaacatgattaggatagccaacgatagaacagaggagcatacatatcattctgctatcatcattgttgtagtatcaaaaaagaagatatgaagctgaaggcaatgcacatggagcacagcggaggctgcatattctgataaccagtctatctgtagtactagtatacaacagcactgtcggctagctcctgctgattcaagaacaggaaatggcagattacaccagcttattggaacgtatacagttaacccctaataataatctcaagggtcattctgtttataacatcctatttcatttttacattcgggtgttatggctgccaaaaagctgagagatcaactaaccagaatgagcttcatatggcgtatatccggtctatctcggagtctgaaaactctgagttttgctgccatgagtttgagccactcctccttgtagatttcaccttcttcctgatcgaacgtgtgcgcttggatctcaccacatagtaggtcattgtaccaagcacaccagccatgatcactccgccgattagggtcaccagaagcgccgcccactggaagtgcttcccaactacaatataagcggatgatatgaacgccactgtagtgcacacagaagccagccacatcaacttattgataatctctactacccgcctctctgctttagtctctcccctaacaagtgtaatctgaaccaccactactgctaatgatgtgaacaaggcaatggcattgaagatgaagaagatcttgaaggatacggcatgcacagctattgccacgccgttgttatcgttaccacctggcacagtgaagattgcagcaaatgcaaccgtagcaaagagcacagccacaacagtgacagaattggttgcgttgttgatgccttccctgtggagtttcctcagctcctttgctatgccagaaacatttttgttggtttttcttgcttgctcaagttgtgtgtgcacatccttcttgcggacgcgtggg

SEQ ID NO: 4250 - DNA, 289 bp, Oryza sativa
  Clone ID: PAT_MRT4530_11150C.1
tcttgaggcacacgaagaattgtttatctaacagcaccggagataatggctaggctacggccggcgcgaccactgtattagcatcggtggcggcggctccagctagtaacctctacttggaaacctctatgagaataccttcgcagttcttggctgagaattgaggagctgatgctgacgatgccgctgctgatgctgccggtggtgttggtggtgtaaattgcggaggcggaggtactgtcatttgtgctgtaggtggcgatggggaggctgtggttggggaaggaga

SEQ ID NO: 4251 - DNA, 474 bp, Oryza sativa
  Clone ID: PAT_MRT4530_11151C.1
atgggccccacatgcaggggacggcgcgggtgggcggcggagcaggcgagctccggcggcagcggcgggcgtggtcggcgccgccccccaaccggagcgccggcggtccgcgtgaaggcaggtccggccgtccggggaggtccggcagccggtgctacggcggcggcggccggcggcgggagcactgggcgggcagatgaacggggcggcagcgggcagagcggcggcacgaagccgaaggagtgccagcctcgtcatcgtcttcttccggcgcatagtcgtggagcggcgggcggagggcggagcagatgggcggttggtggagcgacgacgggcggagggcggagcagatgggcggttggtggagcgacgacgggcggcgggcggcgtggcgagagcgctgcgagggaggaggcgaacttgtcggggcggccggcgggagaagaggccgcgcgcgccggtcgatgggagtga

SEQ ID NO: 4252 - DNA, 279 bp, Oryza sativa
  Clone ID: PAT_MRT4530_11152C.1
atggtggaggcggcggagatgctagcgctggcggctgaccgagaggagctggcgcgccttgatgttgttgtgtggctgtgccgcgttcggcatggtggacatgttggtcaaagaggtgatgcggtgatgccgatcgatgccagcactggcgcacggtcgatggtggaggaggtgggggcgttggctgccgaccgagaggaacgggtgtgcctcgacgctgtcgcacggccgcgccggtcacttgctatgcccgacgagctccccgtccacgacacatga

SEQ ID NO: 4253 - DNA, 1669 bp, Oryza sativa
  Clone ID: PAT_MRT4530_11153C.1
ctccactctcgcctcctcgcgactcggagttcaccgccgccaccgcctccgccgccgatctccccgtcccgccgcgccgccgccaccgtcctccctcctccggccgcatccccggaattcagaaccagtaggaggaaatggctgacggcgaggacatccagccccttgtgtgtgacaatggaactggcatggtcaaggctgggtttgctggggacgacgcgcccagggctgttttccctagtatcgtggggcgcccccgtcacaccggtgtgatggttggtatggggcagaaggatgcctatgttggtgatgaggcgcagtccaagcggggtatcctcaccttgaagtacccgatcgagcatggtattgtgagcaactgggatgacatggagaagatctggcatcacaccttctacaacgagctccgtgtggcgcccgaggagcaccctgtgctgctcaccgaggcgccgctcaaccccaaggccaacagggagaagatgacccagatcatgttcgagagcttcaatgtccccgccatgtatgtcgccatccaggccgtgctctccctctacgccagtggccgcaccacaggcatcgtgctggactccggcgacggtgtgagccacaccgtgccgatctacgaaggctacgccctcccgcacgccatcctccgcctcgacctcgccggccgcgacctcaccgacgccctgatgaagatcctcaccgagcgaggctactccttcaccaccaccgccgagcgggagatcgtcagggacatcaaggagaagctcgcctacgtcgccctcgactacgaacaggagctcaacgccgccgccgccgccaagaacagcagctcggtcgagaagagctacgaactgcccgatggccaggtgatcaccatcggggccgagaggttcaggtgccccgaggtgctgttccaaccgtcgctcgtcggcatggaggcggccgggatccacgagacgacctacaactcgatcatgaagtgcgatgtggatatcaggaaggatctgtacggcaatgtcgtgctgagtggtggatcgaccatgttccccgggatcgcggaccggatgagcaaggagatcaccgcgctggcgccgagcagcatgaagatcaaggtggtggcgcctccggagaggaagtacagtgtctggattggtgggtccatccttgcctcccttagcaccttccaacagatgtggatctcaaagggagagtatgatgagtcgggtccagcaattgttcaccggaagtgcttctaagctctggctttttaatcgcttatctacaaggcagtttcttttcagttttcacaagcccttgtcatgtaagctactctgtttgggattgttggtgtcctatcagaatgttgttggatttgtttcatggctgaatattatgcaccttctgaactcttggtatgcatttgtccggtggctgctgtattatacatggcatgcatggtccaacttttgtcatgctaagtttgtggttagtggtaggaccaaaagaaaaatgggagatgtacccactacctaggatcgtctattgtaatcgtacttgtgcgagtcatgttatcatttatcttgtacattcatctccaagataagtgatctggttctttgatcgtttgattgatggtttttggttc

SEQ ID NO: 4254 - DNA, 244 bp, Oryza sativa
  Clone ID: PAT_MRT4530_11154C.1
atgggccggaacggtaatgcggcctacgtgcggaaatattggtcggaactggattcccacgtcgcgaatgttgggctgatatcgcgctatggacagaccacaaactaccagcccagtaacgacgatctgggcctgagccagattcccaccaagcgaaaaattaagagacctaaagtgaacttattccacccagatggtgctctggaatgggataccgacgccgcgtcgccttcagttgtccacg

SEQ ID NO: 4255 - DNA, 210 bp, Oryza sativa
  Clone ID: PAT_MRT4530_11155C.1
atcagggggataacaccaagttacaaaaattatacagcggaaccagtatactgaaactacttaaaagtacatcatgtaaagtcacctttagtcacctaaggaaggtaaatgacgtcgcagaaggaaacaagcctacaattggatgccattgtgtaggaacattgggccttgaagcttacctgggtcaaccaatgagcctcgtccaagggc

SEQ ID NO: 4256 - DNA, 2088 bp, Oryza sativa
  Clone ID: PAT_MRT4530_11156C.1
atgggttctgttgccggcgacgccgcccgcctttcttatccacccactcgccgtgacaattccgtcgtcgacatgtaccatggcgtccctgtcgccgacccttaccgttggctggaggacccagagtctgaagatagcaaaaaatatgtggcaaaccagatgtatccagtagaggcagtgcttacaggctgtgtaaactgggtgaacctacgtcgtgaggtaacttgcgactttgaccacacgctccacgagggtcagtttcgtaccggcaatcagtagttctacttgtacaactccggaatcgaagtccatagattgctctacgttctggataattttgatggagaatcggaggttcttctgaatcctaatgcactaattaaggatgtgacagttggtaattcgacgtattctgttatcaaggatggaaatatcatggctgatggcctaagtgaaagagactgtgattgggtcactattcgtgtgatgaacattgctgataagcagactttgtctgacaaattgtcttgggtgaaattctcatctatcagttggacccatgatggaaaaggttttttctatggtcgataccctgcaccccgagaagtggaattggatgctggaactgaaacaaacattaatcttaatcatgagatatattaccatgtcgtgggatctgatcagtccgaagatatattatgctggaaagatcctgaacaccctaagtattcctttggtgcatcggtcacagaggatggaaagtacatcatactaggtacttatgaaggttgcgatcctgtcaataagctatactactgtgaaatttgtactcttcctcaagggatagaggggttcaaagagacaaaggggatgcttccatttgtcaagcttatagataactttgatgcccaatatcatgttgtggcaaatgatggtgatgaatttacatttttgaccaatagaaattgtcctaaggtcaagctagggagatgacagatcaaaaaacaagaatggtggactgattttcttatcggtattgcttcatgtggaacatgatagatgcgtcatggtcggagtgattaattatgtccaggataagttggaaatggggagcatcttgcacgtgcaccggtagaagacaggcctgttcaaaaaatcgccctgtgcaggaactttgtaggatttttgtttgaccactttggaacgaaggactggagcactaaaaatcttttgggatttatttggaatggcccagtgtatgaagatttgagatgaaagttagcatgaggtgtaacctgttagaaaattgaggttaagaagattttcgtcaatagtaaggatggaaccaaaattcctatgttcataatgtcaaagagagatattgaacttgatggatcacatccaactttgctatatggttatggtggattcaacataagtcttactccttctttcagtgttagtcgtgttgttttatgcaagaacatgggttttgttgtctgtgttgcaaatattcggggtggtggggaatatggggaagagtggcacaaagctggagcacgtgcaatgaaacaaaattgttttgacgacttcattgcttgtgctgaactcctcatttctgctggttatacgagttacaggcagttatgtattgaaggtggaagcaatggtggtcttctgattgctgcttgcgttaatcagcggcctgatctctttgggtgtgctcttgctcatgttggtgttatggacatgctccgttttcacaagttcaccattggtcatgcctggactaccgactatggttgttcagacaatgaagaggaattccactggcttatcaaatattccccccttcataatgtgaggagaccttgggagcaaagttttgttaactgttgtcagtacccagcaatcatgctgttgactgctgatcatgatgatcgtgttgtgccattgcactcattgaagttgttagcaacactgcagtatgtcttgtgcactagcattgaggatacaccacagattgatgaggttgctgatcggtatagcttcatggcgaacatgttagatgcgtcatggacggagtga

SEQ ID NO: 4257 - DNA, 1219 bp, Oryza sativa
  unsure (1)..(1219): unsure at all n locations
  Clone ID: PAT_MRT4530_11157C.1
gaagatatttcgtgaaatttcagttcctggatttgatcgaacaaattttgaggttaagcagattttcgtcaatagtaaggatggaaccaaaattcctatgttcataatgtcaaagagagatattgaacttgatggatcacatccaactttgctatatggttatggtggattcaacataagtcttactccttctttcagtgttagtcgtgttgttttatgcaagaacatgggttttgttgtctgtgttgcaaatattcggggtggtggggaatatggggaagagtggcacaaagctggagcacgtgcaatgaaacaaaattgttttgacgacttcattgcttgtgctgaactcctcatttctgctggttatacgagttacaggcagttatgtattgaaggtggaagcaatggtggtcttctgattgctgcttgcgttaatcagcggcctgatctctttgggtgtgctcttgctcatgttggtgttatggacatgctccgttttcacaagttcaccattggtcatgcctggnactaccgactatggttgttcagacaatgaagaggaattccactggcttatcaaatattccccccttcataatgtgaggagaccttgggagcaaagttttgttaactgttgtcagtacccagcaatcatgctgttgactgctgatcatgatgatcgtgttgtgccattgcactcattgaagttgttagcaacactgcagtatgtcttgtgcactagcattgaggatacaccacaggtcaatccaataattggtcgcattgacgtcaagtcagggcatggagctggcagaccaactaaaaaaatgattgatgaggttgctgatcggtatagcttcatggcgaacatgttagatgcgtcatggacggagtgattcattttgtcctgcataagttggagatggtgagcgttgggcacgtgcaacggtgcaagacaggccctttcaaacaaatgatctgtgcaagaactttgtaggatttttgtttgaccatttggaacgaaggactggagcactaaaaatcttttgggatttctttggaatggcccaatgtatgaagatttgagatgaaagttagcatgaggtgtaacctgttagaaaatttctctcttgaatttctaagttttttctgtggtctgttttacaatcctccaatttacccttccattttatatcaaaatcatacgtttacgttt

SEQ ID NO: 4258 - DNA, 501 bp, Oryza sativa
  Clone ID: PAT_MRT4530_11158C.1
atggcagcgaaggaacagctttacaagtgcgaagttgcttgggacggggaggatgtgggcggcaccgcgagcggcagcggcgggcacggcggcggatgggcggagggcggcggtgcccggggccggtgggcagtggtgcacggggccggacggggcggaggcgcgaggcgaagcggcgtcgccgaaggaacggcggcccgtggctcacggtcggcccgtggctcgtggcccgtgctggcggtcgagctggcggtcgagtacacgcagagccccgaggaggaggacgccgaggagaccaacgatgacgaggaggcggcggcggcggagctggagctcacactcgccgtgggcaccgccgccagtgtcaagaagaggtacaaccgcaacaagcaccactcccccgggcagagcttctcgtcgtcgtcgtcgacggagtacgacgtgctcgtcactagcggggcggggatgggttgggcgcgtgggcagcggtgtcggctgctg

SEQ ID NO: 4259 - DNA, 1677 bp, Oryza sativa
  Clone ID: PAT_MRT4530_11159C.1
agaatcaggagcggcagttcacaataatactaataatgtacagcattcacagttgcaatacaatctccatagctcactctcaaatctacacaaggggcaagaaagaaatgccgtggacaaaactggggatacgtcaccagaagagatagaagaaaaagaagagaaatgagaagaatctgtgcacccaaacttcaattctatctgtggaagtaacctgcagcctcccaaaaccacctcaaagatttacaggcaggcagtcaccttcaatcctttggaccaattcctgcagatgcctgattatgtacagaccaacacaccatagcaatcactgatgtcactagttagctcaatcggagttgttcatccttttttgagcttcaggagactggagctagtacatctcttgccttctcaaggctttttcttcatcggggttcctatcatcctcgacgtgcttcagtaagtctccgtttaatcttgctgtcaaggagggagacaatggtgcgtatatacttcttgattgcggaatcctttcataatccttcgtcacatgtaacaaaatggtaccagacaacacaacaatcagaccacagatttcagaagtaatgcttccaaggctttgaccagaccaatccttgaacattatgacgcttgcaagtattgttagtgttgtgaacattacataatagattggagatacaattgcagtattaaatgtatcaagtgccttgttcaagtaattcatctgtgttagcacacaagtggccactataagcacaaagaaccaagtctctggatataccaactgatttgtcccctcaaacgtcaactttaaggatgtaccaagagctttaacactcattaccgaaagagaacccatcaaagagcaaatggcagtgtagatcaacacatttgactgcccatatagaggggagaaatggaacactagcacgaagaccaccactataactgaagcaacatatagcaagaaagcaggctgtatcgccatgttccagatttctctaactgaagtaatctcttgctcctgaggagcatgaataacaatcaccactgatcccgcgatgcacataacacaaccaagaacaccaagcgcgtgtaacctctcattcaggataaaatgtgccagcactgcactaacaattatgctcagtgctccaagaggagtaacaagaaccgcgggagcgaaggcgtatgcgacgaaattggcaacttctcccacaatcatggtgatcatgccaacccaccatagaggctccaggaggtacgagtacccaccaacccctgcgcggatgccggaggcgacggcggcgcggcggaggcccttcttcttgatgatgaagctggcgccgatgaagccgctggagaggagcgccaggacgatccccttcacgttgtccgtcgacaactcctgccctcctcctcctccccccgcgccagccgcggcagcggccgaggcgtcggacgccccaccagatttccctccaagatcgtcgcttctcggggctactttcccctacaattcgggctgtttttgacgacgggaatgtggttcttggatggtttttccgcgtaggattttgttgcttggaaggaagaagagggggagagccgagagctgattggccccgcgccctcccccccgcccggggatccact

SEQ ID NO: 4260 - DNA, 252 bp, Oryza sativa
  Clone ID: PAT_MRT4530_1115C.1
atgacacgcttcgcaaacacgccgttcgacatgtgccactcgtcgccggttcagcggttcgtgtccaagagtagcgtgatcaactcgtgcctatgggtgctgggcagtgacaacttcatcaacactggggcgcgacctcaaggcgaccatggcagcatacggtggatggaggaccagggccgtcccatgaattttaggggccctaccacggtgagcggcggccctgctcccttcgaccccgcctccccgtga

SEQ ID NO: 4261 - DNA, 422 bp, Oryza sativa
  Clone ID: PAT_MRT4530_11160C.1
ataatataaaagttggctgattgattgatcatattgcaagacgacatgaacattgttctcttcacttacactcgttctccgtacattaccagttttccagtcgtagctagcacagtacaatactcttaattactagtaggatttaacaaggagttcagataattaattttaagtagcgattagatgtagtttagttgaaagtttttatataaatgtttttgtagtattatttatcgacgacggcaggcggtggcgaggggagcgccgcaaaggcatttgttgtgttggtagcagtaggcgtcgaacctgggcatggcgggcaccgcgccgcacatcttgttgtagctgacgttgaacgtctgcaggttggtgaggttggccacctgcgccgggatccccccgcggatggcgttgtggctcac

SEQ ID NO: 4262 - DNA, 726 bp, Oryza sativa
  Clone ID: PAT_MRT4530_11161C.1
cggctccccgggccccccccgcccgcccgggggcgatcccaaaaatccaagcagtttcctcctctccaaaccaggctcatcgccatctccttccccgcgcgagagagagacccctcaccttcgccatggacggcggcggcggcgcgaagaagagccggaacccgcacaaggcgccggcggactaccgcagcgaccgcaagtcggcctccgggatgagcggcgagcccaagaagggcggccgcggcggcaagttcacctgggagggcgccgacggctacgccgacgaggacctcgacctcatctcccccaagaactccacctcccactccaagtccgccgcttccgccgccgccgccgacagcagcagcaacaagaagtccggcgacgacgagtagtaggcaggcggccgccgcctcccccggtgtcgctcggtcggtgttcatcccctcgcaatcctagctgttcttggaataagtgtgtcgtgttcatcggtagtggttggatcgacgggccatggggatttgtagatatatcatcattatctatcttttaactcttgctaatgttggagtcttcggttcggttctttggcctaaaccgatttatcttttatctcagccgtattagcaattgaaaatcctgcactttggttgaatttactgctctttgttttcctgattaatctatcgtcttcagtactcatctgaagatatttgcagctctcac

SEQ ID NO: 4263 - DNA, 280 bp, Oryza sativa
  Clone ID: PAT_MRT4530_11162C.1
atgggcttcaagtttgacagtggggaattatattttggaataagttcactggaggcgtgggcgaagcaggggacgcggaggggcgagcggcggtgggcgagcatatgggggagagaaggccggtggcgggagagggggagagaggccaccgacgcgacggtggcgacgggagaggaggcggttggcactatggcgagctccgccggcgcgacggggcgagtggcgacgggggagggggagagaggccaccgacgcgacggtggtgacgggagaggaggcg

SEQ ID NO: 4264 - DNA, 1222 bp, Oryza sativa
  Clone ID: PAT_MRT4530_11163C.1
ggcaagaggagtcgtgggagtccaggagaggaggcggaggcgcggaggagagaggaggaggaggaggaggtggttggtctccgccatggcgagctcgtcgtccgaccccgacaagctcatgtccaaggccgacaagctaacaaaattgagcttcacgagatggaatgccgattggaagagtgctacctccttgtatgagcaagctgctattgcttataggttcaaaaaggagaatgagaaagcaaaggatgcctttgagaaggcttcaaaaggacaggaaatgatttcttcaccctgggatgctgctaaacacatggaatctgctggtgctttagcgaaagagcttggacgctggaatgaagtttcagatttttatcgcagagcatcagaattctatcgtgaatgtggaagagcacaacctgcctctgatgctcttgcaaagggtgccagtttcttggaggataacactccagacgaagcaataaaaatgtatgatgaggcctgttcaattctagaagaggatggaaaggaacagatggctttcgatttgtatcgtgctgctgcaagtttatatgtcaagctcgagaagtattcagatgctgcagcaacttttctaagacttggttcagctgctgataagtgtaatgccatcaacagccagtgcaagggctatttgagtgcaatcatcatctacctttatgcccatgattttcaacaagctcagaaatgttacaatgactgctcagaggttcaagccttccttaacagtgaccagaatcgatgtgcaatgaaactgctgtctgcttatgaggaaggtgatgctgaaggaatcaaacaggctgcacaatcaagtgccatcaaacaccttgaccatgtggtaattcgacttgcaaagaaactacctacgggtgatctgcagaccatcaagaaattggcagacgatgacggcgaggattctttggacgagaatgacctaacttaataccaaactacccgtaccgggagacgctgagaaagcaaatatttgaggttgactcatgttaccgttgatgaacatgagcgatttgtaaaaagaagatatcgatgtacacggtacaaagtacaaacttgtgtgaggcagtctgtatcttgatatttatcatgctcagctcaactgtcatatctgatttctgcacatatacatcctacattgtttggtttgttaaaaaaaaaaaaaaaaaaa

SEQ ID NO: 4265 - DNA, 341 bp, Oryza sativa
  Clone ID: PAT_MRT4530_11164C.1
gccacgtggtgaccaccccgaggggtcggggcgacccgaccccctgtgttaggtatgggtggcctccacttgtccatgggcacgacccctcgggtagcccccagcgttacatctggcacaagatcagctttgccgtgacgacctcaactatcttgaagagcgaagaagacacgaggcccttcgggccgctcattaccaacagagcctgcggcgttatcatcagcgccatgtccggacacgatcactacaagtcaacgatctcatcttgcgccgcatacaacgacaccgtgagcgtaggatggatatggtttccccatgtaggcgtaattggtggtgcgtaa

SEQ ID NO: 4266 - DNA, 129 bp, Oryza sativa
  Clone ID: PAT_MRT4530_11165C.1
atgggcggggaggaagcatactgcggctgccaggggttcttcgctgatgctggtgagcttcgctcggtgctgtggctccttgatcgggtttggtctgcagtggtcgcggtgttgtgtgcctgtgttgag

SEQ ID NO: 4267 - DNA, 372 bp, Oryza sativa
  Clone ID: PAT_MRT4530_11166C.1
gaagctgcgccggcctgcacgcggcccggactgcctgggtggacccacgcgcgcgttgtgtcttgggtggcatgctcgatggcaccggatgcggattcattgtgctaccaccccctctgtaggggtggccgctggggagtacacaactcccgcctgctccctacgccggccgtccccaagcccggcgggggactcgccggtcccggtctgtgtgtaggactgcatactatggacggtagccatgtcggcgacgtgaaccggtcgcttggcatgatgggcaacggcccaagcggcagccgccgagaccgcgactcggtgcgacgcggtcgggaggaagagaacgacagtcgctgccgcagccacaacctggac

SEQ ID NO: 4268 - DNA, 339 bp, Oryza sativa
  Clone ID: PAT_MRT4530_11167C.1
atggcgttctggatcaatctcagcccaacgccgaacagacacggcccatgttcaacgagcagcccacaccacaacgccttctcggttccgcagcggcgccaagcacaacagattcgccgagagacagcacggcgtgccacggagacttcaggcaaggacaaccaagaacaccgggcacccaccagcttactgtcctccattgccggactggagtgcacagctccagagttaaccgtgctgtcggaggccggcgtcggcggcgagcaaattcagcgctcaaaatcagcaactatagaattttggacacgactgggttatgattgcagctttcctacctag

SEQ ID NO: 4269 - DNA, 1647 bp, Oryza sativa
  Clone ID: PAT_MRT4530_11168C.1
atggccagggaagacggagcatccaggggtgcaggcgagcgtggcgccagcgaccggggcagcggagagcgtgtcccgcgagacgggcggagaacgggggacaggcgagtaacatgggataggcgctcggcaggagatagacacactgtcgaagataagcgcccgggaggatccggtggcaagcaacagaaggagaccaagggtgacaacccttcccagcatatcgcgaagatcccggtccgtagagatgatcgaggaggatacaaacgccacggcgagtcaatcgaattcctgcgtgactggcgtcataagaaggagagaactgctcgtcctgacagacttccattgccgaaatcttctaaaaagggtctgcgtattgaagattctccacaccccgagctggaccgcaccatgcgtgagaagcgaggaaaaaaccccgtagtttacgagagggtgtcatccacggagtcttcaagcgatgatcgtcgccgccgccgccgctctgtggtgcccgacatggagcttgatgctgtccagttgagcgactcctcctcctcttcttcttcttctgatggcactggcaaggatacgatagagcaggcaactgctttgggtggacttaaagctactgcctcttccgatgttgctccggtacctattgacgatgtaccttcagttgtgctggctgctaatgctcctgtccgctcttctcgggtgatgccgacggctgatgccgcttcaactccgggaccctcgactcaaaagcatcaggaagaaacttcaggcaatccatccgacacagcttgccagatgaacgagttgatggagaagacgtcccgttaccttgctgagttcgggacgggcggtcgctatctccaacttaactctgtgagttcggcgactgacgaattgccgacgctggagcttccaaagtccacgcccattgaacgtcgcaatgcccgcatggtggaggaggatctattaagcatccaagattgtttgatggagaaacccctgaacaaggagggcaccatagagtacattggtgctgccaccgctgcatgggaaaatagttacgagcttggacgccccgcagacttggagaagttgatgtcttacttgggggcacttgtgcaacatcttaagggagagctcccagtaacctttgaagggagaactttagctgctcatgaaggcgaggcgcgctcttccttagcaaagttagagagtgcgtgttcagacgtgctactagaccttgacctcctcaagagtggccgtgaagacgtggccgcggatcttcagaagtccaagcaagcaagggctacctggaagaaagaggcggaggaacacgagctgaaagccaaagatgcgagggagaaggagcaccagtgtttggaatcagaggaggcagccgccaagaaccggcaagtttatgatagtaccatcgacggcgtcatgcaactgataaagcgtcgtgacgaggcgaaggtctatttggggcatcttgctgaagagaggaaacgccttgcagtggccgcgccgccagaggtggccgccattctatcatatcgtagagaatcggcgccttggggtagtacgtcgaagaatcagaatagcctccatatgcttctccttggtttaccttaa

SEQ ID NO: 4270 - DNA, 440 bp, Oryza sativa
  Clone ID: PAT_MRT4530_11169C.1
ccacaagggcaacggggtgctgcaaacggaatagctacaacggccatgtccttgttcaaggctgttgcaccagctggcgcaggtgttctgtaagtacaaatctaattgtctacaactcttgattataaactaacagttgaacagaactactagatatatggacaacattttttagaaaatggattaaactggcctctacatccaaaatacatgtacacggcaaaagatatatggacaacataattgtcgcttttcacaaatactacaggagtatgaccatcagtggtgtttaccatttgggctgtgtacatccattgtggatgtagaggccggattttaatccattttctaaaaaaaaaagtggtacttaccatttgtttgacacaaactgtggtcatgaaaatgttagtggctagtttgtccttccaggttagtgatag

SEQ ID NO: 4271 - DNA, 1923 bp, Oryza sativa
  Clone ID: PAT_MRT4530_1116C.1
atggctgccgccgccgcgaaggccgcggccgccgccctctccaccgccggtgtcgtcgccttctcctccgagcgggcgtacgccgatgggggcgcccccgcgttccgattccccggcttctccgcccccccgacccctccccccgccgcgcagccgccgccgccgacgccgccggctcccgcgccggccgcggaggagaagcgcaaggtccggaacgatcacccccgcaccagcgccgccgggttcgaccccgaggcgctggagcgcggggccgctatgctgaagcagatcgagaactcgccgcatggcaaaaaggtcttcgagatattgaagcagcaggaggatgtgcggagggcggagaacctgacgaagaaggtggagtttcagaaggagcttgcggcgatcgaactggagaagacacgcgttgattatgatgagaggaaaaaacttgagcaacagcgagctcaggtaaaatcacagatgtctcgatacgaagatgagctagcaaggaagagaatgcaggcagatcatgaggcccagagagtgagaaaccaggagctcgtgaagatgcaagaggaatcagcgattaggcaagagcagatgagacgtgcgatcgaggagcaaatacaggaagaacgaagaaagactgatagagcaaaggcaattgtggagaaggaaattgagcaagagaaaattttagctgaggcaaatgcgagaataaagttaaaaaaacaaactgaagatgttgaaaggcgattgcttattgagggggcaaaggctgagaaggagaagtgggttcaattaataaatacaacctttgagcatataggaggtggtctacagacaatattaactgatcaaaataagctagttgtagcagttggaggtgtcacagcacttgcagctgggatatacacaacaagggagggtgcaagagtggtctggggctatgttgatcgtattctaggtcagccatcacttattagagagtcatcacgagggaaatatccctggtctggtgtcttctcacgtgctatgagtacaatgactagtaaactgaataaaggaagcaacttggggaacaacgggaatgggtttggtgatgttattctaaatccttctcttcagaagagagtgaagcagcttgctaatgccactgccaacacaaaacttcatcaagctccttttagaaacatgcttttctatggtccacctggcacaggaaaaacgatggcagcaagagaactagctcggaaatctggattagattatgcactaatgactggtggagatgttgcaccattgggatcgcaagcagtcactaagattcatcagttgtttgactgggcaaagaaatcaaatagaggtttactcctcttcattgatgaagctgatgctttcttgtgcgaacggaacaagacatatatgagtgaagctcaaaggagtgccctgaatgctctccttttccgcacaggcgaccaatctaaggacatcgtccttgcacttgcgaccaacaggcccggtgaccttgactctgctgtcgccgaccgaatcgatgaggtccttgagtttcccttgcctggggaagatgagcggtccaagcttttcaaactatatctggacaagtacataatgaaagctggtgaaaaacacgaaaagagctggctcaggttcttccgcggtcagcctcagaagatagaggtgaagggtgtcacagatgacttgatacgggaggcggctgccaagaccgagggtttctcaggaagagagatcgcgaagctgatggcaagtgttcaggctgccgtgtacggaagcaaggagtgcgtgctgactccagacctgttccgtgaggttgtagactacaaggtcgccgagcaccagcagaggagacgacttgctggctatgagcagaagaatgcttag

SEQ ID NO: 4272 - DNA, 364 bp, Oryza sativa
  Clone ID: PAT_MRT4530_11170C.1
aaatatgaaagacaactttttttctatttatatcacccaaagtttcacatgtctcataagaagagaaagacacttttttttatttttataccacccaaaggttaacacgtaacatatgacaatgtctagggcttatttgtaacttgcgagaccactattctgtaaaaactcatcacaagacaccggcaagggtggaaacggacctgggtgcaccattggccctagggcgaataccatatatagaaggcacctgaaaagccaacagatgttgagcttgggcctgatcccggtcaaagtaaagatcaccaaactgttggagttgcagctggagctctttgccagaacaatgttaatgacctgaaac

SEQ ID NO: 4273 - DNA, 1559 bp, Oryza sativa
  Clone ID: PAT_MRT4530_11171C.1
gtactatagtgtctgaagacattgttcacagcttacttcatttgattagtaacacctctccgccaatacagtgcaagcttcttgaaatatttgtaatgctaagtagttctaccacaacagttctgtcaattatctcagctataagatcatctggggctatcacaaacttggtacaatttgtagagagtgatcatcaggagagccgtgctgcttccataaagctgctgtgcaaaatctcatttgacatggaccatgagatagcacaagtcctccgaagtagtcctacattgcttggatgcttagttaggattgtcagtgaaaatgatgcaaatgcagatgagcaagatgctggcacttcagattctgggcaaatcttcctaaaagggacagacgtcttaccatgggagctcatggagcaaggggctttcaaatatattgcgcgcaaagttttaaacatatgtagaaggggaactgccaataacatagttgataacacgatgcttgaagggcttgtaaaagttctggcgaggataacgtacattctacgggaggagccacgctgtgttgcccttgctcgtgaatacaatcttgcttcactgtttaccagcttgcttcggctgaatgggctggatggtgtgcagctgctctctgcaaaggcattagtgaatctctctgttgaatcaagatatatgactggcacaccaaatttcgatgaacatgaacagaagtctgggcttacctggttgggtaagaaaccaccaggtattccactttgtcgtgttcactctggaatctgctcgattagagacaatttttgtattcttgaagggaaggcagtggagcgattggttgtttgtcttagccatcaaaacaagaaggtcgttgaagcctctttggctgcactttgcaccctacttggggatggcgtggagatcactgaaggtgtttcggtgctctatatggccaatgcggttgaaccaatatttgaaatcttgaagggaaacccaacaggcacacttcagcagagggtgacatgggctgtcgagaggattttgcgggcagagaacattgcaaaagcagcttcaagcgaccgtggcttgagttctgcccttgttcatgctttccagaatggggattccagaacacgacgtatcgcagaggcatcactgaagcacattaacaagttgccaactttctcccaaatcattgataagcatccctcgagacgaggttcgtcaattggaagcatggagcgttactttaggtctgatcgctaggctatgaaattgtgaagtaaccgaatgccatgacctgcctatgccttatggacaaggaatttttttgccatttcaagttaattttgttgatttgctaacgtttggaattagggattttagtttttgtgtcagaaaaaaatagtagttaggcattgatagtcttggtaatgtgcatattgttctgtacttgtaataaattttgtagatcatgtgtatatattgttttctgtacttctaattttgataatctgcaagtctaatgaaggcaaatcttatgaaaaa

SEQ ID NO: 4274 - DNA, 525 bp, Oryza sativa
  Clone ID: PAT_MRT4530_11172C.1
atggcagcggaggccggctcggcgcgagaggcgcggacagcggagatggaggccggcttggcgcgagaggcgtggccgatggagggaggccggattggtacgagaggcgcatccggtggaggaggccggcttggcgcgagaggcgctgccggcggtggaggaggcgacctcggtacgaggaggagctgttggtggatgtggtgcggtcttcggcgctcgaaggctggccggcggggggcgccggtgcaggggtcccacatgtcggcagaggttgaggggtggtgggagcattggtgcatcagccgtggattcgcaggtggtgagcagcggcagcagtcggtcacgcttagcagcggccagtctggtgttagccttctcccggtcttgtgtgttggcgctgtcgatctgggaaatgtgcaatcttgtgccagtcatggcctttgctctcctgacaaccaaagatctgtagagcccgattctagggaggtgaagcttgccatgattgagggtagaaacaccagatga

SEQ ID NO: 4275 - DNA, 1026 bp, Oryza sativa
  Clone ID: PAT_MRT4530_11173C.1
atggatctcggcacgtctacttccaccaacgcgtcgctgaagaagctccaggaagatggcgcccttcccggtcatggagtcatggagagagaagtaggaggtactgaaccccagcctgtcctgggtcacatggttgcgatcaaggattacattctttgtggttttctccctccaccttctgaatttcttctattggttctgaacttctacggcctttctctgctccacttgaaccccaattccattgccttccttagtatttttccgcacctttgtgaggcctacattggggtagagcccttcctcgatctcttccgcttttactatgagttgcgttggatggaatccaacagggtgtccagatgcgtcgggttccgacttcaggatggcttgagtagcgctaccgtggagtgccgcgtcggccaattgatgattagcggcccgacaacggcaagcgacatccccgtgcctctttgtgagaaggaggcgaccgagcgcgaagccgcaatcaacgctctccctctgactgacgtcattggaccgctcgcggaccaccaggcggcggcctcactgaaggagagcgtcgctcgggagatgtccgacgtggccgctgctgccgcgactagtggaagccgtgtcccgaaaatgcgaagaacgttcacctccgtgctcggtagccgccggaaagcatcctccccaccggcgagagcggcgcaggacaggtccggaggggcctccagagcgtctcctgcggcggcctcaaccgatgtcgtggtcgtgtcaaagagccgtgaagcgatgccgagcgggccatccagcggcctcggacctactcgtggaccgccggctgatgtcctcacctgggaggagcttcaagctgagatgaagcgcatcctcgaggctggcactcgcggcataagttgcgagatcaagaggcgaaggcagtggcagcgtcatcggcgaacaagcgtgccgacaagctgtaacacgacctggcggaggctcgcgaggacctccagaaaatga

SEQ ID NO: 4276 - DNA, 1343 bp, Oryza sativa
  Clone ID: PAT_MRT4530_11174C.1
ttaaccatcgttgtcggtccggccatggccgggctgggttttcacccgctgttcaccacctgcgaatctacgactaacgcaccaatgctcccaccacccctcaacctctgctgacatgtgggacccctgcaccggcgcccctcgccggccagccttcgagcgccgaagaccgcgccacatccaccagcagctcctcctcgtaccgagatcgccttctccaccgtcggccgcacctctcgcgccaagccggcctcctccaccggatgcgtctctcgcgccaatccggcctccctccatcggccgtgcctcttgcgccaagccggcctccatctccgccgcctgcgcctctcgcgccgagccagcctccgctgccatcggctgcgtctctctgcgccaagccggtctccgacccctcctccaaacgctgccgcgccggcaagatacagtcgtctcctacgccctcggctagccgtccaaggccgccatgcatcctcccacctcagccacggtggtcaccgccgtgcctcctcccaccgcagccacggtcaccaccctgcctccacattcacagccgccgcaagcctgccgctgtcgccgctgctgtcatcagccgctgtcgccagccgccgccaccgccaacgtggctgctgcctcatcgccctccgccaccaccgcatctgcagtcctccgctgccgccatcgcggccgtggaccgccgctgccgccgtcgccgtcgccgccaccggggctgtggacctccgccaccgccgtcgccctgggaggaccggaaccagcctcaccctcgagccttcgccttcgccacatccgtccacagcggcgcgcatctgtcgcctccttccggccgccgtcgccgcgaggctcgccgtcactcggcccctggatgcggggagaccggatccgccgccgggggaggcggatccacctccggtctcttcccaaaaactttattgtcgccttctcccggtgcacgccgacgagcgggatggagtagactataagcgacggcagtacggaggaagaggcaaaacctatattgatttcgcatgtgttgcgtggaggcggcagctcggcttttatagagacattaggacgcttgatcaggacgcgtgcacgatctccactccgtgtaaccgaaccgaataagtcgtgcgtaatttatccgaactccacgccgtttcacgcaccggattattcagagtgttgccaggccaggcaagcgagaaagtgtgttcgccattttcactctacctcacatgcctcaagtggctaggagagcatcttcccttataaggagtccagcacactggcgccggacaagtgga

SEQ ID NO: 4277 - DNA, 493 bp, Oryza sativa
  Clone ID: PAT_MRT4530_11175C.1
atgttttttaccggattgaaaaagctcaaaaagcaccaaaacctgatttttggacatattggagtgtattgggtgcgttcgtggcaaaaactcacttcgtgattcttgtggtgaactattgtcaattaatgccaatcttggcacacgtggttgcgaagtttttcatcggaatgcaaaagttcaaaaagcaacaaaacatgatttttggacatattggagtgtattgggtacgttcgtggcaaaaaatcatttcgtgattcgcgcggcgaatatttgtcaattaatgccaatattggcacatatgggtgcaaagttttttgaccggaatgaaaaggttcaaaaagcaccaaaacaagatttttggaaaatttggagtgtattgggtgctttcgtggcaaaaaaaatcacttcgcaattcgcgcggcgaacttttttcaattaatgccaaaattggcacacgtgggtgcgatgtttttcaccggaatgcaaaagt

SEQ ID NO: 4278 - DNA, 657 bp, Oryza sativa
  Clone ID: PAT_MRT4530_11176C.1
atggccgggctgagttttcacccgctgctcaccacctgcgaatccacggctgatgcaccaatgctcccaccacccctcaacctctgccgacatgtgggacccctgcaccggcgccccccgccggccagccttcgagcgccgaagaccgcaccacatccaccaacagctcctcctcgtaccgaggtcgcctcctccaccgccggcagcgcctctcgcgccaagccggcctcctccaccggatgcgcctctcgtaccaatccggcctccctccatcggccacgcctctcgcgccaagccggcctccatctccgctgtccgcgcctctcgcgccgagccggcctccgctgccatcggctacgcctctctacgccaagccggtctccgacccatcctccaaacgctgccgcgccggccagatgcagccgtctcctacgccctcggctagccgtccgaggccgccatgcatcttcccaccttaaccacggtggtcaccaccgtgcctcctcccaccacagccacggtcatgcaagtgaagttgctgctgcttcaactcatcatcaattcatcaccaccaagaggaacttggatggatgcttctcgggggtacacaagttggggaagcgctctctcaacaagtcagcagcagatgagatgcct

SEQ ID NO: 4279 - DNA, 1895 bp, Oryza sativa
  Clone ID: PAT_MRT4530_11177C.1
ttttccatcgctcccatccgcgtcgctcccgtcccaggggcggcacggacggcgcctcatcctcctccgccgcctcctcccttctcctcccctttgcctcgccaccgcccgagcggcgcgtcggcaaagccgaccggccacaaggacggcggtggcggggccctctcccctcctcgaggaagccagcggcggggacaccggggctgctcgggagcggcggtccgcggcgcgggaggcggcgccggggggttggcgtggcggatccggccacgccggaggcggatccgtctcccccggcagcggatctggcccctccgtgtccagggccgagcaacagcgagcggcggtcagcggcgcgggaggcggcgccgaggggtcgtcgcggcgaatccggccacgccggaggtggatccgcctcccctggcggcggatccggcctccccgcatccaggggccaagcgacggcgagcctcgcggcgacggcggccggaaggaggcgatggatgcgcgctgctgtggacggatgtggcgaaggcgaaggcctaggggtgaggccggttccggtcctcccggggcgacggcaggcggcggaggtccacagccccggtggcggcgatggcgacggcggtccacggccgcgatggcggcagcggaggactgcagaggcggtggtgacggagggcgacgaggcagtagccgcgttggcggtggcggcggctggtgttggcggttggtgacagcagcggctgacagcggccggcttgcagcggctgtgaatgtggaggcacggtggcgaacgtggctgcggtggaaggaggcatggtggtgatcaccgtggctgaggtgggaggatgtatggcggccttggacggctagccgagggtgtaggagacgattgcatctagccggcgcggcagcgtttggaggaggggttggagaccggcttggcgcagagaggcgcaaccgatggcagcggaggccggctcggcgcgagaggcgcgggcggaggagatggaggccggcttggcgcgagaggcgcggccgatggagggaggccggattggcgcgagaggcgcatccggtggaggaggccggcttgacgcgagaggcgcggccggcagtggaggcgacctcggttcgaggagctgctgatggatgtgacgcggtcttcggcgctcgaaggctagccagtagggggcgccggtgcaggggtcccacatgtcggcagaggttgaggggtggtgggagcattggtgcgtcagccgtggattcgccggtggtgagcagcgggtgaaaacccagcctggccatggccggaccgacaacgatggaattccccctcttgagggtgttgtcgtgctgtctcatccctcaagggtggttgccgggcgaaagcccagtcctggctcctttgagccccgacggatggcggcggtggtttaccatcgcttctcttcttgaatacgtcgttttggtatcccctagccgaagcctctcgatcgattggtgcaagcacactctaggagttggctttgtattggttgtgagggtgttcttttgggcgatctcatctatgtttctttgttggtctagcggcagtcggtcaagcttagcggcggccggtccggtgttagccttctcccggtcttgtgtgttggagctgtcggtgtgtgggtggtggtatatttttcctttttcctggttacgaccctttagggttgtgatcttgtaattttttcctgctctatcaatagaacttcgtaccgtctcgtgcgagtcgttcaaaaaaaaatgtatcaagaaacaacactatattattcaagtaacatgtctataactccaacaacgacgacgacaacatcaacggattttacaaaaaaaaaaaaaaaaaaaaa

SEQ ID NO: 4280 - DNA, 426 bp, Oryza sativa
  Clone ID: PAT_MRT4530_11178C.1
acttctaccaccgccgcagccatggcgaccgggtgctatcgcggcggcggtggcgccagggaccacgctgaccagcccgacgacttctacgagttcgagcccacgctgtacggcggtggctacgacctctttatgacctttggacgtccgttctccgcccttcgactagacctgctacccttgctccgctccctacacctactactacgcctcgcactactgcgtcgacgagccctacccgtacgcccaccactacatgtcgcaggcagactacggtttccgacctcagcacgagcagcagcagcagccgtcctacgccttctccggctaccgttcccttcacgagcagaagctatcctacggctcctttggctacggatctaagcccaagcccgactatggttttcgtcccaggctgaggaggag

SEQ ID NO: 4281 - DNA, 263 bp, Oryza sativa
  unsure (1)..(263): unsure at all n locations
  Clone ID: PAT_MRT4530_11179C.1
gnnaacncanacatatntttnttcnnnnntnaaatttcnnnccccncanananncacaaaaaacacgggnccnnanaataaanagtanangncnntnggggtcnnggtnngngagntnnnacncacntnnntnngntnnncnctctcncccctttncacnngcngaaaactgnncnnnncncatttnaannnntncnngcncnctgnagnggngagagattgcttttnggnnntnttcgngcntntnncagnttttntcctct

SEQ ID NO: 4282 - DNA, 388 bp, Oryza sativa
  unsure (1)..(388): unsure at all n locations
  Clone ID: PAT_MRT4530_1117C.1
gtcgatgggggaggaggcggcgaagggcagcagcatccgcgatgatgtcggcgtccgttccgccgggtcacgacggagcccgtggccaaggatatgcgccgtgtttttgttcgcgagacaaggttggcgagatggctacaacgtcttcctcggaggtcagcaaggcatccattgtattgtgtatcctattggcgctgggtgaaatggcctatacctctccagcggttgttagtgtgtcggtcatggcatcccaaaacggttatcagtgaggcaccacggtaaacccacggtttncatctttagttacctgatctgtgctgtttgacantgtggttttnatattgagaaatggnattgttatgagacttctttcaaaaaaaaaaaaaaa

SEQ ID NO: 4283 - DNA, 204 bp, Oryza sativa
  Clone ID: PAT_MRT4530_11180C.1
atgacgtcggtggcagtggctggcgaatctgaaggtcggggcggcaagggtggatggaggaggcagcgacgcataggcggagcaaatcgaggcgacagtggtccggaggcggagaatggtggcgacccggtgatggtgaggggatggatggtgtcggtggtggcggctgacgaatttgaaggtcggggcggcgagggtggatag

SEQ ID NO: 4284 - DNA, 2146 bp, Oryza sativa
  Clone ID: PAT_MRT4530_11181C.1
ttggtaaagcccgggtttttccagtccgcacgttgtaaaaacccgggccatgaatttaatttagggggccctaaaaaaaagctttaaactcgcattcccgcggaagtaaactttgatcctttaaaacggcccccccccgttttttatctgttgagcaggggaaaatatattcggtcatccaatccaatctgttgagcacccttctgtcaaaatgacccaatttcctgaagacctatcaagaactaagacgagcatctccatgtttttctatgttttttttttgtaacatttttcatgaataatgtcttacacccttccccatatataacttgggtccaaaatggtagtagtggtagccaacttaaccatgcaactcaccaagtctgtaccaaccagaacaacaatgtttggcttcaaaacacatgacaataccataacagacggttccaaaacacttggcctaagcccacacccatcaaaatcaagtaaaccatgttccgaaaagaagagacctccaaccatttctataaacaccagcactcgccgccgaataccctatcggggacaatgaaaagggttcaagggttcgacggctgcacacagaaccggtagaaacgggtggggctttccttttgcccaaggtgaaaccccgcgtgccatctggcatgcgagggccgggaggctgcttggtggctccaattggcagctgcgggtgctgctcaggcttggtttgctgttgattgggcggagtcccaacatgatgagcgccaccacggttgccaccttggtggtggtggttgttggcgtggtgattgtggtgctgaccgttgtggtagttctggttgttgaaatggttgttgttatgctgatggtagccacgccctcgccctctgccaccacgtccacgacctctgccacgtcttggaccttccttatcattggaactgtcatcaaacaagtgatctggcaacatatctgacaattgagagggttcttcgagttgcttctcatttgattggtttgaagtggagacatcctcctcgccatttccatcagcttcatgcactccctttttccctttgcctgccccctttgtcatgcaagtattcaataacctaactctaagcccatttctccagttcttctcatcattaagctccagaatcgctttctcagcatcttcaagggtctcatactccacaaaagcatgcagcttgttggcaaacagcatatctagcttggcagatctattagtagcaggactattgccatttgaagattgaggataacaggttcgaatggtcttcacactgccaacagttgaaaagatcttcataagattctgataacagggatcaccaggaagattttctgcaacaactattcgggactgcaggtcctgcatatcagatacagtaaatgactgcagcctctttactctttttccatcatcacttacaacaagttttgatgaggttcgaagagcggcggcaagcattgaattattatgcactaaagcttttattttattgaagccggcaattactgttattggcacatatccctcagggtccttggtaataaatctcatcaagtgttctgttgttgctaggtttatatcactgaaatagtactccacctgcttggtaatcttgtgcaccacctcgtcggggaacccgtcgaccagtggctccgccgcctccgtcgcatccgggtccacttccgcctcctgctcctcggcggcggcggcggcggcgaactgaccgcccctcacaggcgcgtagtactcgtacggccggtgatgcggcggcggcggcgcgaagaaggccgcccgcggcgggggaggcgccgcggcgaacacgcggatcaccggcggcggcggcggcaccacgggggcggcgacccgcggcacgaactccggcgcccccgcgttgaggcggctggccgagccgctcctctgcaggccccgctccgccgccgcggcggcgatctggtcggcgacctcctgctgcggcatcagggcaagcggcggcgatagcccggtagctactagtagctcgtgatggcggcggcgatagcggcggcggggtagtagccgcggtggcggtgggtgggtacaggggagagcttgcggtggcggcgaggg

SEQ ID NO: 4285 - DNA, 1305 bp, Oryza sativa
  Clone ID: PAT_MRT4530_11182C.1
atggaggggctcgccggcccgatatgctgcgccgctggacatgatgactcaaagagcagccatatccacttgtccaccggaccacgctacaccgacctcattgcagagatggcatggaaggatcgtgcctatcgcggccacccgctcgtcaccacctcagggagcttgtcgcccgtatggatcgaggcatcgctgggagagggtagaggttgtggcgcctgggagatagaggggagaggcagcaccgccaaggagcacatcgctggtgatgggttgatggaaggtgtagggatgccgacgaactcctcatcgtcgtctgagagaaagtacgagaagtttccgctggcgctcatctgctcctcggataccccatacgcgtgccacatgctggtccgttcgccacggcatgccacgtcgttgtcgccgttacggtatcagctcaccgagtcagccgcggaaaagcccagatccaaaaatgaggtcttgctcccgttgcgcctcgcggtcccgacgcggtgccacccatgctactggtgtaggcgtgggctccctcgttgtcggcgccactgctttcgctttgtggataggcgtgctcaggggatgcgcctcgttgcctctgaagcctcaaccgcggttgggttaagctacggccataatggcggcgaaggcggaccaaacggcagcgtcgccgagcctgtgaggaatcccggctcgctgacactggcagggagggatcaactggacccccccttggtccccttgcaatgctgcaactgcgagccctgtgcaacgagccacgacgcgctccgcttccccgtcgtcgagacctgcttcaccatgcacagcacgagcgccaccacgacggccgagacgagcagcgtgacgaacgccatgggcgccctcttggacgagctcgctccgccgtctgcacacgcttgcacggccggcccgccggtgggtcgggaggaggtcgacggggcgagcagggagaggggaaggtgcggcggctggcgacaggcgacgcgggagcaggccgccgcgccgggtggggaggagactggcggagcagaggtcgcaggcgtggagccgtggagtagggcatcggtggccgacgacggcggaggagcggcgatggcaggaatagtaccgacgggaggggccacgagtcaggtggagctccttggatggcgcggggaggccggcgtcggcgtcgccctgtcagaggcatcacggtgcggcaacgtcgagcagtcggcttggcggcggtgggcgagcggtggcgggcaagagggctgcaggaattag

SEQ ID NO: 4286 - DNA, 427 bp, Oryza sativa
  Clone ID: PAT_MRT4530_11183C.1
cccacgcgtccgcccacgcgtgcgtccgaaacctgagcctaagccacacccagagcctgagcctaagcctgaacctaagcctgagcccaagccacaccctgagcctgaaccaaagcctgagcctaagcctgagccaaagccagaaccaaagccggagccaaaacctgaacctaaaccagagcctaagcccgaaccaaaaccggagcctaaaccatacccagagccaaagcctgaaccgaaacctaagcctaagcctgagccaaaacctgaagcacctccgaagaagcacaagccggcgcacataccgtcagcgaccgaccagggacggcgatcaccggagaccgagcacttgctgctgcacgattgaggcattgacgacattatttcgccagagggaggagcgagcgagtcactacactggaccggt

SEQ ID NO: 4287 - DNA, 921 bp, Oryza sativa
  Clone ID: PAT_MRT4530_11184C.1
atggagcctatgggaatcctgaagtgcccttccagcttgaagctctccgttgctgttcctggtcatgccctcaaccccttctctgatggcggtagtggtagtggtagtggtagtggtagtgggtgcaacaacaataacacaagagaactgggtatccacttggacttggaccgcccgtatgcaagagaagagctaccgcagcaaggtggcagcatggaggtgcagaaaggggaggagagaggcggtgttaggcacaatagctccaaccataggcggctttctagggtgcaatccaagcaacttgatgaattttatcgtgtaaatcacacagttgattccaccagtcacttacgctctaggaaattaatggaacattttcagaaacaaaagaaggagttggcagatcgactgaatcttcggataagtcaggtggatgcttggttccgcaaccgcaggttaagtcattattatgtgggtctcacctttctattaccccacatgtcggtgtctgtagaggatgtgaacccaatgattccacagtacaaatcagttagcagtgtagaacaagttcagagttcatcatccgccccagtgactgttatgctattactagtaatacctttcagattaatcttcacaaacctacagtcgaagcagaaatccacggagatggagtgcgcctatctgaaggaatgcttcaacaaactgaaagaggagaaccaccgcctccagctccaggttgagcagctcaggtcaacgagcttgcagctgcagctgcagctgcaactccacagcgagcgagtcgccacagctcccactggacagcaagccggcacttctgcggctgctcgcatcttcactttgcctttgtccggatacaacccttccagggggacttggttctcgccaaatgcacactga

SEQ ID NO: 4288 - DNA, 1378 bp, Oryza sativa
  Clone ID: PAT_MRT4530_11185C.1
ccccgcggcagcaaatcgcccagccggacccagaagctcacagttcagttctaccacgtacaacagcagaagtgagagagggagaagaagacaagggaagaggaggagcttagctagccagccatggcgaggcgctctccttgcctcgccgtcgccatgctcctgcttggggcgttggcggtggcgagcgccttcattgatgaagcggcggctgctggccgggggctcggccatggcgcccgcttcatgagcaagcagggtcgtgtgacatacgagaagctgccggagccggagccgaagccaaagccaaagcctcatcctaaacccacgccaaaacctgagcccaagccagagccggagccaaaaccagtacctgagcctgagcctaaaccggaaccaaagccagaaccaaaacctgagcctaagcctgaacctaaaccatacccagagccaaaaccggagccgaagccagagccaaaacctgagccggagcctaaacctgagcctaagccagaaccaaaaccagaaccaaagccgtacccagagccgaagccagagccaaaaccggaaaccgaagccggaaccaaaagccggagcccaaacccacgcccgagagcctgagcctaagcctgagcccaagccagaaccaaagccagagccaaaacctgaaccaaaaccagagccaaaaccagagcctgaaccgaagcctgagccaaagcctgaaccaaaaccagagcccaaaccatatccagagcctaaaccggatcccaaaccagaacccaaaccacacccagaaccaaagccagagcccaagccacagccggagccaaaaccagagccgaagcctgaacctaaaccagagcctaagcccgaaccaaaaccggagcctaaaccatacccagagccaaagcctgaaccgaaacctaagcctaagcctgagccaaaacctgaagcacctccgaagaagcacaagccgccgcacataccgccagcgaccgaccagtgacggcgatcaccggagaccgagcacttgctgctgcacgattgaggcattgacgacattatttcgccagagggaggagcgagcgagtcactacactgtaccgtttctggaataaagtgatgagctagctttctgcttgctttttttcccttttatttcacgttgttttttcagatgtgccactgctagctagtgtaattaaattatttcttatgtatctactgccatttttattaccgtgtctgtggcattcttttctacttagtagtgtatataaataataatatatatgtgtgtgcatcttctatgctgtccaatactgtttaaaaaaaaaaaaaaaaaaaaaaaaactcgagactagttctcacctcgtgc

SEQ ID NO: 4289 - DNA, 1403 bp, Oryza sativa
  Clone ID: PAT_MRT4530_11186C.1
atggcgaggcgctctccttgcctcgccgtcgccatgctcctgcttggggcgttggcggtggcgagcgccttcattgatgaagcggcggctgctggccgggggctcggccatggcgcccgcttcatgagcaagcagggtcgtagccaaaaccggagccgaagccagagccaaaacctgagccggagcctaaacctgagcctaagccagaaccaaaaccagaaccaaagccgtacccagagccgaagctcagagccaaaaccggaaccgaagccggaaccaaaaccggagcccaaaccaaagccagagcccaaaccacacccagaaccaaagcctgatccgaaacctgagcctaagccacacccagagcctgagcctaagcctgaacctaagcctgagcccaagccacaccctgagcctgaaccaaagcctgagcctaagcctgagccaaagccagaaccaaagccggagccaaaacctgaaccaaaaccaaagccaaagccagagccaaagccaaagcctgagcccaagccataccctgagcctaagcctaagcctgaaccaaagcctgagcctaagcctgagccaaagccagaaccaaagccggagccaaaacctgaaccaaaaccagagccaaagccagagccaaagccaaagcctgagcccaagccacaccctaagcctgagcctaagcctgagcccaagccagaaccaaagccagagccaaaacctgaaccaaaaccagagccaaaaccagagcctgaaccgaagcctgagccaaagcctgaaccaaaaccagagcccaaaccatatccagagcctaaaccggatcccaaaccagaacccaaaccacacccagaaccaaagccagagcccaagccacagccggagccaaaaccagagccgaagcctgaacctaaaccagagcctaagcccgaaccaaaaccggagcctaaaccatacccagagccaaagcctgaaccgaaacctaagcctaagcctgagccaaaacctgaagcacctccgaagaagcacaagccgccgcacataccgccagcgaccgaccagtgacggcgatcgctggagaccgagcatttgctggctgcacggttgaggcaccgacgacattatttcacccgaggaaggagcgctagcgagtcactacactgtaccgtttctggaataaagtgatgagctagctttctgcttgccttttcttttcctctcttattttccttttatttcatgttggtttttcggatgtgccactgctagctagtgtaattaaattatttattatgtgcctaccgtcatttttattaccgtgtctgtgacattctattgtctattggcattattctcattgtaaaatcccctggtaatattatttgtcatcatttttaccc

SEQ ID NO: 4290 - DNA, 602 bp, Oryza sativa
  Clone ID: PAT_MRT4530_11187C.1
cgaccaacgcgtgcggccaaagcctgagcccaagccacaccctaagactgagcctaagcctgagcccaagccagaaccaaagccagagccagaggctgaaccaaaaccagagccgaagcctgaacctaaaccagagcctaagcccgaaccaaaaccggagcctaaaccatacccagagccaaagcctgaaccgaaacctaagcctaagcctgagccaaaacctgaagcacctccgaagaagcacaagccgccgcacataccgccagcgaccgaccagtgacggcgatcaccggagaccgagcacttgctgctgcacgattgaggcattgacgacattatttcgccaaagggaggagcgagcgagtcactacactgtaccgtttctggaataaagtgatgagctagctttctgcttgctttttttcccttttatttcacgttgttttttcagatgtgccactgctagctagtgtaattaaattatttcttatgtatctactgccatttttattaccgtgtctgtggcattcttttctacttagtagtgtatataaataataatatatatgtgtgtgcactctatgaaaaaaaaaaaaaaacaa

SEQ ID NO: 4291 - DNA, 906 bp, Oryza sativa
  Clone ID: PAT_MRT4530_11188C.1
ctatccacagccccggtacttccagcaaatcatggaccagcggttgatgccaagttgtgcgtcctgacttccacgacgacctttatatccttgaaggcctccactattgacactgtggatttgcttcccgcttgtttctttctacatgcttgacaacaacaaaatagggcgcggcgtggccgtctacaccggctaggtccagcatttgacgttcgggaagtcctcggagatggacctagccgttgtaccatctcctccggcgcattcgtttagcaactcaacgccgacgaacaagttgccactgtccgggagaaccacgaggaacccggaggcttcgtactccaacaggccttcatcggacagcgccgcgtactcagggccgagcctcgctgtgcatataataggtgttattgcttggacatgctagaacgtcgacagcgtctacggatccgggaaggcctccttgaaacaccctgctagtcccgccgtgaagttgtggtacataatccacgtcatttcgcgctcgagatgcaactggcagatgtggccgtcgacgacgggcacggcggcggcggcgccgtccacgaggaagaaggagaccggggtgagacggtacgtcgtccctgcatcgtcggaggcgaagatgccggagtggaccagcagccgcatgaggcggcggaggaaggggagcttggccgtggggagggacagcgcggtgacgaggtcgggcagcgaggcggcgccgccgtggcggtggatggcggtggggatgccgaggtggacggcgcaccggagagtcatggaggtgaggtaggagagggtgtggcgccacagctcggcctgcgtttgcagcatctcgtcgtcggtcgggaccaacatgcttggagcctgatcggatgctgccat

SEQ ID NO: 4292 - DNA, 1146 bp, Oryza sativa
  Clone ID: PAT_MRT4530_11189C.1
gacacaagatcacagaagctcacagttcagttctaccacgtacaacagcagaagtgagagagggagaagaagacaagggaagaggaggagcttagctagccagccatggcgaggcgctctccttgcctcgccgtcgccatgctcctgcttggggcgttggcggtggcgagcgccttcattgatgaagcggcggctgctggccgggggctcggccatggcgcccgcttcatgagcaagcagggtcgtgtgacatacgagaagctgccggagccggagccgaagccaaagccaaagcctcatcctaaacccacgccaaaacctgagcccaagccagagccggagccaaaaccagtacctgagcctgagcctaaaccggaaccaaagccagaaccaaaacctgagcctaagcctgaacctaaaccatacccagagccaaaaccggagccgaagccagagccaaaacctgagccggagcctaaacctgagcctaagccagaaccaaaaccagaaccaaagccgtacccagagccgaagccagagccaaaaccggaaccgaagccggaaccaaaaccggagcccaaaccaaagccagagcccaaaccacacccagaaccaaagcctgatccgaaacctgagcctaagccacacccagagcctgagcctaagcctgaacctaagcctgagcccaagccacaccctgagcctgaaccaaagcctgagcctaagcctgagccaaagccagaaccaaagccggagccaaaacctgaaccaaaaccaaagccaaagccagagccaaagccaaagcctgagcccaagccataccctgagcctaagcctaagcctgaaccaaagcctgagcctaagcctgagccaaagccagaaccaaagccggagccaaaacctgaaccaaaaccagagccaaagccagagccaaagccaaagcctgagcccaagccacaccctaagcctgagcctaagcctgagcccaagccagaaccaaagccagagccaaaacctgaaccaaaaccagagccaaaaccagagcctggaccgaagcctgagccaaagcctgaaccaaaaccagagccccaaaccatatccagagcctaaaccgggatcccaaaccaggaacccaaaccacacccc

SEQ ID NO: 4293 - DNA, 2242 bp, Oryza sativa
  Clone ID: PAT_MRT4530_1118C.1
gcctcggaggacgggaagaggagctcgatggggcccacgatctccagcaccgcggagacgatcccatgccccccgccgactcgggcaccagaagaggccgcggcgatggcggcggcggcggcggaggaggaggagtacgagagcgacctcgacgacgcgcccctcccggcggtgcggcgccgggacgcggcgagcgacaactacgaggaggaggaggaggaggaggaggaaggggcgaggccctctccgcctacgaaggccggatccgacgcggaatccgacgggcaaggcgccgccgaggtgtacgacgacgacgacgcgtacgaagatgacgaagggtacgaggaatacggggaggtgtacgaggagttcgagcaagggcgaggcgttgcgggcggagtggccaccggggcggtggccgcagcgggggaggaggcggggatgggtatgaagggggaagcggaaggtgaggcgtcggcggcagcggcggagggagaggaggggaagaaggggagcgagccctatgccgtcccgacggctggcgccttctacatgcacgacgaccgcttccaggaggcccgtggccatgggcgccaaaggagaatggtgggtgatagacggctgtggaatgctaaagaggatcaagcgtgggtccatgacagatttgatgaaatgaatttacatgatttccataatgactacacaagaagaaggcccagaggtcgatttagaggacgtggtggtgcacctgttggtaaagttcgtggtggtagccgtgataatttcagaggcaacaggtcgcagacatactatcgtgatggtgctaagaactacatatacgttccgaaagaagtagttcgaggaagaggctctaaacgttaccaaccacattggaggagtaccgctgagatatcttcagagcataataataaatcacaaaatcttgaaaacacttcttcaaatgcaaacttgggaaaacaccaacatcaagcttcaaattctcaaccagaacgaggatttccgatgaagcagagctttgcatcaaatttgaattcagcttcacctcccttttacccttctaggccatctcatcaggaactcccagtgagtcagaggggggatggacaacccagtaccactactagacacttctcatcccccattggtatggagcatgtctctccaaccccacagtatggccctctcttaagagggaaagcctttgtaccgtctgctgggcatggcaagttgcatgctgaagttcctataaagggcatggatcatccttcatttcattcatctacatcatcatcaactagtcaatttcctatagctactaatcaggtcactggaaattcggctaagtccccacacccaattgtccaacaaaggttggttcaatcatttaatcaatccacaccaaagatgcctggtcagatgtttgctgcgcaatttgctagcagtgataaattgccatcttccatgcaatctacatcaacaattttgactgaaggcactgaaatttcttcacctcatggttccaacaaatctaatactagattgatggcaaagggacaacatagtgaccagggagaagaacatgcttcttttatgtatggtggagctcaagttcttgggactacaggatcacttggtgaccaaaatttccatggaacccctgcactatttccagttatgcagtttggaggccagcatccaggtgggactggcgttccctcaattggcatggctctaccaggatttgtgtctcaacaacaacttggtctgagcaattctgaaatgacttggctaccgatattggctggtgcttctggagctttgggagcaacgtatggttcaccttatattactgtagatggcagctattatccccgaacttctgaacatgcatcttcatcagtttctttgaggtatccacataaatgtaccgaggccttttcctcttttgcagaggctttaaatgatgaacttagtcaacgccaacataaacctcggaggtatgttattcatactacttgtaactgtgtaagcaccaggtcttctgaattactacaattttaccattggtttccctttatagtggagtatgatattaacaactactacgtagaaagatgtaaaagtgagaaacttatgtgaatgttgtacatgcacgtcttataaaaaaatatttatttattttggtcattggctatccatgttgaccccccgctttccagac

SEQ ID NO: 4294 - DNA, 393 bp, Oryza sativa
  Clone ID: PAT_MRT4530_11191C.1
atggagcgaactgatcggatcatgcaaagcgcgacgcgtcgcggcgccttccaagtgggcgtcggcgtcgccgccggcgccggggaggaacgtccatggcgcgagcgcgagcgcggcgcggccgcgcttcctgccactgctgctgctgatgctgatgctgatgctgccgaggtgaagaaaaatccatggcggaacacgcgcgagcagtggcaactcgctcgagaccgtggtactcttggatgtgcagtgcagggcacacagtcgaggctgctgcctgtcacctgtgttgttgttgttgtggtgcgccgtgttgatgctcttggcagggtgggcagtacacacgccgtgaggtcagactcgttcagtgaggtcgacaagaaactgcaacagtga

SEQ ID NO: 4295 - DNA, 970 bp, Oryza sativa
  Clone ID: PAT_MRT4530_11192C.1
atgtggatgaaattataaggaattacgatgagaatacttttttctttattcttttttatttcattatcattattagcacaaccgttatcgctgtctttaaaaaatgcacctactgcagaaatattaagttatttagctgaaaaaaaaatgaaaaatatcggattgagtgagcaaatagacaaaaatacgacctcttagaattgaaaataggcattttgatgaaaatggtgaaaggattgtgcgcgctaatcaattatcaaaaagaaaagaaaaacaggtttatttatcgggcatttaaaagaagataaggcaatagagaaaaaaaaaaatggggagaaggccaagttaaacactcaaaccattaaagggggaaatgctaaaagttcaaaagaaattggaatccttactaaaggtaaaggtaatggtaatgtattgtcagaaaaaggggtatttatattttgatgagcgaagtaaaagcttaattataaaagatagtcctgattcaatgaagcatattttggcattaataaaaaatttagataagccaacagaaaaattgcaattgaggctagaattgtgacgattagtagtcaagatttacaagagcttggtgtccgttggggaatgttttcgccttctgacgattatcataaggtggccagtagtttagaaaccaagggtttaacaacagcaaatcatttaaatgttaacttcccagtaaataatgcaacttcacttgctttgcaagttgcaagaattaatagtcgcgtattagatttagaattaacggcattagagcaagagaataatgtagaaattattgctagtcctcgtttactgaccactaataaaaagcctgcaagtattaaacaaggcgctgaaattccttatgtattgtataaccgtaaagatgaagtaaaaaatattgaatttaaagaagctgtattaggattacaagttactccgcata

SEQ ID NO: 4296 - DNA, 462 bp, Oryza sativa
  Clone ID: PAT_MRT4530_11193C.1
agagctatcaccttgataagatcatcaacgcaggacgtgccaagcgaagtactatgatggataccgatcacacctgagagattaaggagggagaggcagtattggaagccatggctctactccagtctggagttcacgaggatatgcgtcttctgcaagcagcagccagggcaagatgaaaagctaccagggacgcagccgcttgagcttgacaaggagctgttcgcatggaacattgatctagtgtacggtggacgaagcgcggtgctaatgaggactggcctctcaagctatctacaatgcacggagcgctgttcttgggctgcttaccaagactcttaggcctacagagctcactggtgctacagtactggaccccaaagcagtgcaagattaccatcagaggaaggctcagattgacccacgcaattatgatcggctcataagactcgccctggaggg

SEQ ID NO: 4297 - DNA, 849 bp, Oryza sativa
  Clone ID: PAT_MRT4530_11194C.1
atggtttcgcttctcttctgtgtttctcaattgtaccctctcacgatagatgatcgtgtaacagggaaccatttcaagtcaactcttgctacacacggtcggcacagctggggctgtgccacactgtggagcccagatgcttgctatgcatgtgcatatataaatatatgtgccatcttcttcttctatgtccattgtatctgcaataagcttggagtttctgtgagtgaggtggaggccctgtatgagctgttcaagaagataagccattccatattcaaagatgggcttattcacaaggaggagttccagctagcactcttcaggaacagcaacaagaagaaccttttcgccgatcgggtcgaacaattccagatgtgtgaaagactgacagagtcttctcatttcaagcagatatttgatctctttgatcttaagcgcaatggtgttattgatttcggggagtttgttcgatccctcaacatttttcacccggaaacgcctttggcagagaagattgccttattccctcttgcagttgcatttagattgtatgatctgagaggaactggatacatcgaacgtgaagagttgtacgaaatggtgctcgccattctgaatgaatcagatctgctcctttctgatgacgctgttgagcagattgtggatcagacgttcaagcaagcagacttaaacagcgacgggaagatcgacccggatgaatggaaggcgttcgcaagtaaaaaccctgctttgctgaagaacatgaccctcccatacctgaaggacataacaatggcattccccagttttgttctcaactctggagttgatgatgaagagttgtag

SEQ ID NO: 4298 - DNA, 282 bp, Oryza sativa
  Clone ID: PAT_MRT4530_11195C.1
ccgtttggttccggacgtcagatgtgatcaccaaggcagagtacgctgctttctacaggagcttgacagacgactgggacgaacatctggctgccaagcgcttctctgtggagggccagctagaattcaaggccatcctgcttgtaccaaagagagcgccgtattatacgactcccgccacgaagaatcaagccaacgtcgaactgcacctacccgcgtgtgtgtatcatggacaactgcgaggagttgatcccagaatggctcacatttgtaaagggcatt

SEQ ID NO: 4299 - DNA, 379 bp, Oryza sativa
  Clone ID: PAT_MRT4530_11196C.1
ggggcgacaatgaaaacttttttacctactcagctccaagggaagctttttagagttttaaattggttacaaaacataccccatttgtcagttgtcataccaaaaggtttttatggggaactggcggggggttttttcacataataagctttcccataacacatttcacaacaggggttttagcataatacatgggacataatcggccactgggttttattgaattcactttcatacctcaagaaaatttgaaaccggcctaccaagtagacccttcatgggatggtcctttggtacagggggggggctcccaatgcttcgcgctctgggctctcctttttcaccagggctagcatatcagattaaaagcctttgaacg

SEQ ID NO: 4300 - DNA, 417 bp, Oryza sativa
  Clone ID: PAT_MRT4530_11197C.1
atggcggcggtgtcgctggcggtggggaggcggtggggcagcgatggcggcggcgaggaggacggagagggcgttgatggggcggcggtggggcggcgatggcggcggcgaggaggacggagagggagtcgatggggcggcgatggcggtggcgaggaggacgaagagggcgtcggggcggtggggcggcggtggcgtcgcttgtggggaaggacggagagggcgtcggggaggatcaatggcggcggcgacgctggcgcgaccgaggacggcgaggacgaggcggcgagcgggcgcgagcaagggggagaggatagcgcaaggcgtgaggcgacggatgcggacgggtggttgcgggcgatgcgagcgcagaaggatggggaacaggctagtgcgttagatcgtatgggaggctag

SEQ ID NO: 4301 - DNA, 526 bp, Oryza sativa
  Clone ID: PAT_MRT4530_11198C.1
aaagcaaggaataatccatatatagcaggaatatgagagaattcaatgttccaaaataccggtctgaacatgaacatgctaaccatcgtttgaactttccacccatccaacttgatagtacaacagagtcaacaaacaagaggggatgtactagactactagtaccataaattcgagcaggcatattgtcgttgaacaattctggtaggggaagatcgaccagggatgctcatttgcggattacaatctttaaatttgacaagcagatgctttaaatttgaaccggttagatatagcgtttcaggtactcatccatgcgggtgtactgaacctctgggtagagctgagttgcctcggcaccattgtcaccaatctcgaagtttgccaggcagccctcgtaaaagatgtggtaataatgtcctattcctacttgactagcaaaatccaaatctttcatagaagccaaaaattcatcaccaggtttgtggaatttctcaagattttttccagggaggtgtttccactt

SEQ ID NO: 4302 - DNA, 405 bp, Oryza sativa
  Clone ID: PAT_MRT4530_11199C.1
gtcattttgaagaagttgaaatgcttctttcctatttcatatcctcttactctatcaaaacctttgccatcggtctcaacgaacctgtaatagcaaagcttgtacatgaggcaattcagcgcagtttgagtctacttgatccaacctatgcaagcaagtacatccctattattgttagtgtcagcgaacatcaaccccctacctggccctcctatttcatggatatcaacgtgttggccttcttgattactgctgggatcatttcatgctatatgcctttatctgatgcaagctccttcgtggtcttgaacttggtcaccgcaatattatttttttggagtaatggcgccgtttatgcttgaacttgcttctgatgcgtgcattttatctggaatctcttttttt

SEQ ID NO: 4303 - DNA, 480 bp, Oryza sativa
  Clone ID: PAT_MRT4530_1119C.1
atggcttcgatgatggtcgacgagcccggcaacaacggcttcaacgacaatggtggcggcggaggccacggcttcgacgatggccgacggcagcggcgggttcgactgcggttagtgagcagcgctaggaagcgcgtggcgacgacggctttgatgacagtcaacgagcccggtggcagtggattcgacagtggcggtgatggcggaggcaacagcgctgggaagcgggcggtggcggcggtggcttcaatgatggtcggcaagcccgacgacaacaatttcgacggtggcagtgatagcggaggcagcagcaagcggcgttgggaaatgggcggcggtgacaacttcgatgacggtcaaaaagcccggcggcggttggcgagcagagctgggaaacaactgcgacaatggggaatagatagggctaagggcgattttgtctttttgatatttctctctcctctttttgataagaaatga

SEQ ID NO: 4304 - DNA, 603 bp, Oryza sativa
  Clone ID: PAT_MRT4530_111C.1
gacggtgaaacggaaaaggatggctttttttatacgccactgtgctagctgaagcctggtttagttcaaaaagattaaaacaatacttggatggcgcaccatattgacatacaacaatcctcaacatgatttaacgccagaaaattggcccactttctgggaaccggaaaaaacgccatacagcagggaacgacatttgccaactacaccagcaaaagacccccatgtctgtacaagtaccaaatttttgaaccttaccgctttcattgctcaaaaaggcaactctaagcacctcccatcatccctgggaaccgagcctaggcgaatccttgccaaactgtagataggccctaccattggtgcgttcaataagacattttgcgctacaaaaagcaaccttggccctagctggctcatagggcaccaagggaccccccaggctgagaacatgcatgtcccactacccacaatgaattgaccaaccccaccaatgacatcttgctcagacctaacgcctccatcaaggaaccttgagcatgcaagggcgcaaccgggtataactgcatgactgtagccttcaacagacatttttaaccgaatctc

SEQ ID NO: 4305 - DNA, 564 bp, Oryza sativa
  Clone ID: PAT_MRT4530_11200C.1
ccaaggtgatatatgcaattaatgattaaaaatggcacacttggtcaacaaagacaacttgcgtctccgcattttaatgcgcgtccgcaaatagatgatatttcattactcgttattcattatattagtttaccgcctgatcaatttggtcagccttttattgatcaattttttcaaggtaagttagattcatcgcttcacccttcttttgcacaaattaaagatttacgcgtatcggcacattgtttaatcaatcgtaaaggtgaaattacccaatatgtgaattttaacgatgtcccttggcatgcgggcgtttctagtttcgaggggcgcgaaaaatgtaatgattattcaatcggtattgagttagaaggtaataataatcacgcttttactgaagcacaataccaatcttttgcacaattaactcaagccattatagcttgatacccttaaataacgatcgatcggattgttgggcatagtcacattgcttcccggtgaaaaattgatcctggccatattttaaattggggtattccaatcgttactcaccacttacca

SEQ ID NO: 4306 - DNA, 492 bp, Oryza sativa
  Clone ID: PAT_MRT4530_11201C.1
atgggccagacccatacaatttgggatgggctaggaaggtcaattgagatggatagggaaggcggattgaggataagcaccggagatggtggttacgaacatgaaggtgtgaaagatacaatgcacggcgatagtaagaagagcgagctccattggcttgcccatggcggacaaccgctcagtgtagtcgacggcgcggtcgtgcggcatgccactgtcaccggcctcgtccttaccaccaagtccccacctgaccgcgagcgcgtcaccgagctcatctcccgcttccgtggcgccacaagctctggtggtctcctcgagacgttgcacgagctcagggacgtggccgctgtgagcgagcctaacaggaagctcctcacggccgtccccggcacggtggagtgctggagtgatcgattgacaatagcaaagattcacatatataggaactatccattttctgctgatggagtgatggctggttttgcttga

SEQ ID NO: 4307 - DNA, 1683 bp, Oryza sativa
  Clone ID: PAT_MRT4530_11202C.1
agccttattggttgcctatattttctaataagccaaaacggcttattaagaaaactgtttaataaaaccaaaaagatgtggtggtttaggcttcagaatctataggctgtttaaccaagcccttcttgcccgtcaagcttggcgtcttatagaattccctgatatcctctatgcaagagttctgaaggcgaagtatttcccccaaggatccctaattgatactaccttcagttgcaacattttcccgacttggcgtgctattgttcgtgggctggagttattgaaaaaagggatcatatggagagttggtaatgggaagtctatctgcgtgtggagagatccctggattccacgtgatcactcaagaagacctatttctttgagaggtaattgttggctaaaatgggtgtctgatttgatagaccaagatggctcttggaatattacagagatcaatagatgcttccttggtatagacgctgagatcatcccaactatctgtctgtctcctcatttggaagaagattttttggcttggcacccagataagacaggccggttctcagtgcggagtgcctacagccttgcttgtaagctggcaaacactgaagattcgtcaagctcatctgtagtgggtacacacaaagcctgggactcaatctgaaagtgtaagatgccacagaagataaaggtctttgcctgaaaagctgcctcaaactgtttaccaaccattgtcaacaaaaaggtacgaaatttggagtcgacagatacctgaatcatttgtaatcaggagaagggggatactgctcacgccctctgcaggtgcccacacgcgaggaacttgctgtcagccatgttcaatgcaggcaacatctctcttgatgtggaaaaatctcgtttcggtaatgagtggctatttgacatgctggagcaactccctgcccatgagcacgagatgttcttaatgacgctatggcggaattggcatgttcgcaatgaaatcacccatgataaagcagcccctccgctggaagtttcgaaaagatttgttgaaagttacatagcccgcttttccagatcaaggaatcaccgctgaaagatgtggaaaaagggaagtctgtagcgagtttgtctgtcactggcagggtaagagacagagcttctgatgatcatcgagttccgaatcccgtattgcattaggtgaaacctcaggttggttggatgaaactcaatgttgatggatcctttgatgctgccctatgtaagggaggaattggtatggttttacgggatagcagtgggaatacaatcttcgcgtcctgtaaaccgctgaacagatgcacaggtgctctcgaatcagaactgcgtgcctgtgtagaaggtctgaatctagttctccattggaccctgctcccaattctagttgaaacagattgcatgtctgtagtgcaactgttaaatgatggggaaagggatcggtcggaattggctaacattgttcatgaggctaaacgcttgctagccgggactaggagaattctagtcagtaagatccatagaagccagaatagtgttagtcacctgttagctaacagggccaaagttgactctgtctctggggtttggttggaaggaagttgtaattttatcttacgtttagtgcgtgaggacattttaagagag

SEQ ID NO: 4308 - DNA, 1184 bp, Oryza sativa
  Clone ID: PAT_MRT4530_11203C.1
tgatccgcccgtccttgccgcctgcaactccggcgaagaaggagagagggaaaggttggtggcagtcacccgctgtatcacacgagcgttttttcttatatattaaaatataaggatttatgaagtgaattaatttcacctcacttttcatctatcggcgaggttcagatttggtctatttgttgctctacgttgacaacatcgggctcgctgcttctacggcgtacctcctggagtggacaatctcctacttacagtaggaattctctatgaaggatttaggtcatcttcaccactttcttggcatcactgtacatcgccaaccttctggtctgcgccttcatcaacgctagtattgtattgaaatcctcgagcgtgctagtatgtcagactgcaagccatggatgactctagtcgacacttctaccaagttgtcctctaccaatggtgtcgtgattgctgatcctattgactttcgcagtctagcgggtgctctacaatctcttacattaactcggccagatatcgcatacgatgtctagcaggtctgtctccacatgcatgaccctcgcgaaccacacctttctgctcataagaggattctccgtcatgttcgaggcacactagactatgggcattgcatccaacattattctttcgctgaccagattgcctactctgatgcagactgggccggctgtccaaacaccataagtcaacctctagctatgctgtctttcttggcaacaaccttatctcttggtcctctaagcatcagaacaccgtgttccgttccagtgctgaggtagaatataggacggtcgcaaatgctgttgctgaaaccagtcggcttcgtcaactaagtcaactctgttctccccctactaaggctactctggtttactatgataatgtcaacgcgatctatctctcaattaatctggttcggcatcaacaaactaagcatgtcaagactaatctccacttcgttcgtgagcgggtggcagttggtgcagactgtgttctgcatgtccccacatcgtcacatatgccgatatcttcaccaaggcctaccttcgtccgtctttacaaagtttttagtgcaggtgtgccctgtgtgcacacctgcacagagcggcggacggagactcgatctggattagagtttggagatggaataatgg

SEQ ID NO: 4309 - DNA, 373 bp, Oryza sativa
  Clone ID: PAT_MRT4530_11204C.1
cccacccgtgtgagttaatccgctacgagtcaaacacaccaaacgggtattcttgaatggaggaggggttgctcctaccttccctgctcttttcgagctactcgcagggaggagaatgaagaccacgacgaggaaatgcaagctaatagtcgcctccgactacgagtccttctgatgaataagatcctgggcgcctggaggaaccgatagccccacgccagcatccaggatgccacagatcggatcaacaagaggggccactcccgggacgacggaccaataagctggacgctgaacttgcccgctacaaggaccatagcaagatgaccaggccaggccccgtccaggaagccataaaaggacacgtcatgag

SEQ ID NO: 4310 - DNA, 300 bp, Oryza sativa
  unsure (1)..(300): unsure at all n locations
  Clone ID: PAT_MRT4530_11205C.1
cccacgcgtccgcggcacacccgtcgtcccgccaccaccaccgacggcgccaccacgagcagcgcggcggagccatagacgcgccacactccgaccccttcgccgccgcgctcgccgagtgcaccagggagcgctccaccaccgcgggggacgacctcttccccgcgccgccggcgccaccgacaccgccatcctcctcgcgccgctggtcactctccgccgccgccggcggcgagtgcggcatnttcagctctctactccacctgtactgttgcaagagcgccatggtcggggaggagg

SEQ ID NO: 4311 - DNA, 629 bp, Oryza sativa
  Clone ID: PAT_MRT4530_11206C.1
tcgccggccggggccggccgggaacccaatcccttcccggagttagcgccgccggccggaggaggagaagagagagagagaggccgaggttttccggtgaggaggatgggcgagttcgacgactactgggcgcgggcgtacaggggcgactccggggtgccgcactccgacccgcagcggctggtcaccacctggaccggcgccttcgccctcggcgccgccgcctgcgtccaccaccacgcctccgccctcgcctccaacatcaagtccctcccccactactggcaagacatgacaatgatgctcgatcaaaagcgctggaagaagattcttgagaagaagcaacagcaagcttaaggaagtgttgaagctgtaaacaaattgcaacggatagactttttctatttggcattttcttccgtacctttacaacttcacatatgttttcaatacagaactggttgatttgtttaaccttcacccctaatattctcgtaatgcaagtgttggacgtcttatcagttttcttaagcagcgtgtttttttcaatgatatgcaacataagtctacccttaatgtgtgttctcgctatgcgtttatgtgccaaaaaaaaaaaaaaaaaagcggcc

SEQ ID NO: 4312 - DNA, 798 bp, Oryza sativa
  Clone ID: PAT_MRT4530_11207C.1
atgtggactagtgcatgcacgtatgctgctaccttgcacccttgccgtatgcgtgtacagatcgatgtatatgttgtggacagacttgccgtatgcgtataccatgcatctccgtcgccggtgaatcgacagcgccgctgccgccgccgcaggagtgagaccagactatataacccaaccgccagcgaaaatgaacatatcttcgctagcggccggtataacgtggccgccagcgaagatccattttcgctggcgattgataaagtcaacacagacgccttgctgtcgacgggtacatcgcctaccactgaaaacacaaagccgttaaagccaattcgttttcatggggagtcgaacacaggacaatcaaatatgtacattatagattatgtcaatatcctaaatgatacggttaccgtcacctcacggtttgacggttatcacggtaaccgcgaaaaccacacggttatcgtgaagtataccgtggctttaaaaactgaaaagattatcacatataataaccacagtgaccgagggggcaatgggagtattccgttgagaaatgtggacagatttgagatcagatcatgcacgcagcatcagttgctgcaggttgtaactcaagcagattcgactttcgatccacgagaagattgccagcgtacgcacttcttcaatcgcattttgcccaggacagactatagagcaccagggatcaacaacaaggggtactctagtcgttcggtccacaaggacacagttcacgacgctacgagcaatatccacacaattacgaac

SEQ ID NO: 4313 - DNA, 336 bp, Oryza sativa
  Clone ID: PAT_MRT4530_11208C.1
acggaataccgttgtagcacttcacctttgggtgacaccaaaaggatatcgaactcagggaacgtgtgtatctacctaaggctaagactatccaaagacaacaactgatgcgtggttctggctatagctatatgatgtatccgaatgtggaggattactgggacgagattcagggctgtcaccacctgctgtctacctctgacaaatacgtgggatacataacaaacaaagccgaacccggagcagagtgtaccgacagctccagtactcctcccaaattcctcctacgaagctacacggcctctcctttggccggtaggttacttaatgggccca

SEQ ID NO: 4314 - DNA, 874 bp, Oryza sativa
  unsure (1)..(874): unsure at all n locations
  Clone ID: PAT_MRT4530_11209C.1
ttttgctaaatgtatttcgtgcagctgaggcatgtgaagaatttggtggagttctagtcaccctaagaatggctctagatgatctttgtggtataactggtgagaatgtgggccccttgcctggttatatagaagatgctgttaaatctgcatataagcgttacatgaaatatctggaatcatttggcccggaggaaaattatctacgtaagaaagtggagaatgagttggggactaaaatgatacacctgaaaatgcggtgcagtggtgtagggtccgagtggggaaagatcaccctgattggcacctcaggcatctcaggatcctatgtcgagctaagggcatgaggaaagtctgcagatcataaccatggcagaacatcgttttctgagggaaggatgcatatcagaacaaggtgttccgtttctcttttcttactgtgtagctaccttgccaataacaaggagatcatcaaacagatgtgcacttaaagtaattcagtgtgctccagaccttcctgctgtaataagaacgtgtttctggggttcacgtcgatttgtttttgctccagtcatggtggtgcgtgaagcatgtagattcagttgattccttgcatgagccgtgaattgtttgttcaagctcctactctgtatggctctattgaactcagaagtagcttaatcggtgttcagattccttgcnnnnnnnnnnnnnnnnnnnnnnnnnnnnnnnnnnnnnnnnnnnnnnnnnnnnnnnnnnnnnnnnnnnnnnnnnnnnnnnnnnnnnnnnnnnnnnnnnnnnnnnnnnnnnnnnnnnnnnnnnnnnnnnnnnnnnnnnnnnnnnnnnnnnnnnnnnnnnnnnnnnnnnnnnnnnn

SEQ ID NO: 4315 - DNA, 939 bp, Oryza sativa
  Clone ID: PAT_MRT4530_1120C.1
atgttctccgccaaggctcggtggatcgtcgccgtcgtgctcagggtggccgccgccggcgccgcggcggtcgcggcggtgctcatggccatgagccatgatgaggtcatcgtctacggcatggaggtgcaggccaagttccgctacactccatcgctagtgttcttcgtcgccgccaacgccgccgtgagcgcgtgcagcttggtcgtcctgctcgtgccgtcgtcgacgagcaagctcgccgcgaggctgctgctgatggccgacgtggtgctcggcatggtgctcgccggcgcgttcgcggcggcgggcgccatggcggagctggggaagaacggcaacagccacgccggctggatcgcgatctgtgtccaggtgccgctcttctgcgaccgcgtcaggtcggctctcgtcgccggctccgccaccatcgtcctctactacctcatgctcatgtactccatttacacactccccatgttcccatgagcatctctactactagctttttagctttttagagtagtagaggtgtcgttctaaatttagagtcagtagtactctctccgttctaaaataaattaatttttatttatgtacagaattatgtacagaattttatttattttgagatagagtaggtgcttgtaagtgagattaacagcctgtttttttaagaggtttcttattattcttggagagttatatagccgttggataaaaatgccacggacgtctgtgcctcttcaagaatgggagaaaatctcttattttttttatatgttttcttgtaaaggcttttctatagtagtgatgatcaaacgttatagtatgaaagcacatagtttctgtatacagctagctagtgatatatgatcgcaactgctactattatgtaaacagaaaaattgtaagttttgtgttgtggcttcttaatcc

SEQ ID NO: 4316 - DNA, 207 bp, Oryza sativa
  Clone ID: PAT_MRT4530_11210C.1
atggtcctcgaccagtgtagtagcgatcgatcctcccaccacctctacgagtgggcgaggtacaactacccacttggtcctcgaccagcatactggcgatcctccgaccacatctacaaccgggcgagggtcttagaaccttggccggggacacttagtactattggattagttagatgccatgggttacgcggtcgagaacgctag

SEQ ID NO: 4317 - DNA, 1092 bp, Oryza sativa
  Clone ID: PAT_MRT4530_11211C.1
tttttttttttttttttaatataagaaagtcttacattataaggagagggaggaccagactcgagtttttttttttttcatgcccttagctcgacataggatcctgagatgcctgaggtgccaatcagggtgatccccttcttgaaagttaacatgttacatggtaccaggggtgtatgccagtgctcaattggaagtactacaggtctctttccccactcggaccctacaccactgcaccgcattttcaggtgtatcattttagtccccaactcattctccactttcttacgtagataattttcctccgggccaaatgattccagatatttcatgtaacgcttatatgcagatttaacagcatcttctatataaccaggcaaggggcccacattctcaccagttataccacaaagatcatctagagccattcttagggtgactagaactccaccaaattcttcacatgcctcagctgcacgaaatacatttagcaaagcctctttcccagccttatcatccgtagctttggatgcagctttctttgcttcaattacaagagaatctggaagtccagtccagctagcagccatcaaatccttaaacgcagattcaacttctgggtcagatatcgccggcagatgcttttcatttgagctgaacaagcgcctcaagttccatgaaaaggcattgttgccacctgagacggcggcggcggcgatcgggcgcgcgaggggcgccaccgcggcggggcgggaggaggcggcggtgagggtggacagcgcggccggggagatccggagcagacggcgcgcggcggcgcaggaggagcggagggcggcggccatcgccggggagagggatcgcggcgagatggaggcgacggaggcggagacgaagggcgaggcccgtaacttcgccgtgacaggaccacaaaaatgggccgtttcttcaacacgcggcccgcctaaccaagttggccctcgaccgcaccgtgccttacaagccgaagggattggatcgcttggtgaccatgcgttctgggctggaaaaatatttgtcaggccattcccctgcgccgcagcccattga

SEQ ID NO: 4318 - DNA, 246 bp, Oryza sativa
  Clone ID: PAT_MRT4530_11212C.1
atggcctgcacatctctgcccattgaaatctttggtcagcaccatcctctggctgtcaagagcttcataagaggcaagtgcaacgcctgctgcaagcagctcggcttcctgggcggcaagtgcaacctcctccgcggcatgctctgcctctgctgccacgaggacgacgaccagccgccgccctcctcctccactcacctccccgtcgccgccatcgatcacgatcacgccgccaacatgccatga

SEQ ID NO: 4319 - DNA, 386 bp, Oryza sativa
  Clone ID: PAT_MRT4530_11213C.1
aaaaaccaagtaaatgctgatcctgacaaggacaaagggaaagtgacttgaggttagccttggtcaatggtgaggatcaggactatgttcagggagaaaaagaggtctagtgcagtcgggataccatgtgagaaggtgactagagtcagaattcttggatgtcaactttggtcaacggtggggatcgggactaaactcagggaggagttgaggtccagacggtcaaggataccgggtgacgaagttggatacgagatggcgcacagtggatggacaccgtgtgggagtgatcttcacaaacgggcttcacgagatgtgcgtgcaagtgttggtgttcgcgaggagaaatgagagaagtagagatgttcatgtacggtggagtgcat

SEQ ID NO: 4320 - DNA, 195 bp, Oryza sativa
  Clone ID: PAT_MRT4530_11214C.1
atggtaggatcgccgcacaagccaaaaccgtcacaaaagggcgagcacacatgtccctcgctgtcgtggattggtcctactgccaccgacctcacgaaccctcaatgttgttctcgtcatgggccagatcattacaaggccgagcatacccatcctacccacattagatctggtccatcaccaatcacagatcgt

SEQ ID NO: 4321 - DNA, 305 bp, Oryza sativa
  Clone ID: PAT_MRT4530_11215C.1
acaccgcaccagccaagccaaaattccctatagatgaaagtttccaatttaacccgtttaataaatccaaggcccgcctaacaaacgaagggaatcctttcccccttccaaaccggggctttaccccacggaattccttttttccacataccccaggcaatcctggcctttcggggcccaaacttgggtgatttccacaagaaggcccccagggggtgttttttccgggggccccctttttcgattagggcgtcccattggtttagctttttcattacaggccccttggggggaaaacttgcaaa

SEQ ID NO: 4322 - DNA, 903 bp, Oryza sativa
  Clone ID: PAT_MRT4530_11216C.1
atggaggagagggaggagccgagctgccgcatcggcgccgtcgtcatcactcgtcgtggccggcggcggagggggcgaggaggggaagcggccgacagaggcagcgaggagggaagcggcggaggcggatctggagagccgttgtcgtccctcgtcgtgaccggcggcggagggggcgaggaggggaagcggccggctgaggcggcaaggagggaagccggcggaggcggatctggagagccgtcatcgttgcttgtcggggccggctgcggagggagccgtcggcgcgcggaggcggcgtcgcggtcgtcgtcatcggcgaggagggagcctgcggcggagaggtggggagccggcggcgcgaaggtcgtcgtcacagccgagaggagccgtcggcgcgcggaggcggcgtcgcggtcgtcgtcgtcgccgaggagggagccggccagcggcggaggtggggagccggcggcgcacggacgtgggagaggagggagccggcggcgcgtgggcgtggggagagtaggggagccggcggcgcgaaggtcgtcgtcgcggccgagaggagccgtcggcgcgcggaggcgacgtcgcggtcgtcgtcgtcgccgaggagggagccggccagcggcggaggtggggaaccggcggtgcgcggacgcgggagaggagggagtcggcggcgcgcggacgtggggagaggaggggagccggcgtcgcgaaggtcatcgtcacggccgatgggagccgtcggcgcgcagagccggcgtcgcagtcgtcgtcgtcgccgaggaggaagcccgccggcggcgaggagagggccgtccggcggcggaggcggaccacataagttatttggctccaagggccatgtccgactgcgaatataagaccccacattag

SEQ ID NO: 4323 - DNA, 165 bp, Oryza sativa
  Clone ID: PAT_MRT4530_11217C.1
atgcccttcgccccacgcgactatctttctgtcatccatgctccatacctgcacaagatcatcttcaccaccagtcaacagatatttgccatccgagctaaacctgatgacatggtagagaccaggccagagatgtgcctcaacgtgtgccgtgctagaaactag

SEQ ID NO: 4324 - DNA, 1755 bp, Oryza sativa
  Clone ID: PAT_MRT4530_11218C.1
atggctgaggaccgtagttggatgtataaaagggtagtgaatggatacatttcagatgagtatttgaaaggagttaagaggtttatgtcacacgctgtatcaaagttacaaggtcaggcagagaaaagggttagatgcccttgtacgaagtgcaagaatggacagctgcatgacaaaagaatagttcaaatgcacctttgcaataaaggatttactgaaaattaccatgtgtggagtagacatggtgaaagtggagctgataccagtgagacaccagaaggcagtattgacaatgagatgaatgaaggaggtaatgcctatggagagtcagatcatatagatgagatggtgttggatgccgtagggcctaatttttgtcaaaatattgaagagcctccaaatgttgaagcagcttcattttttgatatgttagatgcagcagacaagccattgtgggagaagtgtggaaaacactctcaattatctgcagtctctcggttgttgacaataaaatcagaccataatatgtctgtagcttgctttgatgagctggtcaaggttatgaaagaaatgttgcctccagatgcaaatttgccatgtagtttttacaaatgcaagaaagtcgtcgaagctttagaaggagttgtgacatatgattgctcaaaaaaccagaactttgtcatgcgagctgcccttatggggacaaatcttaaattccctgatggttatgcatcaaatttagcacggggtgttgatattaatcgaggcaagatcataggaatgaagagtcatgattgccatgtcttcatggaaaggttgctacctgtggcatttcgtgatttcctccccaagcacatctggaagtgtttagcagaactgagctacttctttaggcaactatgtgcaaaagaggtggatatagaacaaatgaagcacctacaaaaggaagtgccagtcattgtgtgtaaacttgaacaaatttttcctcctggattttttgattgtatggaacacttggtggtgcatctagcttatgaagctttaattggagggcctgtagcttaccgctggatgtatgtatttgaaagggagttacatgaggctcgcaagagggttcgaaacaaagcacgtgtcgaaggttcaattgtagaggggtatagggtacaggaggtctctaattttatttctatgtactttgctgatcatgtgcgaacaaagcacactcgcgtccctagacatgatgatggtggtttcagagcacctactgactggctgtctatattctctatcccatatcgcactcttggaaagagcacatcacgtaacttatcaagagaagaatggcaggctgctagggtatatgcattactcaattgtgcagaagttgacaaatatgtcttgaaatttgatagggagatgaaacaacaaaacaggaacatcactacaactcaattacaagagatgcatgagaaagattttccaacctggcttcgtgagttggctggaaaagatgaaacagttgaagaacaagtaagggctctttccattgggccccgatacatggttaagtgttataagggatgtgatgttcaggggtttcgttttcgtacacaaccatatgaacaaaagaaattaacgaggacaacgacaaatagtggagtttgtgtgtcagcaaattggtttgataaccaagggcctgactactatggcactatccaggagataatagagttggaatatgtcagtgatacgtga

SEQ ID NO: 4325 - DNA, 861 bp, Oryza sativa
  Clone ID: PAT_MRT4530_11219C.1
atggctgaggaccgtagttggatgtataaaagggtagtgaatggatacatttcagatgagtatttgaaaggagttaagaggtttatgtcacacgctgtatcaaagttacaaggtcaggcagagaaaagggttagatgcccttgtacgaagtgcaagaatgggcagctgcatgacaaaagaatagttcaaatgcacctttgcaataaaggatttactgaaaattaccatgtgtggagtagacatggtgaaagtggagctgataccagtgagacaccagaaggcagtattgacaatgagatgaataaaggaggtaatgcctatggagagtcagatcatatagatgagatggtgttggatgccgcagggcctaatttttgtcaaaatattgaagagcctccaaatgctgaagcagcttcattttttgatatgttagatgcagcagacaagccattgtgggagaagtgtggaaaacactctcaattatctgcagtctctcggttgttgacaataaaatcagaccataatatgtctgtagcttgctttgatgagctggtcaaggttatgaaagaaatgttgcctccagatgcaaatttgccaggtagtttttacaaatgcaagaaagtcgtcgaagctttaggtatgcctgtccaaaagattgatgtttgtaagaatgattgcatgttatactataaggagcatgctaacaaaaggaaatgtataacatgtaatgagcctcgttatattgaagggttagaactccctgagaataagaagggcactccacagaaggtgctcgctacctcccaatcattccacgcctacagaggctctacatgtcacgaggcactgcaacacacatga

SEQ ID NO: 4326 - DNA, 315 bp, Oryza sativa
  Clone ID: PAT_MRT4530_1121C.1
atggggagaggaagcagcgcgcgatggaggaggcgaagcgggacgcggcgtgaatgcggtggaggggcggcggcgcgagatgcgggagaggagcgatgcgcgcgtggggccggcgaagccgagatgcgggagaggagaggaggggagcgatgcggggaggggaggggagcgatgcgggatgcgcgtggggccggcgccgcagcgagatgcgggaggggagaggagaggagcgatgcggaggaagggctcgatgcgaatctaacggtggggacaaaaaggggtgacgtggaagcaccaggaagcagagaattgtag

SEQ ID NO: 4327 - DNA, 1263 bp, Oryza sativa
  Clone ID: PAT_MRT4530_11220C.1
atggaagacgaggcgacgcgtccctcctctccgccaccggcggcttctgcggcctcgtcggtgctcgccgacgacgacctcctccgcgagatcctcctccgcctcgccttccccaccacgctcgtccgcgccgccctcgtctcctcccgctggctcggcctcgcctccgactcgtccttcctccgccgcttccgcgcccgcaacccgccccgcctcctcggcttctaccacaccgcgcgccgggacgagcagccggcgttcgtgccgcttccccagcccccggagctcgcccccgtgctccgccgcctcggcgggttcgcgctcggcggcgccgacgtctccgccgtggtcttcgactgccgcaacggccgcctcctcagggcggagttcccgcccccgcccgacgagctacgcttcggcgtcgtctccccgctgctgccccccgcgcggaagccgcccgatctgcccccgaacctgcactcgcagctccatcaggtacccaacgatgcccgtgtgctgcgcccgggctggatgctgctcccggaggaggaggaggacgacggcggcgacgatctctcctacacgctggtggttctgatacgaagaggccgtggattgttcgcgagagcagtgttggtgagaggtgaatcagacgaccagatccgcacctccgattcaatcgagctgccgaatcactactggccaaacaagaagatgaaccgtggattgctcttccatgggagcctctacatgctgggcagggagcatgttcttgggttgaatctggcgtcgatgagcttgttcttgatcaagctcccggatggtgtggagcagctggagcatatggggaaccttgagttgttgcgggacggcgattccggattatatcttgctcatctgaaggggtttcagattcatgtttggcatcgtgcgacagacggcggtgggaatggtggtgattgggagatggttgataccatgtctctgcatcaatcgtttggtcaagttgcgaggcccgattgggagtcgggggatccttcacttggggatgctcttgtttcacttcgtagagtcgaggataatgccgagctgttcttgacgatagaccgcgtgatcttccacatacatattgcgagcaggacagcgaacaaggttttcgagatggctccaaaggaagatattggttttgaaatctttcccttcatgatgatatggcctcccactttcccggctttgaactatgacgatgacgatgatcagtaa

SEQ ID NO: 4328 - DNA, 2188 bp, Oryza sativa
  Clone ID: PAT_MRT4530_11221C.1
ggcctacgcaccctggaaagacatagatgtattcttccatccactattgatgaacttttgcaactttggagaggaagaagttgtgacatatgatcgctcaaaaaaccagaactttgtcatgcgagctgcccttatggggacaggacacccttttagacatgcaaaagacaagttcatccagaataaggaggagaaagatggcccacctattcatcgatcatcttcagaagtgtatgattgtgttaaatctctccctcaaattacatttggtaccaaggcaggaaatcaagagattgagggttttggaaaggagcataattgggtaaaaagatctatcttttgggagttgccttactggcgtgagttgttagtacggcacaaccttgatgtgatgcacattgaaaagaatgtgtttgacaatatatggaatactttgatggatatcccaaagaagactaaagataatgtcaaggctcaatttgatttagccaatatatgcaatcgcaaagaacttcatatgcaacaaaaatctataggtcgatgggtgaaaccaaaagcttgttatagtctagataaggcacagaagaaattggtactgcaatgggttaagaatcttaaattccctgatggttatgcatcaaatttagcacagggtgttgatattaatcgaggcaagatcataggaatgaagagtcatgattgccatgtcttcatggaaaggttgctacctgtggcatttcgtgatttcctccccaagcacatctggaagtgtttagcagaactgagctacttctttaggcaactatgtgcaaaagaggtggatatagaacaaatgaagcacctacaaaaggaagtgccagtcattgtgtgtaaacttgaacagatttttcctcctggattttttgattgtatggaacacttggtggtgcatctagcttatgaagctttaattggagggcctgtagcttaccgctggatgtatgtatttgaaagggagttacatgaggctcgcaagaaggttcgaaacaaagcacgtgtcgaaggttcaattgtagaggggtatagagtacaggaggtctctaattttatttctatgtactttgctgatcatgtgcgaacaaagcacactcgcgtccctagacatgatgatggtggtttcagagcacctactgactggctatctatattctctatcccatatcgcactcttggaaagagcacatcatgtaacttatcaagagaagaatggcaggctgctagggtatatgcattactcaattgtgcagaagttgacaaatatgtcttgaaatttgatagggggatgaaacaacaaaacaggaacatcactacaactcaattacaagagatgcatgagaaagattttccaacctgggttcgtgagttggctggaaaagatgaaacagttgaagaacaagtaagggctctttccattgggccccgatacatggttaagtgttataagggatgtgatgttcaggggtttcgttttcgtacccaaccatatgaacaaaagaaatcatcgaggacaatgacaaatagtggagtttgtgtgtcagcaaattggtttgataaccaagggcctgactactatggcactattcaggagataatagagttggaatatgtcagtgatagtgatctaaaggtggctctatttaagtgtgtctggtttgatcctaagaaaggagtgaagtatgacaaagcactaggcctagttgaagttaaccatacatcaagattggaacaatatgagccttttgtgcttgcataccaagtggaccaagtatattatacaccatatccatcgccaccacgtgaaagaaaagattggtgggttgcattcaagacaaatccaattggtactttacccgttcctgcagtggacgatgaagttgatgattcgcttcctcctgtagtttctgaatattatcaagagggagagcagcttggagctgacatttcacaggagcttggtgatgaaagcttgcttcatgaatcaaatattgttgagcaagttgatccagaagatatggattttttaaatagaccaaatagccatgagaacatagagagttatgttgccatggacagtgattgcagcagtgaagatgaagggccaatagaatcagataatgactcagacaatgatagtgattctagtgactaa

SEQ ID NO: 4329 - DNA, 409 bp, Oryza sativa
  Clone ID: PAT_MRT4530_11222C.1
ctaggaggccctgaccttgaccgtgcaaatggtacggtgcacccacgcgtcgctatgtttcttcgcgctcacttcctctctcctcgtccagagctccggcggcgcaaggccatcccaaggggaagaattgatgcagagacggccggcggcggcggcggcggcgtctcccgttggatcatcaccaacgacggaggagctggtggacgcggggatcgccgctggccgtgaggcggatgccgcggcgccgccggcgacgacgccggcggctatattgggggagacgaggcactcggcgcggcggtttctggtggtggcggcaggggaggacgccgccacggacgacggcgcgggggcgtcgtgccactccaacaacgtccacatcacctgcgcgccgccgtcgccgcgctga

SEQ ID NO: 4330 - DNA, 365 bp, Oryza sativa
  Clone ID: PAT_MRT4530_11223C.1
tcggtactagtcaatggcagagtactcgtcgtggaagtccctaggatgtaattgataggctgcagcatttgagccaattcaagattgttgaggtctcaagctggcacaactgagttcttcgatgtctctaatgagccgtttcaatgtaccggagtatcttttgtcctccgagttattgaacctaaaggcctactactaccccattacactaatggcgcatctctattatatatcatccaagggagaggtttaacagggcctactttaccaggatgtcctgaaacctaccatcatcatttacatcaattaagcctagcccaattgaccgaaattcatagccaaagccctcattcctaagattaaca

SEQ ID NO: 4331 - DNA, 402 bp, Oryza sativa
  Clone ID: PAT_MRT4530_11224C.1
ggaccaaaaccactcctggacaacaaactcaggtcacaaaaattgttaagacatagaatcaaacactcgatacctaaaatcgagctgaacttaatgtaccggttactgaaataaatactccaactactgcgatagttgacacgtgcacttaacacatcgtgagagccacttgaaactattacgtctttattcgcggataagattaaaattaacctgatggcagccggtatctgcgcacgctagatcccaacaggctgggcgtcctatccgcggcgccggagatgacggagcgcaggcagttgtcgaacgggaggctgaggtgcttgcagaggtacacgaccgggcactcgccggtgaactaagccttgataaagcactccctgatggagaacaagtttagcc

SEQ ID NO: 4332 - DNA, 7218 bp, Oryza sativa
  Clone ID: PAT_MRT4530_11225C.1
atggcgaccccgtcgtacgcggcggtcaagtgcctcaacacgtcgtcctccagccgcaagcgcttcgtgttcaagtccttctcgcagcgggtggaggagatcgacatcgacgtgtaccgcagccttcacgaggtgaaggcggagccatcgagcggctcctcgttcttcctcgacgccctcgtggagtggagggagctcaatactgcagatgacttcatctccttttatgaagagacaatacatttggtacaaacattgcctcaaatcgtgttgcactgtgaaaaaatattctccggacttctaaaaagaataaatatgaaggcgagattgtcacttgaaccaatactgatgttagttgcagctctctccagggatattctggaggattttttgccttttttaggaagacatgctaatgctattttagctctccttagtgacggaggtgatcgagaccctgaaatcatggagcaggtcttcacgtcatggtcatatgtaatgatgtacttgcaaaagtatctagttaaagatgttgttcaggttctcaggatcacagctccactgagattttttccaaaggattatgttagagagtttatggctgaatctgtttcatttgttctgaggaatgcacccaatggtcaacaaatagaaggtgtaaggaatgttctacttgaggctgctaaaaatccatcacccgtacatatagatgggataactgctttgctatgtcatgtcatgagaggaacatacacaagacttcactccagagctggaaagattatggagttcttgttgagcaagtcaaacctcactactattcaagaaaaattccctgatgataaggctaacatccttaaacttgttaaatcgctggtcattattcttggcaatttatcctttatatcacccttctatgatccagtattcaaattaacagatttgagcatgcttgtctttgtgaggaaactattgacaaagggtccaaaaattatacaaacttttgagagtcagatattgagagcagcttccctgggaatgacaggagaatgtgatccacaaaaccttttagatttgttctctatctttgctgttaacttaagcagtccaaataaggatctccgggttttaacattgaggattttatcctattttgggaagatggatcaacgtctaggcacagatgaagagcgtccacataagaggcaaaaaacagaagattctggtgacgacactattgatatgaaatatgctaatgtcttggacacacttctggctgttgaatcaactccaatatccgtatctactagccggaaaattgctatctttgtttcccgcatacaaatgagcctatcttccaagatggtccacgaagattacatacctcttctcttgcatgggattattggcatattatataatagatttagtgatctctggccaccagcactggattgtcttgccgtccttattagtaaacacaaggagcttgtgtgggatcaatttattcaatttatcgcaacccaccagtcaaatggtccgagtgtgaaaaatcaggataagctggaagctacaatccaaccacaatctatttttgactgcttcagcatatacctttctacaaactacgattgcacacctctggagacagttgctacccttttgcttcagtctctccagaagatatctgatgttgctgagtctcgatcacggcatcttgtgccattatttctaaccttcatgggctatgataatagcaacatcactagtgttgattcatatatatctaacaaatgtaaaggcaaacaatggaagacgattctgaaagagtggttgaatgtcttgagattaatgcgcaatgctcgatcattatatcagagcaagattcttcaggaagtactaactaaaagggtcttagacgagagtgatcctgacatacaatcaaaagcattggattgccttttaaactggaaggatgaatttctgacaccatacagtaaaagtctcaagaatttaattgactcaaaaactctacgtgaagagctcactacatgggcagtttcatatgattccttgtctatccagaaagaccacagaagtagtgttgttcctttggttatccgtgtattgacacctaaattaaagaaatttaagttgcttggttctcgaaagtccttgatccctgggaaccttcgacttgaaatatttgggtctcagtctgacaacctgcttggaaatatttctgacattgtggaagcttcaacagagatctgtttagagaacctaacatggaaaaaagcaaatggttttcttcatttggttgaagaaatctttggtacttttggtatggcacttataagtccagttcttgatgttctattgctcattgttgttcgcttgcttgagagttgcatgcggaatctcagaagtatgaatgaagaggactatcctagcaagcaatcaaatgaccctgatgacgaatgttctatgactctggaagctggtaattctatgagcctgaaagaacactcaaaagatctgccctcagcagaccataacaagttgtctcttcttatgatgaagctattaattatgttggtcaagtgcaatatcttatctgtggtaacccccatcagctacctcactgtcatgcaggaaagtgtctcaatcaagcaattgaaggatttaaggtctttatgtattagaattgtttccttggcacttaaccagtatgggagtaatgactttggagaaaaattctggaatatcttttttacttctgtgaaacctctgattgactgcttcagacaagaggcgtccagtagtgagaagccaagttcattattttcatgcttcatggctatgagtcagagcccaaaactagcatcattactgggggcacacaaccttgtaccagccattttttctatcttaactgtgaagaaagcatcaggatccatcacatcctatgcacttgagttcattgagaatctgatcaagctggatactgatttagagcagcatggagatcattcactgaagaaaattcttgtcccacatatggatgttcttctccatagtctcaatgattttgttagttatcgcagagaacttcacaggaaatctgggacgtggcttgggcagcgcgaactaaggctgtttaaattattgatgaagtacatcacagacccctcatctgcagagcatgttttagatctcatccttccgtttttcagcaagaaagatttgaaccctgatgaatgtttggaagctctacgtgttgttgggggaatacttgcaaatctaagatgtggagtatctgctaaaattctaaatgcactgaacccattgcttgccactgctggactggagctgcgattatgtatctgtgatatttatgttggactatcatttcacgagccttcagtgtccactctggctatgttagtgcgagatctcaatgcagtttcaacatcagaacttggagaagtagattatgacactagaattaaagcatacgatacgattcagccacaatcttttcttgacatgagagaggagcatgtgggtgccatattatctcattgtgtgtatgatatgtcatctgaagagttgatttttcggcaaagtgcatccagagctcttcaatcgttcctggatttctctgcttcaatcatgaataatgagtcgaaacactgtatagaaacagagaataattccaatggcatttggacaaaaggcagtattcaccagatattggagaaaacttacctgcacaatatgggggtggcaatgagcaaagatatatcaattcagaaggagtggattattttacttcgggagatggtctataattttaatcatgtcccatccttaaactcctttattcctctctgtaaggaagacctggaagaggactttttccacaatattactcatttacaggcgggtaaaagatccaaagcattgtctcttttcaagcagcggatcaaagataccgagttttctgaggatgtgacgatgaaagtctttgttccactctttttcaacatgttttttgatgtcaaagctgggaagggtgaacaagtaagagatgtatgcttggatacactttcttctattgctgccaaggtgcagtgggagcactatcgaacaatattgatgagatgcttccgtgagttgagcctcaagcctgataagcagaagatcatattgaggcttatatgtgctgtgctagactcgttccatttcatgaaacctgcgcatgatgtctcaaggaattctgatgctatgaatgaggattctgattcttccttgactttctcctcaacgatagtctcttctgagaagcaacactacctgcaaaagatagtcttcccacaggttcaaaaactgttaggagcagatccagagaaagtcaacgtaagcataaacctggtagcacttaaaatacttaagttactaccggtagattatttcgagtcacaactttcaagcatcatacatcggatttgtaactttctcaagaaccgtcttgaaagcatacgagatgaagcaaggtcagctttggctgcatctctaaaggagcttgggattgggtacttgcagttcgtggtcaagatattgagggcaatactgaaaaggggttatgaattacatgttttgggctacacacttcattatttgttatcaaaaaccataacttctgatatgaatggtaggcttaactattgtttagaagatttgcttgctgttgttgagagtgatatacttggggatgttgcggagcaaaaggaagttgagaagattgcatccaaaatgaaagagacgaagaagagaatgtcattagagacactcaagctgatttctcaatgtgttacattcaagacacattctttgaaattaatctcaccgatttcttcccatcttcagaagcaccttactccgaaattaaagtcaaaacttgagatgatgttacataatatagccctggggatcgaatgcaatccatctactgaaacgtttgacttatttgtatttgtttatgggcttattaaggacaccattacagcaggtgagtctcagtgcaaagagaatgcgggatctggtcatggtcaagaaaatactcgtagaaacaaattgcttggactacatgatagtgggttgcaaaattcatatataatcacgaaatttgcagttgctttattgcgtaaccgtctaaagagcatcaagctacataagaacgatgaggaacttttgtcgaagttggatccttttgtcaaacttttggcagaatgcttgagttccaaacacgaaagtgtcctctcgatttcttttagatgtcttgccttgttgattaaacttcctttgccatctctcaaggacaatgcaaatctgatcaagaatgtacttatggacattgcacagagagctgggaattccaatggtcatttggtcacatcttgtttgaaactgcttgctgatctacttaggggtttcaggatttcactttcagatgatcagctccagattattgttcatttccctatttttgttgatctccagacaaacccttcacccgttgccttgtcgcttttgaaggcaatagtcaaaagaaaattggtttcccctgagatttatgatattgtagttaggataggagaattgatggtaacaactcaaactgaatctatacgccagcaatgcatccagattctgctgcaattttttctaaattatccactctctgagaagcgtttacagcaacatattgattttttcctgacaaatctaagttatgagcatccatcaggaagagaagctgtgcttgagatgctccacaatattcttaccagatttccccagaggatagttgatgaccagggtcaaacatttttcctccatcttgtagttgccttatcaaatgaacagcaccagaatgtgtcttctatgatccttagggcaatccaaaagttgttggggcgcatcggtgatcagggaaagaattctatatttgaatatactctttcatggtacacaggtgaaaaacagaatctgtggagtgcttcagcgcaggtcattggtttacttgtaggggatcgttcgttgggaattggcaaacaccttaacaacattttggctaacgctaagcaaataatggaatgttctgtcattgcttctggaggacaagtagatttagctgatgaaacttgcctgccattttggaaggaatcgtaccactccattgccatgatggagaggttacttgcacgatttccagagttgtacttcaagcaaaatatggaggaaatttggatgatagtttgcaagttgctgatccatccccattcaatgttgcgtaatatatccagctctcttgtggcctcatatttctcttttgtagagaagagtaagcgtgaaaagaaatttgatggcaagtcctcactgcttatccaaccaagcatgctattcctaatagctgtttcgttgatgaaacaattgagagcagaactaagtgatactacagcgaacaatctaattgtacaaaatctttcgtattctgtctgtaacttgcatacattggttaagcaaacaacctcgccacaccagttttggtctagccttagttcttctgatcacagtgcattccttgagggttttgaattgtttggttcaacaaaagcaaagaacgcatttctcatctgcacttctgcatctactgatgtaaatggatctaaccttgatggaggtgaagagcttacatctttgttagtttcttcgctcctgaagaggatgggaaagattgcaatgcagatgcaggatacgcagatgaagattgtattcaattgcttcagcatgatttcatcagcgcttggtgctgaagtatcactatcctatgctaacctcttcttgggccccttatataaagtttgtgaaggatttgctgggaaagtcatcagtgatgatgtcaagcaattagcagacagtgtccgcgacaagttgtgtgacctgattggcaccgagaaatttgtagaggtttacaacagtgtcaggaagggcctcaaacagaagagggagagcagaaagcagtcagagaagcttatcgcggccgtggacccggcgcgccatgccaagaggaagctgcgcatcgctgccaagcaccgggagcacaagagacggaagataatgaccatgaaaatggggaggtggttgaggtaa

SEQ ID NO: 4333 - DNA, 485 bp, Oryza sativa
  Clone ID: PAT_MRT4530_11226C.1
aaaaaaaaccccaaagagggaaaaaaaggaaaataattagaagaaaaatccaagggaggggaaaggagcggagggaaccaagattaacctacaactataaaaacaaacgacaataaccccccctatccccatttaaaaaaaaaaggggggggacctttttcaaaccaatttttattaagttaaaacaaatttaaaaaaaaaatatagcaccaaaaaaaatattaaattagcctaataaaacccaaaagaaaaaaaatccggaaaaaaaggcctttccatatggaaaaaaccaccatatttttaaaaaaacttgggccaaactttgaaaaaatgggcttaaaaaaaaaacaaaagactttggaatatgaaacggaaaaggggtttaataagaagaaaatcaaaccccggcgacccccttggcaacgttgctggacttgccgggaacgtttttgcaaacggaaagggggggggtcccttggccgggg

SEQ ID NO: 4334 - DNA, 327 bp, Oryza sativa
  Clone ID: PAT_MRT4530_11227C.1
aaattcgatgataagctgtcaaacatgagaattggtcgacggcccgggcggccgcaaggggttcgcgttggccgattcattaatgcagctggcacgacaggtttcccgactggaaagcgggcagttgtctcaactttgaaatatgagtatgcgattgagaagctaaagaatgaagcactatcatctcaaatgggacaacttagagtcagtgacattttgaaatggagggagtatgaaattgcttcaactttgaaagatgagtatgcgattgagaagctaaagaggcttttgaaccacaaagagataaatgaaattgagtggggaaag

SEQ ID NO: 4335 - DNA, 2269 bp, Oryza sativa
  unsure (1)..(2269): unsure at all n locations
  Clone ID: PAT_MRT4530_11228C.1
ggggccagcatccttggcggcgtgcgggaatgttcctatgctttggcccaatctctcaacatgcattccagatgcttataatcgggcttctgaagctgatgatctccacctggcagatcttcacttgattcaggtagatgaagccaagtgcaaccggagtttagatgctcctctctgggtcgcgctagctgttgtgcagtcttataatccaaggcgaaaggttccacgaagtgaaatttccatacctgatttggagctttgtttatcaagagtggccttttcagctgctcaacattccgcgagcatccacatgccccgaatcggtctccaaggtggaggtggaggtgggtcccaacgatcagagtggtacaccatagaacggctgctgaggaaatactcgtctcttcatggcgtcgacatctttgtgtactattataggcgagggaacaagcactagttggcagcttaaacaatagagaatggccatagtacataaggaagtgcccctcaccctgtagactaggaaatgcctgccatctgtaatatgaatgcaatgcatgtactctgaaaggaggaggagtagtagtaggagaagtctcttgtgtaatgtctaatgcctcgcgtcagttagctacgaaaaatgtttgtctgaacaagtgaaccgaaaacgaaaaatgtttgcctgaacaagtgaacctcttttcttgttggacgcaagggcctctcttcttgttcctcttgtgctactgttggtgttggtggtaaagatgagagaaaaaaagagggtatttgggtgaactcatccagttgaaagtggtaagtattttagtgaagaggcgtttggatgatgtggacagaaatgaaatagggaaanggaaggggnggagggcngggcacgagggcgatgatgacggacggccccgtgctcctctgtggtctgtggctgggtctgtctcccctcccaaccagacgcctcctctctccaagtccgtctgcctctctcaccaccaccaccgtgcgctgctccaagggggagatggcggtggtgaagtgcatcagggtccacgagctgggcgggcctgaggtgttgagatgggagcaagtggaggtcggggagcccaaggagggcgagatccggatcaagaacaccgccatcggcgtcaatttcatcgacgtctactaccgccagggggtctactccgctccactgcccttcgtccctgggagggaagccgttggagtggtgaccgctgtaggtcctggcctgactggcagaaaggttggggacgtcgtcgcctatgccggcaatcccatgggctcttatgctcaagagcagattattcccgcctccgtcgctgttccccttcctccttccatcgaccacaacactgctgccgctattatgctcaaggggatgactgctcacgttctacttcgccgtgtttacaaggtccagagtggtgattgtgttctggtccacgctgctgccggtggggttggatcactcctttgtcaatgggcaaatgcccttggtgccactgtcatcgggactgtttcaaatgaggagaaggctgcacaggcagctgaagatggatgccaccatgtcatcatttacacaaaggaagatgttgtcacaagagtcaaggagttcacagctgggaaaggtgtcaatgtggtatatgattctgttggcaaggatacatacaagggttcggtggaatgcttggcgtggcgtggtatgctggtgtcgtttgggcagtcgtcaggtaggcctgatcccattccgctgagcgatctggcaagcaagtcgctgttggtaacaaggcccagcctgatgcattacactgctacccgcgacgagttgctggagtcggccggtgaggtgtttgccaatgtaggaagcggggtgttgcgcatccgtgtgaaccacacatatccattgtctcaagctgctcgcgctcatgcggatctccaggccaggaagacgaccggatccatcctgctcatcccagatgatgcatgatactccagtactagtgtaggagtagtagttattccagtacaaaaagtgtctcttctccaatgccgctgctgtttcttactttagtactcctgtatttttcatgcattatcaatcaggttcaggtttggttgccagttgatgtgtgtctgcgtgcgtttcgttgtggttttcatgttgacaggacaggacgtatactatacataaataaagggcagcatctttgaaataaagatcacttatactatt

SEQ ID NO: 4336 - DNA, 441 bp, Oryza sativa
  Clone ID: PAT_MRT4530_11229C.1
atgaggtaccaggtgggcagcgagagctggtggcgactggcgaggccgcggctacggctgccgcaacggcgaaggccacgccgccgctcgccaggcgcaccgcggacggcggcgctcatcggggccgcggcggaggcggcgccgaggcggacggcggcgctcgtcgtggccgcggcggaggctggaggcggacggcgacgctcgtcgtggccacggcggaggctggaggcggacggcaacgctcgtcggggatgcggcagaggcgagaggcggcgccgaggtggacggtggcgctcgtcgggaccgcggcgaaggggggaggcggcgctcgtcggggctgtggcggaggctggaggcggcgccgaggcgggcggcggcgctcgtcgggactcgggacggcggcgggggcgtgaggcggcgctggtagtggttaggtgctga

SEQ ID NO: 4337 - DNA, 907 bp, Oryza sativa
  Clone ID: PAT_MRT4530_1122C.1
gtcgtcgtctgtttgccgctgccagccccgcgttatccccctccgttgtccactcatcctcctccacaacagctcgtctgacttccgtgttgtcgtccatctgccgccgctgccgtcatcatcatcgtccgtccgccaccaccgtcgtcatcatcgtcgtcctgtggagctcacgacccacctgcagagctccgcctcgagtgcgcccgcagcggtggccgcgtgtgcccacagctgtggcagaggacgacgatgatgatggcagcggcggcagatgacgcgaggcaggttgtggtggaggcggcaggcggacgatggtgcggcagacgcggggcaggctgtgacgaaggacgacgatgacaacggcggacggtcgacagcgcggcagacgcagggcgggcggtggcggaggatgatgatgacgatgacggcagtggcggacggacgacgatgatgatgatgacgacgacgacgacaacgacgacgacgcggcagacgtgggggcgggcggtggcggaggacaatggcagcagccggacggacgacggcgcggctgaggatgacggtggcggctgacagacgacgtcgcggaagtcagacgagcagttgtggaggaggacgatggcgggggataacgcgggacgggcaacggcggacggacgacgacggagcagcttgttctcgttcacgttcgttcgctcgttcacgttctcggtgtggcggcagtgggacggcggcgggcggcgcggcggcggcgtggcgccgcgcgcggcatagggccggcgcgtggcgcggcggcttggcgccgcccgcggcttcggcgcggcgcggcggcggcgggcgggggcccggggttctttgtccctgggctcgtttgggtgcgcgcgggtgcgtgccatgcctccgt

SEQ ID NO: 4338 - DNA, 292 bp, Oryza sativa
  Clone ID: PAT_MRT4530_11230C.1
ggggcacaaaaatggttggttgggaaaaacacatgaaaataaaccagggggaacactcgcctctgggggaaggcacaccaaagaacgtgggcccaaaaaaagaattcaaacccggtttttgaacccaaaaactgacaccccaagaaaaaaaaagggaaatacgctttgaaaagggggcccccctattgaggcccaaaaagggaaaacccccgaaagggggggctgtcacaagtgaactcggggggggcccccaaatatgaaaaagccccaaggaaaaagaggaaggatcccc

SEQ ID NO: 4339 - DNA, 450 bp, Oryza sativa
  Clone ID: PAT_MRT4530_11231C.1
ccggccgggacagtgaaactgaagagggcagatacatacaaacaagagctcagagcttgtttcttcagtgatctctcctaatggcagctaccaagaggatggattactccatcacggcggttttcatgattcttctgatcatctcttccaccttctcatcctgctacgcagctaaagatatgaaggaccgagaagcaataatacagcgccatcgcgaagagtgtaagaaaacatgcagagaacgtcatacttactgcccgcctgagatgccattctgctgcatgaagaacgccccggcatcatctcccagtagtgtcgagaatgaaagcggcgatgagcttgtaattaattaattaaattgattgatcatccccatccaaatatgtaacagatcgatttgttagtttgatgctatctcaatgaataaacattcatgattttgttatatcc

SEQ ID NO: 4340 - DNA, 1325 bp, Oryza sativa
  Clone ID: PAT_MRT4530_11232C.1
ccacgcgtccggttcgtccgccctccacctccgacgcggcggcggcggcatgaagcggcaccagatggagtcggtgccgaggacggtctcgacggtggtgcccaacacggcggaggccacccacgtgttcgacatcgtggggtacagccagatgaaggggaggggccgcgaggagcacgtcacgtcggggaccttcgtcgtcggcggcctccactgggccatcctcctcttcccggacacccacgtcatcctcctcgacgacgaggaagacaacgtcaccgccttcctcgagctccagagccaggggggaagcaaggtgcgggcgtgctgcgacgtcaggctggtcgaccagaccaccggcctcgcctcctctgctgcgccggcgcagccggatgccaagacattcaaggtgttcaatgccgatgaatccaacagggtcagctgtctcaagatgaagaggaccgaattcgaggcgccgccgtatctcgtcgacgatcggattaccctggagtgtgtggtcactgtcaagaaggagccgagggtgtcgagagctagaccagtcccgaggatcaaggtgccgccgagcaacatgatgcagcaactcggcgatctgctggagtccaaggagggggcagatgtggtgttcgatgtcgcgggggagaccttcccggcgcacaagcttgtgctggcgatgcggtctcctgtcttcaaagcggagctatgcgggccgatgagggagagcgggacagagcctatcagcattgtggatatgcaaccggttgtgttcaaggccctgctccagttcatctatactgattggttgccgtcaattcgtgatcttgagggagacgataacagcgagatgatccggcacttgcttgtcgccgcggacagatatgctgtggacaggctgaagctgttgtgtcaaagcatcctttgcaagaatcttcgtgttggtaacgttgcaactacactggctctggctgatcaacatcattgtggcatgcttaaggatgcttgcattgaatttatgtcatgtccaaacatgttggatgatgtagtggcatcccaagggtttgtggatcttgaaaacacagctccttctctcgtcgcttaggcaaaggaaaaaatgggcaggttcaagaaaatgtcgaggatgacaaagagcaatgcaccggaagatgaacctaacagtaattcgtttagtttataagtaatatggatatctgtctacttttactggatcaggtccttgtggttactttactctctatataaatagaaataacttaaacactggtattgcttgcaaaaaaaaaaaaaaa

SEQ ID NO: 4341 - DNA, 627 bp, Oryza sativa
  Clone ID: PAT_MRT4530_11233C.1
tcaccctctcctctctctaggcaccagcggcgcccgacggtagatgagggagcagcgtgtggcaaccgacgagacggtcggggaggaaggacgtaaggaggtcggcgatggccgagtgccgtgggtgggggcttgacggtaacagatggagggagagatgcacagtgggtggcggccagcaaggagacaggaaaagggtggtgattggcaaggattgcggacaacgaagagaagctcacggtgccccttccgaagttgaggatgacgacaacgatgccgcagtgtccagtcccgatcttgcgcagatctaggaccctgtcgtcgccgccctcctctcatgctctcgtcatccttctccgcccccgctaccggtgaggggccagggaggccgggagattcgttggagtcatccctacaactgtcgtcgtcgtccgagccgctcccgccggagtacgacgagcccagcgctagatgcggtcggcggcggatgcccactccctctctcttgcccgcacttggcggtgggctgtcggcggctggcgaggaggaggccagagaacgcttcagatctagaggcattgggggacgtgatggtgttgtcatcaccgttaccgtctcctcctccat

SEQ ID NO: 4342 - DNA, 263 bp, Oryza sativa
  Clone ID: PAT_MRT4530_11234C.1
gggaatcatacgtaagtgcttgttgatacaatagaaacatgaggggtccattgccggttccatatgaccaaacataaaaccaccgaacccccatttggccattttgccgatcttagcctactttggcaaggccatcgccaaaagcagatttggtcaacgtgtagaacttttccgctttttcggggctttagatcttggttgattggtcaaccccgtaattggtgccaaaaagtttgccgtaaaggtccttgaggccttttttt

SEQ ID NO: 4343 - DNA, 3213 bp, Oryza sativa
  Clone ID: PAT_MRT4530_11235C.1
atgtcaaataaggtcacatttcagatagttcacggtgaaggaaatattagatttggtccagatggtgttgatctgtcagattttgtaatgacatctaagggcatcgataggcctgcggagagaacatttcagtcaatttatagttggttgttgagaggatttagaatagaccaagaagtctacacaatgtcagtatcagttgtagtgagtcgtgcaacagaaggttatttttgggaactaatgccgatggacagcactgctgcttggagacggtatgtggaaatggcttttgaacggtcatggcccctcgttatatttgtgtcggtacaagagaaagatataaatgtttcaatgcaaaccgaagatgtagagggtcctatcaatgcaggggatgttgttggaccatcgatgcaaaatgaggaaaatcaaccaagggaggagcaggccatgggcatggcggatgagggggagagagtcggtataattgttgatgaaatggagagggaagattcggataatgaggaagcggacgacgacgcatcatccgatgaggaaggtgatgtaatggccactgattgggcaaatgaggacttctctggacttgttatatcagagggtgatcatgtaccctgggagtataaggagaacgaggtaattgacggtgcaaggtatgctcataaggatgagatgaaggaggcggtgaagcattgggcagtttccttgcagagagagtttagggtggtcaagtcaacaaattatgtgtatgaagtgaggtgcatgaaggaagattgtccgtggcgtgtccatgcatataagggtaaatggaatgattattggaaagttagcattgtgaccgagcacaagtgctacttacaaggggtggagaagtatcaccgaaacatcacttcagcttttgtggcaagtgagatgtacagcagtgttgttggtaacattggctttgaaccaaaatcaattattaggcacatcgagaacaaattcaagtacactataagctatgcaaaggcctggagagccaaacaaaagattattgagatgaggtatggcacatttgaagcttcttatgataatttgcctcgtttgttagccaccattgcccagaggaataataatacttactatgacctacatacatttacatcggttgatgatcgaacaaagagtgtgctgcaaagagcctttttctcattgggtgcttgcatcaatgcttttgtgcattgtcgacctgttctatgcatagatggaacttttatgacaggtaaataccgaggtcagatattgacagcaattgggtgtgatgggaacaaccaggttctacctatggcttttgcatttgtagagagtgagaacactgaaagctggtactggttcctagagagagtgcacattgcagtgcaattcaagaacaagcatcttatggagctctttaagaggctatgtgcacagagccaagagaagaaatttaatgagttgtgggacaagttggatgagttgacaatgaagcaaacagatgagcaatctcgcagaccacaagttgaaggtgacgagcctcccatacctcttggtgcattacatgatgacccaccaacaatgagaaggaggtcagggtcgtccatcagaaatttcactcagtggattgagaatgagcgtaaggagaagtggtctctattattcgacaccgatagatctcggagcaggcgtggtatctatcgcaagcaagccgtgcaggaatgtgtcttgaaggcggatggtggatgtacctgcagttgtatgaagccgaagcttcatcaccttccttgctcacacgttctagcagccacgtaccatgtcctctgtgaggcgtgcacgaagacagacgcgggagcgatcatcgctagctgccctatgttgcttcagctttgggcagccgagaggtttgccataggtcgaccagtggtggacagcgcaccctacggggttggtcgcagcgcgcagtggccagaggacggtcccacgatggggacttactggtgtcgacgtgggcgtcgttacgctcacgtccaggtgagacgaggttacccggacttcgtgttcgagtttgaccgtctccagccgagcgacgtcatctgggagccgtacacagaagaggccgtcgctgcgagagcaccgctaggactttcgtcgttgtgcacacgcgaccaggcttactggctcaccatcctgccgatggtgttcgacattttcgttgagcctcactgcccgcagcgtgtgatgagacagttcggacttaggcaggtgtttccgggcaacgtgcagccgaccgtcctccctgccgaccactcgttgactcgacggggacagctagcaggcgcactttgggctccacgtgtacagcagtacgttgacgactgggtgttagctacagaggaggtgatcaacgagctcttcccacacacggaggagaactaccgtgactaccttcgctggtaccttcctcgcactcgtgcgcgtgtgaccttcactccagacgccccagagccgcacgttgccgctgtgacggacgcgtatcccacgcaccgtgaccgagactacttcgtgggggctgatgccgcacgggatatcagtgccgatatcaccgcagtccaagtgaggttgaacagaggtttgcacttgactgacgttgagcagagggtgaccttcgaccggatgcaggagaagatgcgtgcggtcatgcgcgtcttctcctgtcgcagcgccgtggacgtcgtacctccagctggtccggacctcgtttgccttcgagcgcccctagcttcggagcagtgcgacctacagcaccagtttcgcacggatttgcagccgggatcttcagtactggggcctcttcgtctcacgccgacatatcgtccaatgtgcaacttcatcgagtgggtagacatggagaacccacaaaacgacggaacccgtgcttacccacgtagtgaaacaagatcggactacctaaggcggaaggatgagcatgaacgtcgaattgctgctgaggctttagaatggcacggcaatccaaggatgggtggatttactcgatggatcgacaatgtcactccatcatatcatggccagaagataacagagtcagaaacacaagtagagtatcaacgattgaaggaccacgagaatgcaatgcattctgaccgacctagaaggagccgatag

SEQ ID NO: 4344 - DNA, 2142 bp, Oryza sativa
  Clone ID: PAT_MRT4530_11236C.1
atggcttttgaacggtcatggcccctcgttatatttgtgtcggtacaagagaaagatacaaatgtttcaatgcaaaccgaagatgtggagggtcctagcaatgcaggggatgttgttggaccatcgatgcaaaatgaggaaaatcaaccaagggaggagcaggccatgggcatggcggatgagggggagagagtcggtataattgttgatgaaatggagagggaagattcggataatgagcaagcggaggacgacgcatcatccgatgaggaaggtgatgtaatggccactgattgggcaaatgaggacttctctggtcttgttatatcagagggtgatcatgtaccctgggagtataaggagtacgaggtaattgagggtgcaaggtatgctcataaggatgagatgaaggaggcgatattgacagcaattgggtgtgatgggaacaaccaggttctacctatggcttttgcatttgtagagagtgagaacactgaaaagctgaacggttgggatgagaagggacttccagctaagtggcctgatgttcggagtcggtggtgcatgcgtcacatgggtgcaaatttctacaagcaattcaagaacaagcatcttatggagctctttaagaggctctgtgcacagaaccaagagaagaaatttaatgagttgtgggacaagttggatgagttgacaacgaagcaaacagatgagcaatctcgcagaccacaagttgaaggtgacgagcctcccatacctcttggtgcattacatgatgacccaccaacaatgagaaggaggtcagggtcggccatcagaaatttctctcagtggattgagaatgagcctaaggagaagtgggctctattgttcgacaccgatggatctcggtatggcataatgacaaccaatttggcagaggtgtacaactgggtaatgcgaggagttcgggtacttccattggttgctattgttgaattcatccttcacggcacgcaagcctactttagggatcgatacaagaaaattggtccgtccatggccgataacaacatagtgtttggcaacgtagtgacaaagcgtggtatctatcgcaagcaagccgtgcaggaatgtgtcttgaaggcggatggtggatgtacctacagttgtatgaagccgaagcttcatcaccttccttgctcacacgttcttgctgctgccggtgggaggactttacgctgcagcaagtgtgatctgcgcggccatacttacaagacatgcccgaagaatgcagaagttccaagcggcgcagatgctagtccatctggacaggcaagtgatgcgccgtggacgtcgtacctccagctggtccggtacacccacggcctcgcggtcctaccgtcggagcaggacctcgtttgtcttcgagcgcccctagcttcggagcagtgcgacctacaacaccggacctcgtatgccttcgagcgcgttcgcaggcacgaccggcgcttccgcgagctccgcaggggcgttcgccacctcttcaggcgcgttcgccagctctttctctcacggagcgtcgatccctcgcccacacgccgggatcttcggtactggggcctcttcgtctcacgccgcttggaggagctccagaggcgcacactcaggagcagccagaggtcacacctgtacaggcaggacgggttggccgtgccgtacccccggaccgactcacgccaagccaacatggagatgggccttatgggccccatctatctcgagggccggccccatgtacaaagccttgatctggcatacggccgagagatcctgaccgtcgaaatcaaagatggtattgttggcaagtattttgttggtaagatgtccaacaaagttcctgggttttctctcattacggtgaaagtgaaggacaatctggtcctcaaaggttggattccagatgaaagtgacctccgcccaataacaccaaaggatgacctcgccccagatcttcccatgcttcggccaagtcaagttcgaaagaggccatctactatttacaagcaagctgctggtccaattccagtccccttggaggatgttacatttgcaaagcctctacagatgaggaagcctgttgagaaatctgtcgctaagtga

SEQ ID NO: 4345 - DNA, 3246 bp, Oryza sativa
  Clone ID: PAT_MRT4530_11237C.1
atggcttttgaacggtcatggcccctcgttatatttgtgtcggtacaagagaaagatacaaatgtttcaatgcaaaccgaagatgtggagggtcctagcaatgcaggggatgttgttggaccatcgatgcaaaatgaggaaaatcaaccaagggaggatcaggccatgggcatggcggatgagggggagagagtcggtataattgttgatgaaatggagagggaagatttggataatgagcaagcggaggacgacgcatcatccgatgaggaaggtgatgtaatggccactgattgggcaaatgaggacgtctctggacttgttatatcagagggtgatcatggtaaatggaatgattattggaaagttagcattgtgaccgagcaccagtgctacttacaaggggtggagaagtatcaccgaaacatcacttcagcttttgtggcaagtgagatgtacagcagtgttgttggtaacattggctttgaaccaaaatcaattattagccacatcgagaacaaattcaagtacaccataagctatgcaaaggcttggagagccaaacaaaagaatattgagatgaagtatggcacatttgaagcttcttatgataatttgcctcgtctgttagccaccattgcccagaggaataataatacttactatgatctacatacatttacatcggctgatgatcgaacaaagagtgtgctgcaaagagcctttttctcattgggtgcttgcatcaatgcttttgtgcattgtcgacctgttctatgcatagatggaacatttttgacagagaatgagaacactgaaagctggtactggttcctagagagagtgcacattgcagtggtgcgtatgaggcccaacgtctgccttatacatgatcgtcatgcgggtatgttgcgggctattgactacttgcagaacggttgggatgagaagggacttccagctaagtggcctgatgtttggagtcggtggtgcatgcatcacatgggtacaaatttctacaagcaattcaagaacaagcatcttatggagctctttaagaggctctgtgcacagaaccaagagaagaaatttaatgagttgtgggacaagttggatgagttgacaacgaagcaaatagacgagcaatctcgcagaccacaagttgaaggtgacgagcctcccatacctcttggtgcattacatgatgacccaccaacaatgagaaggaggtcggggtcgtccatcagaaatttcactcagtggattgagaatgagcctaaggagaagtggtctctattgttcgacactgatggatctcggtatggcataatgacaaccaatttggcagaggtgtacaaccgggtaatgcgaggagttcgggtacttccattggttgctattgttgaattcatccttcacggcacgcaagcctactttagggatcgatacaagaaaattggtccgtccatggccgataacaacatagtgtttggcaacgtagtgacaaagtacatggaagataaaatcaaaaaggcacggagacatagagttgttgctcaaggcacacaagtgcatcggcaagtgatggaaggcgaccacctggtgaaggaacaacaagcaggcgcgcaaggccaaggcgtcgtcatgcagcaggcgattccatggtgtaacattgctatcgatttaggtatggcgtacgacacaccggcgctgttcaaccgtgggattgacagaaaccaccgctcgttcctgtcagcagtcgagggtgcacagctcggcaccttccgtccacgcacgtcgcgcgagtggttgcgtgtcgacccccgtcacgttccttggttgcgtgcggcaggccttctaccactttgtaggcttgttgaggcggcggcggacgtccgtgaccagcgaagcggtgggacgcagaccggagccccagttggtcccgtggacggtgtttttggctggaaggaggatatcactgcgcgcttcgagcacgtgatgcgccttccacacctaggaccgcccaagacccttcccccgtactctaccgttaggcctagcaaggcttggttgcttcagttcactctttgggcagccgagaggtttgccataggtcgaccagtggtgggcagcgcaccctacagggttggtcgtagcgcgcagtggctagaggacggtcccacgatggggacttataggtgtcgacgtgggtgtcattacgctcacgtccagcgtgtgatgagacagttcggactgaggcaggtgtttccgtgcaacgtggagccgaccgtcctccctgccgaccactcgttgactcgacggggacagctagcaggtgcactttgggctccacgtgtacagcagtacgttgacgactgggtgttagctacagaggaggtgatcaacgagctcttcccacacacagaggagaactaccgtgactacctccgctggtaccttcctcgcactcgtgcgcgtgtgaccttcactccagacgtcccagagccacacgttgccgctgtcacggacgcgtatcccacgcaccgtgaccgagactacttcgtgggggccaatgccgcacgggatatcagtgccgatatcaccgcaatccaagtgaggttgaacagaggtttgcacttgactaacgttgagcagagggtgaccttcgactggatgcaggagaatatgcgtgcggtcatgcgcatcttctcctgtcgcaacgccgtgtacgtcgtacctccagctggtccggacctcgtttgccttcgagcgcccctagcgtcggagcagtgcgacctacagcaccggtttcgcacggtactgctcaacccaaaggatttccagccgagatcttcggtactggtgcctcttcgtctcacgccgataggtctggtcctactagctagttctacgacgatgacttgcacgacatatcgtccaatgtgcaacttcatcgagtgggtagacatggagaacccacaaaacgatagaacacgtgcatacccacatagtgaaacaagatcggactacctaaggcggaaggatgagcatgaacgtcgaattgttgctgaggctttagaatggcagggcaatccaacgatgtgtggatttactcgatggattgacaatgtcactccatcatatcatggccaaaagataacagagtcagaaatacaagtagagtatcaacgattgaaggaccacgagaatgcaatgcatattgaccgacctagaaggggccgatag

SEQ ID NO: 4346 - DNA, 207 bp, Oryza sativa
  Clone ID: PAT_MRT4530_11238C.1
atggcgacgacggagatggcggcgccgccgcgggccccctcgccggcacgcgcgtgcagcaccgcgacgagggacatctccgtggtgggaggcaccggcgacttcttcatgtcccgtggcgtcgccacgctccgcgccgacgccgtcgagggattcacctacttcaggctgctgatggacatcaagctctacgaatgctacatctga

SEQ ID NO: 4347 - DNA, 1665 bp, Oryza sativa
  Clone ID: PAT_MRT4530_11239C.1
atggcgccggcggcgcggcgctcacacggcggcggcgcgcatgcggcagcggcgcaaagcgacgaccgacggcgatcgtccggcggcggagagcggcggctagcggctctaggaggagaggaaggggaaaaggagggaggggatgcctcaccgagggtggccggcgcggaggaaggcgatggcggacggcgacggcaagccacgggaggacggcgtcggctagcggacgagctccggcgtgccctaaggaaggagaagagaggaattagagagagagagatggaccatggcgatcgggatccatggccgaaggcggcggtagaggtggcgctcacccgtgcgcgtggagatgagggctccggcgacgaacctcgacggaggaggggcggacgaggtggacctcggccacgcgaagctaacggcggcgacggccgtcgttacgctcacgtccaggtgagacgtggttacccggacttcgtgttcgagtttgaccgtctccagccgagcgacgtcatctgggagccgtacacagaagaggccgtcgctgcgagagcaccgctaggactttcgtccttgtgcacacgcgaccaggcttactggctcaccatcctgccgatggtgttcgacattttcgttgagcctcactgcccgcagcgtgtgatgagacagttcggacttaggcaggtgtttccgggcaacgtgcagccgaccgtcctccctgccgaccactcgttgactcgacggggacagctagcaggcgcactttgggctccacgtgtacagcagtacgttgacgactgggtgttagctacagaggaggtgatcaacgagctcttcccacacacggaggagaactaccgtgactaccttcgctggtaccttcctcgcactcgtgcgcgtgtgaccttcactccagacgccccagagccgcacgttgccgctgtcacggacgcgtatcccacgcaccgtgaccgagactacttcgtggcggctgatgccgcacgggatatcagtgccgatatcaccgcagtccaagtgaggttgaacagaggtttgcacttgactgacgttgagcagagggtgaccttcgaccggatgcaggagaagatgcgttcggtcatgcgcgtcttctcctgtcgcagcgccgtggacgtcgtacctccagctggtccggtacaaccacggcctcgcgcgcctaccgtcggagcaggacctcgacctacggcacctatttcgcacggacctcgtctgccttcgagcgcgttcgcaggcacgaccggcgcttccacgagctccgcaggggcgttcgccacctcttcgggcgcgttcgccagctcttcctctcacggagcgtcgatccctcgcccacacgcaggatttgcagccgggatcttcggtactggggcctcttcatctcacgccggtaggactggtcctactagccagttctacgacgacgacttgcacggtgcagaccaccacgacgtactaggctcctctcagcttggaggagctccagaggcgcacactcaggagcagccagaggtcacacctgtacaggcaggacgggttggccgtgccgtacccccggaccgactcacgtactcccacgggcacattagggcgcagggtaggagggacaggggtaagaggcctcgtcagtag

SEQ ID NO: 4348 - DNA, 269 bp, Oryza sativa
  Clone ID: PAT_MRT4530_1123C.1
aacgatcgaaccatggcacagatgcgtatactaactcacaaacagaccctacgctctctccggccacagcacggggaataaagcatcgtcagttttaaagctatcggctgacatgatctatatcgataagactgaagccgagacaaaccccagacgcggtccatggtgattctcctcaagagacccaggatcagggggacattgactacctatgggtgcatgcttacatgtggcttggggtggatcaccagttggtgtacgctcacacc

SEQ ID NO: 4349 - DNA, 416 bp, Oryza sativa
  Clone ID: PAT_MRT4530_11240C.1
ccacaattcaaatattatagttgaagcatgctagtagaatccaacaacaatgaagatcattttcgtatttgctctccttgctattgttgcatgcaatgcctctgcgcggattgaatgtcttagttctcgtcgtggaagtccaagagaatgcaggttcgataggttgcaagcatttgatccaagtgggtgctgtgaggtctcaagctggcacaactgagttcttcgatgtctctaatgagcaatttcaatgtaccggagtatctgttgtccgtcgagttattctttctagaggccttctactaccccattacactaatggtgcatctctagtatatatcatgcaggggagaggtatgacagggtcaactttgccaggctgtcctgagtcctaccagctgcggttccaacagtcaggc

SEQ ID NO: 4350 - DNA, 702 bp, Oryza sativa
  Clone ID: PAT_MRT4530_11241C.1
atggcggatgagggggagagagtcggtataattgttgatgaaatggagagggaagattcggataatgaggaagcggacgacgacgcatcatccgatgaggaaggattcgcagccgggatcttcggtactggggcctcttcgtctcacgccggtaggactggtcctactagccagttctacgacgacgacttgcacggtgcacaccaccacgacgtactaggctcctctcagcttggaggagctccagaggcgcacactcaggagcagccagaggtcacacctgtacaggcaggacgggttggccgtgccgtacccccggaccgactcacgtactcccaggggcacattagggcgcagggtaggagggacagggcactagaataccaggcaccagctaacgagggcggaaatactcttcatcctttggagaacgtgattggccaggcttcagttaaaggcttggtggtgtttaccttagctgaagcactgctccccgtccgacaaaccagcgataatcataaagggaagacaattggcatgaaaggaaggctgaaggaacaaggtgctcctgggaacttgaatcatcagcgtcgttgctcaatgtcgttggagctttcaacccagaaactggtagaggagcaatcggactcgtggttagaaattcagatggacaagttctcctgtcatcttggaaattcctaa

SEQ ID NO: 4351 - DNA, 2007 bp, Oryza sativa
  Clone ID: PAT_MRT4530_11242C.1
atggctgaatatgatttggataatgacttttctgttgtcgaagtctatagtgtccgtgatgttcaggttggacctttccaaagtgcacttgaaagtctgccccatggtgaggtattagctgtagggcatgacacctccggcgaaataatggtcgagactgtggagttgaatggcgattcaaaggaacagttagatcttgactccatgggttatcctaagttaccatcctccatgttaggagctggcatgatcttggttaattcttttgaagacccttttggcgacatatatggtgaaggtgtctggagaaaattcagcagaagagcttctatcctaaatcgcaatgttgtcgcactggcttcattcaatgcgagcttggttagagattctggtgatgagaacaagattgatgaaaacttgagggttggtgttcattgttttgtgtctgatgttcttctaaggtggtctgtgcccaagccacgctggtgccgtcctgaagatgctgaatctgatgatgatgataagttagcttttgatgatactggccagcttcaatacagttatattttgggacggaaagtcaagctccttcgtctcacaatccccatatcggttccgattgttgaagctaaatccactgatgagcctggagttgatcctttcgcacaaaggaagcaaaagaagaagcgggtagaaaagcaaggaaaaaacagactagagaacttaaagaaagctgcaaaagttggtgctttgccaagtcatatacaacttgctgcaacgtccttgcccatcacaggaactaaagctgatcttccgaaaaaatctagaaaagaggatcttgagaatgttgctggcatgggatctgcaacagcaagtggtgggaagtttgatgagaagttgcctggcgagaaacctccaaagcatcctggcaaacataaaaagtttatcccagttgctgaaggggagggaatgggcaacctggggaaacagcagaatgacaaaattctgatgtctctacttgccagaaactctgaacagcttgatgagtcatccaccaccatctccatggggatgctgaatctgatgcgcctcatgtccgtcaagcgccgccgccgccaagtccaagttccccatgatggattgattgccttacgggctaaaagaaagtgttcaccctgccaacaagatggcgattctcagggcgctgctgacatagagataccagaccttccagaggtaccttgcctactgcagcggctcatctccctgaaggtgtttgggtgcgacaatctgaaactgatagaaaatgaagctcctaatgtctccatttttgcatttcaaggggacaaaacgcaactgaaacttggagaaactttgcaaatgaagagcctatgcatggttcgctctggttatgtttatcatgctcgtgctgaacttccatccatcatgccaaatcttgaatctcttgccatgaagtcattcaaagagacggcctttgcaccgaagctgtgtagcaaattcctctgcctcaggcacttgagcattgcccttattggatatttcccagcctatgactatttgtccctggcttcttatattcatgctgcaccttctctggagactttctacctgactcggtacgtgcagaatgtttcaatttttgcacatcctgcagatctgagatcaatacgagaagagcagcatcacagccttaagagtgtgagggtcacatcattcatctctgtaaagagcttggttgagctgacatgccatatccttgagagtacaacttcccttgagtgcttgacattggatgcttctcagactggttttaggtgtgatactcctggcagcaaaattggcaaatgccccccactagatagggacattatcatggaaggtcacagaggggtcttggctatcagaagatacatccagcctagggtaccttccacagtgaagctgaatgttttggagccctgcagctgccattgtactgaactttag

SEQ ID NO: 4352 - DNA, 1059 bp, Oryza sativa
  Clone ID: PAT_MRT4530_11243C.1
atggcggatgagggggagagagtcggtataattgttgatgaaatggagagggaagattcggataatgaggaagcggacgacgacgcatcatccgatgaggaaggtgatgtaatggccactgattgggcaaatgaggacttctctggacttgttatatcagagggtgatcatgtaccctgggagtataaggagaacgaggtaattgacggtgcaaggtatgctcataaggatgagatgaaggaggcggtgaagcattgggcagtttccttgcagagagagtttagggtggtcaagtcaacaaattatgtgtatgaagtgaggtgcatgaaggaagattgtccgtggcgtgtccatgcatataagggtaaatggaatgattattggaaagttagcattgtgaccgagcacaagtgctacttacaaggggtggagaagtatcaccgaaacatcacttcagcttttgtggcaagtgagatgtacagcagtgttgttggtaacattggctttaaaccaaaatcaattattaggcacatcgagaacaaattcaagagattcttccaatgcgcgaactttgatcagacatatcgtccaatgtgcaacttcatcgagtgggtagacatggagaacccacaaaacgacggaacccgtgcttacccacgtagtgaaacaagatcggactacctaaggtggaaggatgagcatgaacgtcgaattgctgctgaggctttagaatggcacgtaaatcccctaagactccccacgtggcgtgagcgtccggagtgtcgttgtggtgaccgttgtcaggtcataagagatcgctggcaggtggctacatcctttgctgaacaaacatttcgaaggagatattttgtctgccccaatgtagacaacgatttcgttggcaatccaaggatgggtggatttactcgatggatcgacaatgtcactccatcatatcatggccagaagataacagagtcagaaacacaagtagagtatcaacgattgaaggaccacgggaatgcaatgcattctgaccgacctagaaggtgccgatag

SEQ ID NO: 4353 - DNA, 411 bp, Oryza sativa
  Clone ID: PAT_MRT4530_11244C.1
agaagccccccgaggccttacctccttccgggcttctttcgaagaacaccaaccttctgccccatccacccaagccgtgtcaccatcatgccccaagacatccagctcgcccccccgcatcccgcggagcgcgcgtaacccccccttcgacgcggttgcgttgcgtagccccgaacgatctggggggatcaacgacgacgacgtgacgtggtcaactttgattcccctctcgcttccgcttttagatctcgttttcattaccagcttttaataggtttgtcgttaaattaagtgtaaaaacaggttcggttaaagactcaaatcaatgttatcccttctttggattttccgttaaccaaacagtgttaaagactataatattcgtttactatatggaaaaaaaaaaaaaaa

SEQ ID NO: 4354 - DNA, 409 bp, Oryza sativa
  unsure (1)..(409): unsure at all n locations
  Clone ID: PAT_MRT4530_11245C.1
tggtgtcacgaggaacacactccagacggaatgacaanttccgacacgcaagttagantagtatcatggtcaagtttattgaggcctctgtaattgaaccttcctgatgtgaaactttatatagaacttatcataccgggtatggtgtttgcaaggtcggtcagagtgtgtatcatatacggnatctacatagagcttagaggggtaggtaccgtagggtgtgggttacaattttcccgaataaccgcacaccgataccgaaacaacaggtttctcggtgtttggagtgacgttcggtnttcctttttacatacttgggtgatcggtgtgtggctcgttttgnatataccgtataaaccgaggtctatattgtaacctngcacatcaacaaaaaaaaaaaaaaaaaaaa

SEQ ID NO: 4355 - DNA, 3162 bp, Oryza sativa
  Clone ID: PAT_MRT4530_11247C.1
atgtcaagtaaggtcatatttcagatagttcacggtgaaggaaatattagatttggtccagatggtgttgatctgtcagattttgtaatgacatctaagggcatcgataggcctgcggagagaacatttgagtcaatttatagttggttgttgagaggatttagaatagaccaagaagtctacacaatgtcagtatctgttgtagtgagtcgtgcaatagaaggttatttttgggaactaatgccgatggacagcactgctgcttggagacggtatgtggaaatggcttttgaacggtcatggcccctcgttatatttgtgtcggtacaagagaaagatacaaatgtttcaatgcaaaccgaagatgtggagggtcctagcaatgcaggggatgttgttggaccatcgatgcaaaatgaggaaaatcaaccaagggaggagcaggccatgggcatggcggatgagggggagagagtcggtataattgttgatgaaatggagagggaagattcggataatgagcaagcggaggacgacgcatcatccgatgaggaaggtgatgtaatggccactgattgggcaaatgaggacttctctggtcttgttatatcagagggtgatcatgtaccctgggagtataaggagaacgaggtaattgagggtgcaaggtatgctcataaggatgagatgaaggaggcggtgaagcattgggcagtttcattgcagagagagtttagggtgatcaagtcaacaaattatgtgtatgaagtgaggtgcatgaaggaagaatgtccgtggcgtgtccatgcatataagggtaaatggaatgattattggaaagttagcattgtgaccgagcacaagtgctacttacaaggggtggagaagtatcaccgaaacatcacttcagcttttgtggcaagtgagatgtacagcagtgttgttggtaacattggctttgaaccaaaatcaattattaggcacatcgagaacaaattcaagtacaccataagctatgcaaaggcctggagagccaaacaaaagatcattgagatgaggtatggcacatttgaagcttcttatgataatttgcctcgtttgttagccaccattgcccagaggaataataatacttactatgacctacatacatttacatcggttgaagatcgaacaaagagtgtgctgcaaagagcctttttctcattgggtgcttgcatcaatgcttttgtgcattgtcgacctgttctatgcatagatggaacttttatgacaggtaaataccgaggtcagatattgacagcaattgggtgtgatgggaacaaccaggttctacctatggctttcgcatttgtagagagtgagaacactgaaagctggtactggttcctagagagagtgcacattgcagtggtgcgtatgaggcccaacgtttgccttatacatgatcgtcatgcgggtatgttgcgggctattgactacttgcagaacggttgggatgagaagggacttccagctaagtggcctgatgttcggagtcggtggtgcatgcgtcacatgggtgcaaatttctacaagcaattcaagaacaaacatcttatggatctctttaagaggctctgtgcacagaaccaagagaagaaatttaatgagttgtgggacaagttggatgagttgacaacgaagcaaacagatgagcaatctcgcagaccacaagttgaaggtgacgagcctcccatacctcttggtgcattacatgatgacccaccaacaatgagaaggaggtcagggtcggccatcagaaatttctctcagtggattgagaatgagcctaaggagaagtgggctctattgttcgacaccgatggatctcggtatggcataatgacaaccaatttggcagaggtgtacaactgggtaatgcgaggagttcgggtacttccattggttgctattgttgaattcatccttcacggcacgcaagcctactttagggatcgatacaagaaaattggtccgtccatggccgataacaacatagtgtttggcaacgtagtgacaagtacatggaagataaaatcaaaaaggcacggagacatagagttgttgctcaaggcacacaagtgcatcgatccatctaagttaagggtgaaaaagggtcgacgccaaactagacgcatcagaaatgatatggatgagtcagaagcaggtgggaggactttacgctgcagcaagtgtgatctgcgcggccatacttacaagaaatgcccgaagaatgcagaagttccaagcggcgctgatgctagtccatctggacagctagcaggcgcactttgggctccacgtgtacagcagtacgttgacgactgggtgttagctacagaggaggtgatcaacgagctcttcccacacacggaggagaactaccgtgactaccttcgctggtaccttcctcgcactcgtgcgcgtgtgaccttcactccagacgccccagagccgcacgttgccgctgtcacggacgcgtatcccacgcaccgtgaccgagactacttcgtggcggctgatgcggcacgggatatcagtgccgatatcaccgcagtccaggtgaggttgagcagaggtttgcacttgactgacgttgagcagaggtcgaccttcgaccggatgcaggagaagatgcgtgcggtcatgcgcgtcttctcctgtcgcagcgccgtggacgtcgtacctccagctggacctcgtatgccttcgagcgcgttcgcaggcacgaccggcgcttccgcgagctccgcaggggcgttcgccacctcttcgggcgcgttcgccagctcttcctctcacggagcgtcgatccctcacccacacgcaggatttgcagccgggatcttcggtactggggcctcttcgtctcacgccggtaggactggtcctactagccagttctacgacgacgacttgcacggtgcagaccaccaggacgtactaggctcctctcagcttggaggagctccagaggcgcacactcaggagcagccagaggtcacacctgtacaggcaggacgggttggccgtgccgtacccccggaccgactcacgtactcccaggggcacattagggcgcagggtaggagggacaggggtaagaggcctcgtcagtag

SEQ ID NO: 4356 - DNA, 3768 bp, Oryza sativa
  Clone ID: PAT_MRT4530_11248C.1
atgtcaagtaaggtcacatttcagatagttcacggtgaaggaaatattagatttggtccagatggtgttgatctgtcagattttgtaatgacatctaagggcatcgataggcctgcggagagaacatttcagtcaatttatagttggttgttgagaggatttagaatagaccaagaagtctacacaatgtcagtgtcagttgtagtgagtcgtgcaacagaaggttatttttgggaactaatgccgatggacagcactgatgcttggagacggtatgtggaaatggcttttgaacggtcatggcccctcgttatatttgtgtcggtacaagagaaagatataaatgtttcaatgcaaaccgaagatgtagagggtcctatcaatgcaggggatgttgttggaccatcgatgcaaaatgaggaaaatcaaccaagggaggagcaggctatgggcatggcggatgagggggagagagtcagtataattgttgatgaaatggagagggaagattcggataatgaggaagcggacgacgacgcatcatccgatgaggaaggtgatgtaatggccactgattgggcaaatgaggacttctctggacttgttatatcagagggtgatcatgtaccctgggagtataaggagaacgaggtaattgagggtgcaaggtatgctcataaggatgagatgaaggaggcggtgaagcattgggcagtttccttgcagagagagtttagggtggtcaagtcaacaaattatgtgtatgaagtgaggtgcatgaaggaagattgtccgtggcgtgtccatgcatataagggtaaatggaatgattattggaaagttagcattgtgaccgagcacaagtgctacttacaaggggtggagaagtatcaccgaaacatcacttcagcttttgtggcaagtgagatgtacagcagtgttgttggtaacattggctttgaaccaaaatcaattattaggcacatcgagaacaaattcaagtacaccataagctatgcaaaggcctggagagccaaacaaaagatcattgagatgaggtatggcacatttgaagcttcttatgatattttgcctcgtttgttagccaccattgcccagaggaataataatacgtactatgacctacatacatttacatcggttgatgatcgaacaaagagtgtgctgcaaagagcctttttctcattgggtgcttgcataaatgcttttgtgcattgtcgacctgttctatgcatagatggaacttttatgacaggtaaataccgaggtcagatattgacagcaattgggtgtgatgggaacaaccaggttctacctatggcttttgcatttgtagagagtgagaacactgaaagctggtactggttcctagagagagtgcacattgcagtggtgcgtatgaggcccaacgtttgccttatacatgatcgtcatgcgggtatgttgcgggctattgactacttgcagaacggttgggatgagaagggacttccagctaagtggcctgatgttcggagtcggtggtgcatgcgtcacatgggtgcaaatttctacaagcaattcaagaacaagcatcttatggagctctttaagaggctctgtgcacagaaccaagagaagaaatttaatgagttgtgggacaagttggatgagttgacaacgaagcaaacagatgagcaatctcgcagaccactagttgaaggtgacgagcctcccatacctcttggtgcattacatgataacccaccaacaatgagaaggaggtcagggtcgtccatcagaaatttcactcagtggattgagaatgagcctaaggagaagtggtctctattgttcgacaccgatggatctcggtatggtataatgacaaccaatttggcagaggtgtacaactgggtaatgcgaggagttcgggtacttccattggttgctattgttgaattcatccttcacggcacgcaagcgtactttagggatcgatacaagaaaattggtccgtccatggccgataacaacatagtgtttggcaacgtagtgacaaagtacatggaagataaaatcaaaaaggcacggagacatcgagttgttgctcaaggcacacaagtgcatcggtatgaaataatgtgtgttgataggagcaggcgtggtatctatcgcaagcaagccgtgcaggaatgtgtcttgaaggcggatggtggatgtacctgcagttgtatgaagtcgaagcttcatcaccttccttgctcacacgttcttgctgctgccggtgattgtggcatatctcccaatgtgtacgtctcaaattatttcaggaaagaagcaatctttcatacatggagtgaggagatatatgggttcgggatctcaggatcttacacaacgctgagtgcccaagttttttatattccagatccatctaagttaagggtgaaaaagggtcgacgccaaactagacgcatcagaaatgatatggatgagtcagaagcaggtgggaggactttacgctgcagcaagtgtgatctgcgcggccatacttacaagaaatgcccgaagaatgcagaagttccaagcggcgcagatgctagtccatctggacaggcaagtgatggtatggtgtacgacacaccggcgctgttgaaccgtggttttgacaggaaccaccgctcgttcctgttgactcgacggggacagctagcaggcgcactttgggctccacgtgtacagcagtacgttgacgactgggtgttagctacagaggaggtgatcaacaagctcttcccacacacggaggagaactaccgtgtctaccttcgctggtaccttcctcgcactcatgcgcgtgtgaccttcactccagacgccccagagccgcacgttgccgctgtcacggacgcgtatcccacgcaccgtgaccgagactacttcgtggcggctgatgccgcacgggatatcagtgccgatatcaccgcagtccaaatgaggttgaacagaggtttgcacttgactgacgttgagcagagggtgaccttcgaccggatgcaggagaagatgcgtgcggtcatgcgcgtcttctcctgtcacagcgccgtggacgtcgtacctccagctggtccggtacaaccacggcctcgcgcgcctaccgtcggagcaggacctcgacctacggcacctgtttcgcacggacctcgtctgccttcgagcgcgttcgcaggcacgaccggcgcttccgcgagctccgcaggggcgttcgccacctcttcgggcgcgttcgccagctcttcctctcacggagcgtcgatccctcgcccacacgcaggatttgcagccgggatcttcggtactggggcctcttcgtctcacgccggtaggactggtcctactagccagttctacgacgacgacttgcacagtgcacaccaccacgacgtactaggctcctctcagcttggaggagctccagaggcgcacactcaggagcagccagaggtcacacctgtacaggcaggacgggttggccgtgccgtacccccggaccgactcacgtactcccaggggcacattagggcgcagggtaggagggacagggttcttttcattcatatggtgctagaacaacttatgctcacgacaacacactttcggcgcttcacggtagtgtcagatccagtagcgcgcacagtccacaacagcacacatgaaaagcggcagctcgagttatcactatcaactttcggcgctgcctgttga

SEQ ID NO: 4357 - DNA, 584 bp, Oryza sativa
  Clone ID: PAT_MRT4530_11249C.1
ctagtggatccccgggctgcaggcacatctcactgtcgtgctcagctcaccgccggagatcgagaagatggcctgcgtctggctgctccaccagaccaccagcttcctcgggcagtgccctggtctcccgccccgtctccgtgcgccgatgccggcggccgcatcaccatgcgccgcaccgtcaagagcgctccccagagcatctggtacggccctgaccgtcccaagtacctgggcccattctccgagcagacgccgtcgtacctgaccggcgagttccccggcgactacgggtgggacacggtggtggctctccgccgacccggagaccttcgcccggaaccgtgagctggagtgtgatccactccctggtgggccatgcttgggcgcgctgggctgcgtgttcccggagatcctggccaagaacggcgtcaagttcggcgaggccgtgtggttcaaggccggcgcgcagatcttctccgagggctgggctggactacctgggcaaacccaacctggttgcacgcgcagagcatcctcgccatctgggcctgacaggtcgtgctcatgggcttcgtcgaggg

SEQ ID NO: 4358 - DNA, 1978 bp, Oryza sativa
  Clone ID: PAT_MRT4530_1124C.1
atggcgttcaccgaggagacaacgcacttggtcatgaaccatgtcgagcactgcgaggatggcggcggcctggcagtggccggctggaccccgtctggctcctgcacactgtccgtgcacgacgacccggcgccggagacgccaccgccgcatcctctgtccgctacggaagacgacgccgacgagcccaggccgaggcccagcgggcggtacgtgctggcggcgcaccgtgccggcgagagggacggcctctgccgggagctctcgcgcgcgccggcggccaaagtcacgtaccgcgtggccgggtgggtcggcctgcagggcgcgggggcggcggacgggtgctgccacgccgtgcgcgtcgaggtttgcacggacgacggtcgcccggtcggcggcggcgtggtcgtggcggaagcggggaaatggggcgagatcatgggctctttccgggtggacgacgacgagccgccgcgctgcgccaaggtgttcgtccatggaccgccggccggggtggatctcaaggtgatggacctgcaggtattcgccgtgaacaagatcgcgaggctcaggcacctcaggaagaaaactgacaaggtgcgcaagcgtgatgtggtgctcaagctggggcggcgaacgggcggcacggcgatccgcgtggtgcaggtggagaacagcttccccatcggcgcgtgcatcaacaagacggcgatccagaacccggcgttcgtggacttcttcaccaagcacttcgactgggcggtgctcgagaacgagctcaagtggtactacaccgaggcggtgcaggggcaggtcagctactccgacgccgacgagctcatcgccttctgcgaccgccacggcaagcccgtgcgcggccactgcatcttctgggccgtcgagaacgtcgtgcagccgtgggtccgcgcgctcaacggcgatcagctccgcgccgccgtggagggccgcctccgcagcctcgtgacgcggtacggcggcaggttcccgcactacgaggtgaacaacgagatgctccacggcgccttcttccagcagaggctgggcgacgacatcaacgcgcgcatgttccgggagacggcgcagatggacccgtcgccggcgctgttcgtcaacgactacaacgtggagagcgccaacgacccgaacgcgacgccggagcggtacgtggagctggtcaccgacctgcagaagcgcggcgcggcggtgggcggcatcggcgtgcagggccacgtgacgcacccggtgggcgacgtgatctgcgacgcgctggacaggctcgccgtcacgggtctccccgtgtggatcacggagctggacgtgtcggcggcggacgaggcggtgcgcgccgacgacctggagatcgtgctccgggaggcgttcgcgcacccggcggtggaggggatcatgctgtgggggttcatgcagggcaacatgtggcgctcccacgcgcacctcgtcgacgccgacgggaagctcaacgaggccggccaccgctacgtgggtctccggcaggagtggacgtcgcacgcgcgggggcaggtcgacggcagcggccacttcaagttcagggggttccacggcaagtacgtcgtgcagctcaccaccggcgccggcgagatgaagtaccagcagttcgacgtcggcaagggagatggcccactcgtgctcgacatggatctctagccagccaactccatcatcgggggggattcatacgttcatacgtgtagtacatagaacggttaagtgcattgcatatatacggattatattgggattgggattattttttagatcgatcagaagagatgtgatgttgttttatgttgtgattatagggccttggcgtgtccgtgtgtggtaatttaaaccgtaaaagagggtattggatttgtatttgctacctacagatttgcagtaaataaacgaccaatccccagtaccaaaaaaaaacaaa

SEQ ID NO: 4359 - DNA, 3930 bp, Oryza sativa
  Clone ID: PAT_MRT4530_11250C.1
atgtcaaataaggtcacatttcagatagttcacggtgaaggaaatattagatttggtccagatggtgttgatctgtcagattttgtaatgacatccaagggcatcgataggcctgcagagagaacatttcagtcaatttatagttggttgttgagaggatttagaatagaccaagaagtctacacaatgtcagtatctgttgtagtgagtcgtgcaatagaaggttatttttgggaactaatgccgatggacagcactgctgcttggagacggtatgtggaaatcgcttttgaacggttatggcccctcgttatatttgtgttggtacaagagaaagatacagatgtttcaatgcaaaccgaagatgtggagggtcctagcaatgcaggggatgttgttggaccatcgatgcaaaatgaggaaaatcaaccaagggaggagcaggccatgggcatggcggatgagagggagagagtcggtataattgttgatgaaatagaaagggaagattcggataatgagcaagcggaggacgacgcatcatccgatgaggaaggtgatgtaatggccactgattgggcaaatgaggacttctctggacttgttatatcagagggtgatcatgtaccctgggagtataaggagaacgagagagagtttagggtggtcaagtcaacaaattatatgtatgaagtgaggtgcatgaaggaagattgtccgtggcgtgtccatacatataagggtaaatggaatgattattggaaagttagcattgtgaccgagcaccagtgctacttacaaggggtggagaagtatcaccgaaacatcacttcagcttttgtggcaagtgagatgtacagcagtgttgttggtaacattggctttgaaccaaaatcaattattaggcacatcgagaacaaattcaagtacaccataagctatgcaaaggcctggagagccaaacaaaagattattgagatgaggtatggcacatttgaagcttcttatgataatttgcctcgtctgttagccaccattgcccagaggaataataatacttactatgacctacatacatttacatcggttgatgatcgaacaaagagtgtgctgcaaagagcctttttctcattgggtgcttgcatcaatgcttttgtgcattgtcgacctgttctatgcatagatggaacttttttgacaggtaaataccgaggtcagatattgacagcaattgggtgtgatgggaacaaccaggttctacctatggcttttgcatttgtagagagtgagaacactgaaagctggtactggttcctagagagagtgcacattgcagtggtgcgtaggagacccaacgtttgccttatacatgatcgtcatgcgggtatgttgcgggctattgactacttgcagaacggttgggatgagaagggacttccagctaagtggcctgatgttcggagtcggtggtgcatgcgtcacatgggtgcaaatttctacaagcaattcaagaacaagcatcttatggagctctttaagaggctctgtgcacagaaccaagagaagaaatttaatgagttgtgggacaagttggatgagttgacaacgaagcaaacagacgagcaatctcgcagaccacaagttgaaggtgacgagcctcccatacctcttggtgcattacatgatgacccaccaacaatgagaaagaggtcggggtcgtccatcagaaatttcactcagtggattgagaatgagcctaaggagaagtggtctctattgttcgacaccgatggatctcggtatggcataatgacaaccaatttggcagaggtgtacaactgggtaatgcgaggtgttcgggtacttccattggttgctattgttgaattcatccttcacggcacgcaagcctactttagggatcgatacaagaaaattggtccgtccatggccgataacaacatagtgtttggcaacgtagtgacaaagtacatggaagataaaatgaaaaaggcacggagacatagagttgttgctcaaggcacacaagtgcatcggtatgaaataatgtgtgttgataggagcaggcgtggtatctatcgcaagcaagccgtgcaggaatgtgtcttgaaggcggatggtggatgtacctgcagttgtatgaagccgaagcttcatcaccttccttgctcacacgttcttgctgctgccggtgattgtggcatatctcccaatgtgtacgtctcaaattatttcaggaaagaagcaatctttcatacatggagtgaggagatatatgggttcgggatctcaggatcttacacaacgctgagtggcaaagttttttatattctagatccatctaagttaagggtgaaaaagggtcgacgccaaactagacgcatcagaaatgatatggataaatcagaagcaggtgggaggactttacgctgcagcaagtgtgatctgcgtggccatacttacaagaaatgcccgaagaatgcagaagttccaagtggcgcggatgctagtccatctggacaggcaagtgatggaaggcgaccacttggtatggcgtacgatacaccgacgttgttcaatcgtggcattgacaggagccaccgctcgttcttgtcagcagtcgagggtgcacagctcggcaccttctgtccacgcacgtcgcgcgagtggttgcgtgtcgacccccgtcacattccttggttgcgtgcggcaggccttctattactttgtaggcttgttgaggcggcggcggacgaccgtgacccagcgaagcggtgggatgcaaaccggtcactccttgccgctctggtagaccactggagacctgagacgcacacattccaccttccctgtggggagatggctctgacactgcaggacgtgtcgtacctgctcgggctaccactagcaggagccccagttggtcccgtggatggtgtttttgggtggaaggaggatatcaccgcgcgcttcgagcacgcggaccttctgcaccctgacgctgatgattactcggacgtgccgcagtggagctggggttctgccgtgctagcagccacgtaccgtgccctctatgaggcgtgcacgaagaccgacgcgggagcgatcttcgctggttgccctatgttgcttcagctttgggcagccgagaggtttgccataggtcgaccagtggtggacagcgcaccctacggggttggtcgcagcgcgcagtggccagaggacggtcccacgatggggatttactggtgtcgacgtgggcgtcgttacactcacgtccaggtgagacgaggttacctagacttcgtgtttgagtttgaccgtctccagccgagcgatgtcatctgggagccgtacacagaagaggccgtcgctgcgagagcaccgctaggactttcgtccttgtgcacacgcgaccaggcttactggctcaccatcctgccaagggtgtttgacattttcgtcgagcctccctgcccgcggcgtgtgatgagacaattcggactgaggcaggtgtttccgggcaacgtgcagccgaccgtcctccctgccgaccactcgagattcttccaatgcgcgaactttgatcagacatatcgtccaatgtgcaacttcatcgagtgggtagacatggagaacccacaaaacgatggaacacgtgcatacccacgtagtgaaacaagatcggactacctaaggcggaaggatgagcatgaacgtcgaattgctgctgaggctttagaatggcagggcaatccaaggatgtgtggatttactcgatggatcgacaatgtcactccatcatatcatggccagaagataacagagtcagaaacacaagtagagtatcaacgattgaaggaccacgagaatgcaatgcattctgaccgacctaaaaggggccgatag

SEQ ID NO: 4360 - DNA, 3470 bp, Oryza sativa
  Clone ID: PAT_MRT4530_11251C.1
gtaaataccgaggtcagatattgacagcaattgggtgtgatgggaacaaccaggttctacctatggcttttgcatttgtagagagtgagaacactgaaagctggtactggttcctagagagagtgcacattgcagtggtgcgtatgaggcccaacgtttgccttatacatgatcgtcatgcgggtatgttgcgggctattgactacttgcagaacggttgggatgagaagggacttccagctaagtggcctgatgttcggagtcggtggtgcatgcgtcacatgggtgcaaatttctacaagcaattcaagaacaagcatcttatggagctctttaagaggctctgtgcacagaaccaagagaagaaatttaatgagttgtgggacaagttggatgagttgacaacgaagcaaacagatgagcaatctcgcagaccacaagttgaaggtgacgagcctcccatacctcttggtgcattacatgatgacccaccaacaatgagaaggaggtcagggtcggccatcagaaatttcactcagtggattgagaatgagcctaaggagaagtggtctctattgttcgacaccgatggatctcggtatggcataatgacaaccaatttggcagaggtatacaactgggtaatgcgaggagttcgggtacttccattggttgctattgttgaattcatccttcacggcacgcaagcgtactttagggatcgatacaagaaaattggtccgtccatggccgataacaacatagtgtttggcaacgtagtgacaaagtacatggaagataaaatcaaaaaggcacggagacatagagttgttgctcaaggcacacaagtgcatcggtatgaaataatgtgtgttgataggagcaggcgtggtatctatcgcaagcaagccgtgcaggaatgtgtcttgaaggcggatggtggatgtacctgcagttgtatgaagccgaagcttcatcaccttccttgctcacacgttcttgctgctgccggtgattgtggcatatctcccaatgtgtacgtctcaaattatttcaggaaagaagcaatctttcatacatggagtgaggagatatatgggttcgggatctcaggatcttacacaatgctgagtgcccaagttttttatgttccagatccatctaagttaagggtgaaaaagggtcgacgccaaactagacgcatcagaaatgatatggatgagtcagaagtaggtgggaggactttacgctgtagcaagtgtgatctgcgcggccatacttacaagaaatgcccgaagaatgcagaagttccaagcggcgcagatgctagtccatctggacaggcaagtgatggtatggcgtacgacacaccggcgctgttgaaccgtgggattgacaggaaccaccgctcgttcctgttgcgtgcggcaggccttctaccactttgtaggcttgttgaggcggcggcggacgaccgtgacccagcgaagcggtgggatgcagaccggtcactccttgccgctctggtagaccgctggagacctgagacgcacacgttccaccttccctgtggggagatggctccgacactgcagaacgtgtcgtacctgctcgggctaccgctggcgggagcaccagttggtcccgttgacggtgttgttgggtggaaggaggatatcactgcgcgcttcgagcaggtgatgcgccttccacacctaggaccggccaacacccttcctccgtactctacagtcgggcctagcaaggcttggttgctccaattcactgcggaccttctgcaccctgacgctgatgattactcggtccgacgctcccttgaggcgtacctgttgtggttgttcgggtgggtgatgttcactagcacccacgggcacgctgtggacttccggctggtccactacgcacggtccatcgcggatgctcagccacaggacgtgctgcagtggagctggggttctgccgtgctagcagccacgtaccatgccctctgtgaggcgtgcacgaagactgacgcgggagtgatcatcgctggctgccctatgttgcttcagctttgggcagccgagaggtttgccataggtcgaccagtggtggacagcgcaccctacggggttggtcgcagcgcgcagtggccagaggacggtcccacgatggggacttactggtgtcgacgtaggcgtcgttacgctcacgtccaggtgagacgaggttacccggacttcgtgttcgagttttaccgtctccagccgagcgacgtcatctgggagccgtacacagaagaggtcgtcgctgcgagagcaccgctaggactttcgtccttgtgcacacgcgacccggcttactggctcaccatcctgccgatggtgttcgacattttcgttgagcctcactgcccgcagcgtgtgatgagacagttcggacttaggcaggtgtttccgggcaatgtgcagtcgaccgtcctccctgccgaccactcgttgactcgacggggacagctagcaggcgcactttgggctccacgtgtacagcagtacgttgacgactgggtgttagctacagaggaggtgatcaacgagctcttcccacacacggaggagaactaccgtgactaccttcgctggtaccttcctcgcactcgtgcgcgtgtgaccttcactccagacgccccagagccgcacgttgccgctgtcacggacgcgtatcccacgcaccgtgaccaagactacttcgtgggggctgatgccgcacgggatatcagtgccgatatcaccgcagtccaagtgaggttgaacagaggtttgcacttgactgacgttgagcagagggtgaccttcgaccggatgcaggagaagatgcgtgcggtcatgcgcgtcttctcctgtcgcagcgccgtggacgtcgtacctccagctggtccggtacaaccacggcctcgcgcgcctaccgtcggagcaggacctcgacctacggcacctatttcgcacggacctcgtctgccttcgagcgcgttcgcaggcacgaccggcgcttccgcgagctccgcaggggcgttcgccacctcttcgggcgcgttcgccagctcttcctcttacggagcgtcgatccctcgcccacacgcaggatttgcagccgggatcttcggtactggggcctcttcgtctcacgccggtaggactagtcctactagccagttctacgacgacgacttgcacggtgcacaccaccacgacgtactaggctcctctcagcttggaggagctccagaggcgcacactcaggagcagccagagggcaatccaaggatgggtggatttactcgatggatcgacaatgtcactccatcatatcatggccagaagataacagagtcagaaacacaagtagagtatcaacgattgaaggaccacgagaatgcaatgcattctgaccgacctagaaggggccgatag

SEQ ID NO: 4361 - DNA, 448 bp, Oryza sativa
  Clone ID: PAT_MRT4530_11252C.1
catcagaagacatgaagcattttattagtagtagcaattttctgtttcttaattgaattagcttctgaaaaccaagaaataatggctacagtaacacacgccttttcttttcagtaaaatcactgaaaagggttacgctactactacagaagaaaacagctgaattggtagcataactattggctatggctaacggctgtaatttagagagcatgaaagggaaatgcgcacccgatgagatccttcattccttgctttctttagttctcttcttttgacgacagctccagaagatgttctgcctccctcaagaacaactttgtcagctgcttttggcctctgcggtacactatgcacgtcctaatatttacttttgacttggtctcggtgctctcgtcacttctcgttgcggcttctgaatcactgagatcgaatttctcaagtagtt

SEQ ID NO: 4362 - DNA, 270 bp, Oryza sativa
  Clone ID: PAT_MRT4530_11253C.1
atggcggcacgggagaggaggagaggtggccgccggcgcgacggtgccgcttcacccacggcggcgccatcgctcgagtcctccgtcggcgtcccgttcctctgggaggaggctcccgggaggcccaaggcggtggtggctgtgcctcgtcctcatgacgtggtcggaggagtcgcaacgccgtcatgcgctccggctgccgacgacgagagggcacctgtttctcacggcggcgacagtgacaaggcgcgcacgtcatcgcgccgctga

SEQ ID NO: 4363 - DNA, 289 bp, Oryza sativa
  Clone ID: PAT_MRT4530_11254C.1
tcgtttttcatccaatgattattgcatctcatggcgggtttaaatacacggggcataaccatctagattgcactcgaatatgctgggggcttatcggctgcggaagggcatgaaactatacttctagagacacacgcggcattcagccagttgggaacacttacatgctggaactactgatgcagataacacccacatgtctacctttttacggtggacctctcaagctgcaacatctgctgttagctggtgctctacatacgactcatgttctaatacattgtctgtg

SEQ ID NO: 4364 - DNA, 197 bp, Oryza sativa
  Clone ID: PAT_MRT4530_11255C.1
atggcggttccgggcttcctaggaggaattctggaggagtaccggagctgtcggtacactctgctccgggttcggagaacttcttctgttaaaggtaggcggcaggtggtgacagccctgaatctcatcccagtaatcctccacgtacggatacatcatagagctatagccggaaccacgctggcagaccagcaggg

SEQ ID NO: 4365 - DNA, 442 bp, Oryza sativa
  unsure (1)..(442): unsure at all n locations
  Clone ID: PAT_MRT4530_11256C.1
tcggttcagctctgaccgagcagagggccggaacggggtgatgctgcccgaccggattatcgtttggctttacccggacgtgattcgatgtgctgatgaatatccggaatgggccaaccactttttgagagaacacgatcgggcaatggtccaggtcgaacgcgtggtgcaaaccattctgaagtcccggcgctttgaggagtactatcacgccgctcgtctgcccaaccatccaatcgaagagcggttcactgccctggcgaaggcgcgcgctgtgaccgtcatttgccgcttcaaaaattggattgctccgccgcagttgccgtgcagcggtctcgtcaacctgatgaagcgcgaccccgccggacgcattcccttctcatcgttntgcggagtggtgacgaatgtgctgccggccatagaccgtcagatcagcacgggc

SEQ ID NO: 4366 - DNA, 666 bp, Oryza sativa
  Clone ID: PAT_MRT4530_11257C.1
atggagacacgcatcacgccgtcgctcattatatttgatcatgctcttgatctagcgtcggacttggagacatgtcggccgtcgttcagcatcgttgttgggcatgccgtcggccttgcgtcaggaaaccaccgtcccggagaaagcccccaaacccatgtggtcattgccactggagttgataccgaagcgagccgccgcgccaccgtttacctccaatcgatgcagcagtcgagccatggtgggaggatgatgggtcgtcagccgcttgctactggattgatcaccgccgagatgacatggtcggatgcgccccggcccggcgcatcatcatcgtcgtcgtcgtcattggcagccactggcgcgctgccccggcaggagccgaccgtgcggggcaataattcccccggaaagcaagctgcccgcggccgcggcgcacccacgtccctgccgctgccacagtgccacccgacgctgacgcgagtcaggaaacccggccgcctgtctgtctccggtggtgacatcgcgacacgacccaccggaggtagtgcaaccaccgagcagagcagagttgggcgagccaagcaggcgggagccgggaaacgttatgcaaaccacttgccaatgtgggtgtgtggaggcttcggcaacaacggcagcagctag

SEQ ID NO: 4367 - DNA, 1214 bp, Oryza sativa
  Clone ID: PAT_MRT4530_11258C.1
acaacgaatgacatagagtatgtccagatttatagtattaggatatatcacccaggctcccagcgccaccaccaccaccactagtctactactaccactgcggcggcgtccgcgtccgcctcctccccgcaccgccgcatcgccatcgccgtcgacctctccgacgagtccgccttcgccgtcaagtggtccgtgcagaactacctccgcccgggcgacgccgtcgtgctcctccacgtccgccccacctccgtgctctacggcgccgactggggctccatccccgtctccacgcccacgccgccacgcgcgacgagcccgaggaggccaagaagaagcgggaggaggacttcgacgccttcacctccaccaaggcgcaggacctggcgcagccgctcgtcgccgcgcagatccccttcaagatccacatagtcaaggaccacgacatgaaggagcgcctctgcctcgaggccgagcgcctcggcctgtccgccatgatcatgggcagccgcggcttcggcgcctcgcgcagggcgggcaaagggaggctcgggagcgtcagcgactactgcgtgcaccactgcgtctgccccgtcgtggtcgtgcgctaccctgatgatgggacggggaaagaggatggaggtggggcgaagagggagagagaagcggcgcacccggatctgcgcctccggccaccggaggacaacgacgaaggcttccgcctccgccccgtgcgctgctcgccgtcggccgcctccacccatcggaggacgacggtgcgtgcatcactgtgtctacccggttgtggttgttcgttaccccgatgatgctgcaggtgccgacggggaggcagcagggccaacagatgagctgcacactgtgcctgaggatgaacctgtgtatcatgatgcccctgatgtgcagaaagaaaactgaggtaatgcatctggagcgcaaggaaaacgtgagaggcttgcccgaggcgatctgtgtatttgaacaatgcaactactgtttagctgttggcctgttgcttctgtatctactggatatcataaactggcttgaccagcaagctgcttttcattttgcgtgaagtattggactctttagatcaggggagtttgttggtttactttgtaaactgatacagtccagtatccccgtgggtggtggagaaaggagctgtgtatgggatgttttcgttggtcccg

SEQ ID NO: 4368 - DNA, 138 bp, Oryza sativa
  Clone ID: PAT_MRT4530_11259C.1
atgcggcatgctgccgagatcaagtacatgatccggcacatttccctgacagacttgttcggattgaattatgactttgaggttcttgctgaacaatttgttttcagtcaaagttcgattactgaagttaaagactga

SEQ ID NO: 4369 - DNA, 1686 bp, Oryza sativa
  Clone ID: PAT_MRT4530_1125C.1
atgtctagctttctggattggccgcagagcttggaaatctcatgggattcacaagcgttatgcaagcgtgcagagagttgcgagttggaggcagaagtaccctctatcaatcctactttgcttccagttctcgaggatttacttatagaattatatgcaatattgcgtccaaagcctgatgactatgagcaacggcatttgatgatcgatgtcttcaacaaaatagcagaagagatatatggtaaaaagaaggggtttccagttgtggaagcatttggatcgttcacaatggatctatttacttccaaaagtgaccttgacctctctgtcaactttaatgctgattttcatagtcaatttgctcgcaaggacaagatttctgttattcggaacctcgcaaaagttctatatgctcatcagaggaatggccgttgtcatggggttttacctgttgtaactgctaaagttcctgtactgaaggttattgataagggaactggggttgagtgtgatatttcagttgagaacaaagatggcatgtcaagatcaatgatatttaaacttatttcatccattgatgaaagatttcagatactatgttatctgatgaaattctgggcaaaggcacatgatgttaattgccccagagatcgaacaatgagctcaatggcgattatctctttagttgctttccatttacagacccggcgacctccaatcttacctgcattttctgccttgttgaaagatggtccagactttccaagtattcagagaaatgtctcactagttgaggggtttgggagcagaaataaagaatcagttgccgagctttttgtgtcacttatgagtaaactactatcagtggagggtttatgggagcaagggctctgtgctagcaattttgaagggtcatggatctttaagacctgggaaagaggagttggtaacttgagtgttgaggacttcttggaccggtcacagaattttgccagagcagtaggcaaggaggagatgcagaaaatcagcgaatgcataagggtcgctgttttgaatttgaacaatttctttaggggtaaaattgatgcaccaaagctgaagaaccttttgtttgagccgcctcatcaggatgagctgatcagtaatcccagtctaaagcgtcctaagaggaaggaccacccaacgcatggcccagaaagcaacccacagcagcaaaagaaagcgaagcatattattggcccagaaagcaaccagaagcagcaaaagaaagtgaagcatactgtaaaccctggaccggccgctagtagatctgccactaatttacaccgtcctaccgcatttgtgcctcaaatacggcccatccaaccaattaatcaggtttcccacatacctcaacctttggttgaccctatgtttgcttatgggttaccaccacaacagcatctacattcagctcccctttattgtcaggggttactaggtcaacagcaggagcaacctcatggacaagaaatggcaacatctgcactgctgctggtgataggtatggatgagctgttccaggtttgttgggtatcagctgataaactgggactgttccagatgcacatcatcgaaagagaagttctctttaatttctacacctgcaaagacaaagctatccttgtcaaacaggcaaagttgtag

SEQ ID NO: 4370 - DNA, 182 bp, Oryza sativa
  unsure (1)..(182): unsure at all n locations
  Clone ID: PAT_MRT4530_11260C.1
anacccaacacctatctttatgcgggcgcttttttaataggtgggttcccccctccaacaataataatgaattttgaagctccaatcaataaaccaaccattctaacatatttcattttaccatgtatccatttattttttgaaccgaaacagtcaactatcacaacacacttatattattt

SEQ ID NO: 4371 - DNA, 336 bp, Oryza sativa
  Clone ID: PAT_MRT4530_11261C.1
atggccctccagcttcaggtcgtcttcaccgataatcttcgagctttctgccctgtttcaacttcactctcgacgacgggagcgacgggacggcggggcagcggtaggaacgtcggcgggatcacagagcggcgggagctcgacgggagcgatagagcagcgggagtggcggggcggcgggagcggtggggcggcgggacaggcggggcagcgggagctcggcgggagcgcgacattgccgacaaccttgccggcctggaaggaggagctcgtcagccggccacgacgcgcgtggggaggagatcgtcggtcggctgcgcgcgggtcctgtggtaa

SEQ ID NO: 4372 - DNA, 495 bp, Oryza sativa
  Clone ID: PAT_MRT4530_11262C.1
ttgacaaaggagagagaaatcactttcgatcatagggtagtttcatatgtcaatgagattaccttgaaggaagtggtgaaagaaggcgtgatcccggcaaaagaaatcatcggatggcgtccagcccatggtgaggagttcccgactccaaacaccatcgagattgtggtatttacccctttgttctctagtagcttctgtcttccgacatctaaattcttccgtggtcttgtttacttttatgggagtaagatatatcatcttaaccctaattttatcaatcactttgccatctttgttcgtctctgcgaagtatttcttggaatccatcctcatttcatcctcttccgtggaatgttttacctgaaagcccagtcgactaaagaaaacccttgcatcatcggcagctcttgttatcaactacgtggagctctccgcaaacgcaaagactatttttcccttcttcgaaaacttgcaagaaaggctggcattcct

SEQ ID NO: 4373 - DNA, 315 bp, Oryza sativa
  Clone ID: PAT_MRT4530_11263C.1
atgcagctcaacccgaaagcaagaactcgtcgaaataaaactaaagcaaaagggactctacccacgcgcggcaatcatcttgaagcatatcaactcaacccgatgtcgcacaccgagtcgtattgtcggattcggctctatcggcttaccccgtccgactcggaccctgccgatcttggccgtagccgacccggactccagccgattcttactctgttcccgaatcgatctccgcctttgactccgcttcgttcttatcctcttctccgatgctgatattaccaaattcggtagcctcgtctttcgtttaaacaa

SEQ ID NO: 4374 - DNA, 2397 bp, Oryza sativa
  Clone ID: PAT_MRT4530_11264C.1
atggaggagaaactgcaacggctccttcttcgggtccagatcatcttggaggaggcagaggaccgacatatcgcaaaccaagccatgctgcagcaactgaacatactgaggaaggagatgtacagagggtattacatcctggacaaattcagataccatgaccgtgaagaagaaaataccaaagatcaccaagtgagtaactctttcgcaccatccaagttcaatcctgccaagcgcattcggttctgcaggacaagtggccagagtttacaacagcagctgcagcaagttcttgccagccttgaagccaccattgaagataccagtgaatttttcatgttcctgaacagttatccacgcttgaaccgtcagccatatagcacgcacttggtcttagacaagtgcttgtttaatcgccagatggagatggagcacatcatgaacttcctgcttaaagacaatacaagtagtaatcaaaatccaggtgtcttgccaatcatcggtccaagcaatgttgggaagagcacgctgattgagcatgcctgcaatgatgaaagggtgcgtaaccacttctttcaaattgtgtgtttcagtgttgatgatcttgaagatgcaaacatggtgcgtacatttggaagcatggatgcagcggagcacccaaagctggaatcaatagccgtggatatggccatggaattgaatgggtgcttcatgggttcaaatgtttacagtgtacttcttagagaaaatttcaatgataagttttggagcatggccctggcaagaatcagagaattcaggaagctgaatctcttactctgcggtacaagtaattttgacgatccttggcagggtgttggacctgcatacgttaggagggaagaagagatctcagaagctttccacctgaccatctcagatgctgatgcaggggagcgttgccatgttgggccaaagcaaaatgagcattgtagatccttctccttcttgatagacagatgctactccaaactgccattgctgtccaacgaggagaagattcagagactcgaaaggatgctgcaccggctcgctgctgccatcgaagaggccgatgggaggagaatcttgaaccatggaatgcttcgacatatcaacattctgagacaagacatgtacagagggtactacattcttgactccttcagattccctgaagcccacgaggaggagatcatgagcgaaaacaatgacaaagttattgacaacctagagatcgccatggctgacatggttgagttttttctgcttttgaacaactacccttccattcatcgtcagccatacaacagttacctgttcatggacaagtgcatgtttgggcgtcaaatggagatggagcatatcatcaatttcttgttgcgtcctgaacctccaaacacgctaagtgttgataaccttggtgtcctgccgatcattggtccagccaaagttgggaagagcacacttgtcaagcatgtttgcggcgatgagagggtgtgcaaccacttctctcgcatcctttttcttactgagggcgattttagagaggaaaaatcattgcttacactaagggattcaggagagataaggcatatgcacacatcatcatcggtttcaagtggaggagaaagattgttagtcatcattgagttagctgaggatgttgctgatgataaatggacaatgatgtgcgcttctttgcgaagttgcatttcagctggaagtaaaatcataatcacaagccggttagagaagatcgcaaagcttggaacaacacaacctctacgtctgaagtttttgtcgcgagaagcttactggtacttctttaaggtgctcgcattcggaagctcagatcctaaagaacaccctgagttagcatctgtatcaatgatgatgttcaatgtctactttgatcatgaattgtacaagaatttcactggaccattcatggacctaaatatcatggccagcttgatccaagctacattttatgagggcaactggctcagcctccatgcacacaccaggagttattttctgcttaggagaggtttaggtgatgattttgagttgaagacgaagtgcgtgcctattcccaagaaaaatacagttgtgcaacagtattgtgtaatttccgactattgccgagtaggggttgctcatgaagaagatcagaaggttcccaaaattgacatgcaagatgtcttgtcagggagagttgcacctgatgggagatttgatgttgtgctatggagatctcacctgccgccatattacagctacatatatagctggactgctaaagttgcagtcacaactgcaactgcagtcgatcctggtgaacagatgctcactgctcatttccgatgcacataa

SEQ ID NO: 4375 - DNA, 390 bp, Oryza sativa
  Clone ID: PAT_MRT4530_11265C.1
atgggtggcgacctcgccggagctagagtggtcggccggggttttggaggacacctacacgtagaggacgacgagacgaacccaacgatactcaccaacgcgacgaacgacgtcggacgacggtcggcgacgagaggaggcgacggcggcgactcggtcgtcggcggcggcgactctccggtgaccggcgacggcggggagggggcggccgagcttcccctcttccacgcgcacccgatggcggcgagaggaagcggcggcgacggccaaaacgacggcgcgaggcggctgttcgtcggccggcgacggcggcggctaagacgacgtggcggcggctctacggttgacgagagagctcgggagagggggcaaacgaaagaggaggactag

SEQ ID NO: 4376 - DNA, 176 bp, Oryza sativa
  Clone ID: PAT_MRT4530_11266C.1
gggaaggtgcggtgcgagtactgctttggccccgcgctggcacccgggccctcggggccggagacggcgtagcgtgcaggacctgcgtgcggcgcagggcgaggaccccccccaggagggaggagatgagagcggcggcgcatcctctggcgccgctgtagagatccaagctgacg

SEQ ID NO: 4377 - DNA, 528 bp, Oryza sativa
  Clone ID: PAT_MRT4530_11267C.1
atggcggcggcgagcccgccggccgaggcgaagggcgaccgcctgatggctcaggcgcggcgggagctcacggggttctggtcctgcctgttgcccgccagcgccacctactcgtacgccgccggcttcttcgaggaggccgccaaagcctatcgtctcgccaagaattggagaaaagccgcgttggcacatcacgaatatggcacgtactgtataaagatgggtcgagattgtaggctggcagctgcggtggtgctatgggaatcggcggaatgccacatgcgggatttcgacccggacgacgagcaaaccgcacgcgccatcgagagcgacctgaagaggtcggtgcgcatgctcgtcctggagaaccagccgcagctggcggcgtccgcctgcgaggagctagcccggatgtacgtggcgcggaggcgagggagtggtacgagcgagccgcggggtactgcatccagctctgcaggcccagggctctacaggaagccgtctccgccgccgtcagaggagcagtag

SEQ ID NO: 4378 - DNA, 108 bp, Oryza sativa
  Clone ID: PAT_MRT4530_11268C.1
atggtcgatgaagccatgcatagagtagctgcggtcgatgtagctgaagtcggtggtgctgatgacgagacaaagatggtgacactggagaacaaggtatcacaccag

SEQ ID NO: 4379 - DNA, 2178 bp, Oryza sativa
  Clone ID: PAT_MRT4530_11269C.1
atggagagggaagattcggataatgagcaagcggaggacgacgcatcatttgatgaggaaggtgatgtaatggccactgattgggcaaatgaggacttctctggacttgctatatcagagggtgatcatgtaccctgggagtataaggagaacgaggtaattgagggtgctaggtatgctcataaggatgagatgaaggaggcagtgaagcattgggtagtttccttgcagagagagtttagggtggtcaagtcaacaaattatgtgtatgaagtgaggtgcatgaaggaagactgtctgtggcgtgtccatgcatataagggtaaatggaatgattattggaaagttagcattgtgaccgagcaccagtgctacttacaaggggtggagaagtatcaccgaaacatcacttcaacttttgtggcaagtgagatgtatagcagtgttgttggtaacattggctttgaaccaaaatcaattattagccacatcgagaacaaattcaagtacaccataagctatgcaaaggcctggagagccaaacaaaagattattgagataagatggaacatttttgacagcacccacgggcacgctgtggactgccggctggtccactacgcacggtccatcgcggatgctcagccacaggacatgccgcagtggagctggggttctgccatgctagcagccacgtaccgtgccctctgtgaggcgtgcacgaagaccgacgcgggagcgatcttcgctggttgccctatgttgcttcagctttgggcagccgagaggtttgccataggtcgaccagtggtggacagcgaaccctacggggttggtcgcaacgcgcagtggccagaggacggtcccacgatggggacttactggtgtcgacgtgggcgtcgttacactcacgtccagcgtgtgatgagacagttcggactgaggcaggtgtttccgggcaacgtggagccgaccgtcctccctgccgacatctcgttgactcgacggggacagctagcaggcgcactttgggctccacgtgtacagcagtacgttgacgactgggtgttagctacagaggaggtgatcaatgagctcttcccacacacggaggagaactaccgtgactacctccgttggtaccttcctcgcactcgtgcgcgtgtgaccttcactccagacaccccagagccgcatgttgccgctgtcacggacgcgtatcccacgcaccgtgaccgagactacttcgtgggggccgatgcttcacgggatatcagtgccgatatcaccgctgtccaagtgaggttgaacagaggtttgcacttgactgacgttgagcagagggtgaccttcgaccggatgcaggagaagatgcgtgcggtcatgcgcgtcttctcctgttgcagcgctgtggacgtcgtacctccagctggtccggtacaaccacggcctcgcgcgcctaccgtcggagcaggacctcgacctacggcaccggtttcgcacggacctcgtttgccttcgagcgcccctagcgtcggagcagtgcgtcctacagcaccggtttcgcacggtagtgctcagcccagaggacctcgtctgccttcgagcgcgttcgcaggcacgaccggcgcttccgcgagctccgcaggggcattcgccagcgcttccggcgcgttcgccacctcttcggtaggatttccagccgggattttcggtactggtgcctcttcgtctcacgccggtaggtctggtcctactagccagttctacgatgatgacttgcacggtgcgcacgaccacgacatactaggctcctctcagcttggaggagctccagaggcgcacactcatgagcagccagaggtcacacctgtacagacatatcttccaatgtgcaacttcatcgagtgggtagacatggagaacccacaaaacgacggaacacgtgcatacccacgtagtgaaacaagatcggactacctaaggcggaaggatgagcatgaacgtcgaattgctgctgaggctttagaatggcagggcaatccaacgatgtgtggatttactcgatggatcgacaatgtcactccatcatatcatggccaaaagataacagagtcagaaacacaagtagagtatcaacgattgaaggaccacgagaatgcaatgcatattgactga

SEQ ID NO: 4380 - DNA, 303 bp, Oryza sativa
  Clone ID: PAT_MRT4530_1126C.1
atgaggtggctctctagagggggggggggtcaaggagggcctgtgcgcctgggcctttggctccatgtcattcccgcactcgtcgcgctgcagcgtgagggccatgccagcactgatgctctgccacacactgcgcttgggatgagcacaacgtggaccatctccagattcctaacgaggagggcgccgcagagcacaggctattgttgtcggtctcacagccatgccatgccacgctgccatacctccaccgcccatgtcatgactaccacggcgtcagagcgatatgcgagccacacatga

SEQ ID NO: 4381 - DNA, 480 bp, Oryza sativa
  Clone ID: PAT_MRT4530_11270C.1
gaaccgaactacagtaggaggaggatagattaatttgcacatagcaaaagaggagatacacaacttgagtacttgaaattacaatgtatgtgatcagataaaaacagtagtacatcaaactatgagaggaacgtcgactccacactaattactaacaaagcaggcatgtggctaacatgcgagcccatcagaaacaggttgttgtgaattgagattttgtcagtgagaatagctgatgcaggatacgacctgatcttgaatgtaattgccctgatgaccacctggtggtagatggcagcaagggcaccgccaatgaaggagccaacccagaagatccaatggtcataccaggcatgtcccgtgctgaagatgatggcagcgccaaggctcctcgctggtttgatgccgccgccggagatggcgatggtgtacagggaaaccaagaacaccggagacccgattggcagagtggcaaggatc

SEQ ID NO: 4382 - DNA, 1326 bp, Oryza sativa
  Clone ID: PAT_MRT4530_11271C.1
atgtcaagtaaggtcacatttcagatagttcacggtgaaggaaatattagatttggtccagatggtgttgatctgtcagattttgtaatgacatctaagggcatcgataggcctgcggagagaacatttcagtcaatttatagttggttgttgagaggatttagaatagaccaagaagtctacacaatgtcagtgtcagttgtagtgagtcgtgcaacagaaggttatttttgggaactaatgccgatggacagcactgatgcttggagacggtatgtggaaatggcttttgaacggtcatggcccctcgttatatttgtgtcggtacaagagaaagatataaatgtttcaatgcaaaccgaagatgtagagggtcctatcaatgcaggggatgttgttggaccatcgatgcaaaatgaggaaaatcaaccaagggaggagcaggctatgggcatggcggatgagggggagagagtcggtataattgttgatgaaatggagagggaagattcggataatgaggaagtggacgacgacgcatcatccgatgaggaaggtgatgtaatggccactgattgggcaaatgaggacttctctggacttgttatatcagagggtgatcatgtaccctgggagtataaggagaacgaggtaattgagggtgcaagatatgctcataaggatgagatgaagaaggcggtgaagcattgggcagtttccttgcagagagagtttagggtggtcaagtcaacaagttatgtgtatgaagtgaggtgcatgaaggaagattgtccgtggcgtgtccatgcatataagggtaaatggaatgattattggaaagttagcattgtgaccgagcacaagtgctacttacaaggggtggagaagtatcaccgaaacatcacttcagcttttgtggcaagtgagatgtacagcagtgttgttggtaacattggctttgaaccaaaatcaattattaggcacatcgagaacaaattcaagtacaccataagctatgcaaaggcctggagagccaaacaaaagatcattgagatgaggtatggcacatttgaagcttcttatgataatttgcctcgtttgttagccaccattgcccagaggaataataatatgtactatgacctacatacatttacatcggttgatgatcgaacaaagagtgtgccgtacccccggaccgactcacgtactcccacgggcacattagggcgcagggtaggagggacaggggtaagaggcctcgtcagtagtgttctacctcttcagtccttatgtgaccgtttcttttggcttacaaacttgtaa

SEQ ID NO: 4383 - DNA, 310 bp, Oryza sativa
  unsure (1)..(310): unsure at all n locations
  Clone ID: PAT_MRT4530_11272C.1
aacatagaacatgtcttgccactttttttcgccgggaaggccaaaggaggccatccgaatgcattaaggagaaaaagttacaagaaaaaacacaacagaaagctgtcgaggacggatgcgcaccacaggngtcacgtcctaaaannccacacgcttaaccnatcaaaagcaccaaacccactganngtgaagcctttagcacccaaaanccgacccttcgccttanntgcgtggcnttgatcgccccgctaggnnncccacgacaaccccaccacaaaggaccgagaactttcggaaaaacgattgccca

SEQ ID NO: 4384 - DNA, 690 bp, Oryza sativa
  Clone ID: PAT_MRT4530_11273C.1
atggctccgacactgcagaacgtgtcgtacctgctcgggctaccgctggcgggagcaccagttggtcccgtcgacggtgtttttgggtggaaggaggatatcactgcgcgcttcgagcagcgtcgttacgctcacgtccaggtgagacgtggttacccggacttcgtgttcgagtttgaccgtctccagccgagcgacgtcatctgggagccgtacacagaagaggccgtcgctgcgagagcaccgctaggactttcgtccttgtgcacacgcgaccaggcttactggctcaccatcctgccgatggtgttcgacattttcgttgagcctcactggccgcagcgtgtgatgagacagttcggacttaggcaggtgtttcccggcaacgtgcagccgaccgtcccccctgccgaccactcgttgactcgacggggacagctagcaggcgcactttgggctccacgtgtacagcagtacgttgacgactgggtgttagctacagaggaggtgatcaacgagctcttcccacacacggaggagaactaccgtgactaccttcgctggtaccttcctcgcactcgtgcgcatgtgaccttcactccagacgccccagagccgcacgttgccgctgtcacggacgcgtatcccacgcaccgtgaccgagactacttcgtggcggacaactactga

SEQ ID NO: 4385 - DNA, 2199 bp, Oryza sativa
  Clone ID: PAT_MRT4530_11274C.1
atgtcaagtaaggtcacatttcagatagttcacggtgaaggaaatattagatttggtccagatggtgttgatctgtcagattttgtaatgacatctaagggcatcgataggcctgcggagagaacatttcagtcaatttatagttggttgttgagaggatttagaatagaccaagaagtctacacaatgtcagtgtcagttgtagtgagtcgtgcaacagaaggttatttttgggaactaatgccgatggacagcactgatgcttggagacggtatgtggaaatggcttttgaacggtcatggcccctcgttatatttgtatcggtacaagagaaagatataaatgtttcaatgcaaaccgaagatgtagagggtcctatcaatgcaggggatgttgttggaccatcgatgcaaaatgaggaaaatcaaccaagggaggagcaggctatgggcatggcggatgagggggagagagtcggtataattgttgatgaaatggagagggaagattcggataatgaggaagtggacgacgacgcatcatccgatgaggaaggtgatgtaatggccactgattgggcaaatgaggacttctctggacttgttatatcagatggtgatcatgtaccctgggagtataaggagaacgaggtaattgagggtgcaagatatgctcataaggatgagatgaaggaggcggtgaagcattgggcagtttccttgcagagagagtttagggtggtcaagtcaacaaattatgtgtatgaagtgaggtgcatgaaggaagattgtccgtggcgtgtccatgcatataagggtaaatggaatgattattggaaagttagcattgtgaccgagcacaagtgctacttacaaggggtggagaagtatcaccgaaacatcacttcagcttttgtggcaagtgagatgtacagcagtgttgttggtaacattggctttgaaccaaaatcaattattaggcacatcgagaacaaattcaagtacaccataagctatgcaaaggcctggagagccaaacaaaagatcattgagatgaggtatggcacattgaagcttcttatgataatttgcctcgtttgtaaataccgaggtcagatattgacagcaattgggtgtgatgggaacaaccaggttctacctatggcttttgcatttgtagagagtgagaacactgaaagctggtactggttcctagagagagtgcacattgcagtggtgcgtatgaggcccaacgtttgccttatacatgatcgtcatgcgggtatgttgcgggctattgactacttgcagaacggttgggatgagaagggacttccagctaagtggcctgatgttcggagtcggtggtgcatgcgtcacatgggtgcaaatttctacaagcaattcaagaacaagcatcttatggagctctttaagaggctctatgcacagaaccaagagaagaaatttaatgagttgtgggacaagttggatgagttgacaacgaagcaaacagatgagcaatctcgcagaccactagttgaaggtgacgagcctcccatacctcttggtgcattacatgatgacccaccaacaatgagaaggaggtcagggtcgtccatcagaaatttcactcagtggattgagaatgagcctaaggagaagtggtctctattgttcgacaccgatggatctcggtatggcataatgacaaccaatttggcagaggtgtacaactgggtaatgcgaggagttcgggtacttccattggttgctattgttgaattcatccttcacggcacgcaagcgtactttagggatcgatacaagaaaattggtccgtccatggccgcaggcacgaccggcgcttccacgagctccgcaggggcgttcgccacctcttcggcaggatttgcagccgggatcttcggtactggggcctcttcgtctcacgccggtaggactggtcctactagccagttctacgacgacgacttgcacggtgcagaccaccacgacgtactaggctcctctcagcttggaggagctccagaggcgcacactcaggagcagccagaggtcacacctgtacaggcaggacgggttggccgtgccgtacccccggaccgactcacgtactcccacgggcacattagggcgcagggtaggagggacaggggtaagaggcctcgtcagtag

SEQ ID NO: 4386 - DNA, 2805 bp, Oryza sativa
  Clone ID: PAT_MRT4530_11275C.1
atgtcaagtaaggtcacatttcagatagttcacggtgaaggaaatattagatttggtccagatggtgttgatctgtcagattttgtaatgacatctaagggcatcgataggcctgcggagagaacatttcagtcaatttatagttggttgttgagaggatttagaatagaccaagaagtctacacaatgtcagtgtcagttgtagtgagtcgtgcaacagaaggttatttttgggaactaatgccgatggacagcactgatgcttggagacggtatgtggaaatggcttttgaacggtcatggcccctcgttatatttgtgtcggtacaagagaaagatataaatgtttcaatgcaaaccgaagatgtagagggtcctatcaatgcaggggatgttgttggaccatcgatgcaaaatgaggaaaatcaaccaagggaggagcaggctatgggcatggcggatgagggggagagagtcggtataattgttgatgaaatggagagggaagattcggataatgaggaagtggacgacgacgcatcatccgatgaggaaggtgatgtaatggccactgattgggcaaatgaggacttctctggacttgttatatcagagggtgatcatgtaccctgggagtataaggagaatgaggtaattgagggtgcaaggtatgctcataaggatgagatgaaggaggcggtgaagcattgggcagtttccttgcagagagagtttagggtggtcaagtcaacaaattatgtgtatgaagtgaggtgcatgaaggaagattgtccgtggcgtgtccatgcatataagggtaaatggaatgattattggaaagttagcattgtgaccgagcacaagtgctacttacaaggggtggagaagtatcaccgaaacatcacttcagcttttgtggcaagtgagatgtacagcagtgttgttggtaacattggctttgaaccaaaatcaattattaggcacatcgagaacaaattcaagtacaccataagctatgcaaaggcctggagagccaaacaaaagatcattgagatgaggtatggcacatttgaagcttcttatgataatttgcctcgtttgttagccaccattgctcagaggaataataatacgtactatgacctacatacatttacatcggttgatgatcgaacaaagagtgtgctgcaaagagcctttttctcattgggtgcttgcatcaatgcttttgtgcattgtcgacctgttctatgcatagatggaacttttatgacaggtaaataccgaggtcagatattgacagcaattgggtgtgatgggaacaaccaggttctacctatggcttttgcatttgtagagagtgagaacactgaaagctggtactggttcctagagagagtgcacattgcagtggtgcgtatgaggcccaacgtttgccttatacatgatcgtcatgcgggtatgttgcgggctattgactacttgcagaacggttgggatgagaagggacttccagctaagtggcctgatgttcggagtcggtggtgcatgcgtcacatgggtgcaaatttctacaagcaattcaagaacaagcatcttatggagctctttaagaggctctgtgcacagaaccaagagaagaaatttaatgagttgtgggacaagttggatgagttgacaacgaagcaaacagatgagcaatctcgcagaccactagttgaaggtgacgagcctcccatacctcttggtgcattacatgatgacccaccaacaatgagaaggaggtcagggtcgtccatcagaaatttcactcagtggattgagaatgagcctaaggagaagtggtctctattgttcgacaccgatggatctcggtatggcataatgacaaccaatttggcagaggtgtacaactgggtaatgcgaggagttcgggtacttccattggttgctattgttgaattcatccttcacggcacgcaagcgtactttagggatcgatacaagaaaattggtccgtccatggccgataacaacatagtgtttggcaacgtagtgacaaagtacatggaagataaaatcaaaaaggcacggagacatcgagttgttgctcaaggcacacaagtgcatcgggtcgacgccaaactagaggaggtgatcaacgagctcttcccacacacggaggagaactaccgtgagtaccttcgctggtaccttcctcgcactcgtgcgcgtgtgaccttcactccagacgccccagagccgcacgttgccgctgtcacggacgcgtatcccacgcaccgtgaccgagactacttcgtggcggctgatgccgcacgggatatcagtgccgatatcaccgcagtccaagtgaggttgaacagaggacctcgtctgccttcgagcgcgttcgcaggcacgaccggcgcttccacgagctccgcaggggcgttcgccacctcttcgggcgcgttcgccagctcttcctctcacggagcgtcgatccctcgcccacacgcaggatttgcagccgggatcttcggtactggggcctcttcgtctcacgctggtaggactggtcctactagccagttctacgacgacgacttgcacggtgcagaccaccacgacgtactaggctcctctcagcttggaggagctccagaggcgcacactcaggagcagccagaggtcacacctgtacaggcaggacgggttggccgtgccgtacccccggaccgactcacgtactcccacgggcacattagggcgcagggtaggagggacagggcaaaccaaatatga

SEQ ID NO: 4387 - DNA, 567 bp, Oryza sativa
  Clone ID: PAT_MRT4530_11276C.1
aacataccgggggggggtttttttttcgaaacaaagggcctgggccgggtaaattttggggatcaccaagggcttttcccgccgggaagaattttcccgggagggaacccctccctcaggaaaaaaacaaaaaagggggcgttttttaaaaaaggagggaaattaaccagacggcaggaaagatttctggggggccggaaaccccccagcaaaacggggccgggtttggcaaaggtatggggcccccaattgggggcggcatgggacgcctagggggggcctaaaagaaaccccgacccccaggggggagcaaatggccgggggggggggggggggaaaaagcccgaaccgggggggcaacgaaaatccccccctcccggggcccttgaaaaccggcggggacgggggggagggaaaacccggccccggaaagggccagggagacggggtcgccggggggccgaggcccccgaacgcggggagggcgacggggccggtgcacccggcggggcaaagggcggagcccatggtccgggggaagaggggggggtcacaggcgcgggggac

SEQ ID NO: 4388 - DNA, 5248 bp, Oryza sativa
  Clone ID: PAT_MRT4530_11277C.1
gccgttgttaggcccgggctggaagcagcggcagaggaggaggccattgcagcagtccaaggggacgaccgtgtcgcactggggcaggaaggagaatgatgggaagatgagaggcacccctttcccggagacgttggtgaagtggtgcgccaagcaagggcagcgctcgccgttgaggctttcgtagaagaagccggacagcgtctgcggcagcttcttgcggggctcatggtcggcgatgaggttgcgccaggaccggcagacgcgcttgaagcggcacacggagcggacggggaggcggcggaggatctcgacgatgaggtcgtcggtgaggctggccgccgggttccgccgccccatggggagatcctccatctcgggtgaagctgcggagagggtgtcagccaatcaaggcagctcactgggaggcacgaagcattaattgccgcgtggtgcggccgctaggtcacggcagcccccgtgcgctcaccgcggagcacgtcgcacgcgccggcaacctacagccctcgccggcaaagccgcgccgggccgccggctgcctcgccggtcaccgagaagaagaagacctagaagcggcggcgacgcatccccgatgtgggaatgccgttgcagttcagtacacccatgagtccgacctagtcgcctaccgccctctgggagagcgatttttaaaaatcgccctcccggagggcggcgaaaatgacgtggcagacggccgttcgctctcgggcgacggccgtcaacgaaatttgcaggcggcccccttgccgctctccgcgagggcgattttgtactgtgcggggggccgcctgcaaatgggcggcgagggggggcatggaattttgcaggcggcccccttgccgccctccgcgagggcgattttgtactgtgcggggggccgcctgcaaatgggcggcgagggggcatggaattttgcaggcggcccccttgccgccctccgcaagggcgattttgtactgtgctcgtgcagcgccgaaagtgtgttgtcgtgagcataagttgttctagcaccatatgaatgaaaagaactatgtagacgagacaaacacaagtagtaccctgtccctcctaccctgcgccctaatgtgcccgtgggagtacgtgagtcggtccgggggtacggcacggccaacccgtcctgcctgtacaggtgtgacctctggctgctcctgagtgttgtgcctctggagctcctccaagctgagaggagactagtacgtcgtggtgggtctgcaccgtgcaagtcgtcgtcgtagaactggctagtaggacctagtcctaccggcgtgagacgaagaggccccagtaccgaagatcccggctgaaaatccggaccaactggaggtacgacgtccacggcgctgcgacaggagaagacgcgcatgaccgcgcgcatcttctcctgcatccggtcgaaggtcaccctctgctcaacgtcagtcaagtgcaaacctctgttcaacctcacttggactgcggtgatatcggcactgatatcccgtgcggcatcagccgccacgaagtagtctcggtcacggtgcgtgggatacgcgtccgtgacagcggcaacgtgcggctctggggcgtctggagtgaaggtcacacgcgcacgagtgcgaggaaggtaccaacgaaggtagtcacggtagttctcctccgtgtgtgggaagagctcgttgatcacctcctctgtagctaacacccagtcgtcaacgtactgctgtacacgtggagcccaaagtgcgcctgctagctgtccccgtcgagtcaacgagtggtcggcagggaggacggtcggctgcacgttgcccggaaacacctgcctaagtccgaactgtctcatcacacgctgcgggcagtgaggctcaacgaaaatgtcgaacaccatcggcaggatggtgagccagtaagcctggtcgcatgtgcacaaggacgaaagtcctagcggtgctctcgcagcgacggcctcttctgtgtacggctcccagatgacgtcgctcggctggagacggtcaaactcgaacacgaagtccgggtaaccacgtctcacctggacgtgagcgtaacgacgcccacgtcgacaccagtaagtccccatcgtgggaccgtcctctggccactgcgcgctgcgaccaaccccatagggtgcgctgtccaccactggtcgacctatggcaaacctctcggctgcccaaagctgaagcaacatagggcagccagcgatgatcgctcccgcgtcagtcttcgtgcacgcctcacagagggcacggtacgtggctgctagcacggcagaaccccagctccactgcggcacgtcctgtggctgagcatccgcgatggaccgtgcgtagtggaccagccggaagtccacagcgtgcccgtgggtgctagtgaacatcacccacccgaacaaccacaacaggtacgcctcaagggagcgtcggaccgagtaatcatcagcgtcagggtgtagaaggtccgcagtgaactggagcaaccaagccttgctaggcccgactgtagagtacggaggaagggtggtggtcggtcctaggtgtggaaggcgcatcacctgctcgaagcgcgcagtgatatcctccttccacccaaaaacaccgtccacgggaccaactgctgctcccgccagcggtagcccgagcaggtacgacacgtcctgcagtgtcggagccatctccccacagggaaggtggaacgtgtgcgtctcaggtctccagcggtctacaagagcggcaaggagtgaccgatctgcatcccaccgcttcgctgggtcacggtcgtccgccgccgcctcaacaagcctacaaagtggtagaaggcctgccgcacgcaaccaaggaacgtgacgggggtcgacacgcaaccactcgcgcgacgtgcgtggacggaaggtgccgagctgtgcaccctcgactgctgacaggaacgagcggtggttcctgtcaatcccacggttcaacagcgccggtgtgtcgtacgccataccatcacttgcctgtccagatggactagcatctgcgccgcttggaacttctgcattcttcgggcatttcttgtaagtatggccgcgcagatcacacttgctgcagcgtaaagtcctcccacctgcttctgactcatccatatcatttctgatgcgtctagtttggcgtcgaccctttttcacccttaacttagatggatctggaatataaaaaacttgggcactcagcgttgtgtaagatcctgagatcccgaacccatatatctcctcactccatgtatgaaagattgcttctttccaattttctgtgtatcgatccctaaagtacgcttgcgtgccgtgaaggatgaattcaacaatagcaaccaatggaagtacccgaactcctcgcattacccagttgtacacctctgccaaattggttgtcattatgtcataccgagatccatcggtgtcgaacaatagagaccacttctccttaggctcattctcaatccactgagtgaaatttttgatggacgaccctgacctccttctcattgttggtgggtcatcatgtaatgcaccaagaggtatgggaggctcgtcaccttcaactagtggactgcgagattgctcatctgtttgcttcgttgtcaactcatccaacttgtcccacaactcattaaatttcttctcttggttctgtgcacagagcctcttaaagagctccataagatgcttgttcttgaattgcttgtagaaatttgcacccatgtgacgcatgcaccaccgactccgaacatcaggccacttagctggaagtcccttctcatcccaaccgttctgcaagtagtcaatagcccgcaacatacctgcatgacgatcatgtataaggcaaacgttgggcctcatacgcaccactgcaatgtgcactctctctaggaaccagtaccagctttcagtgttctcactctctacaaatgcaaaagccataggtagaacctggttgttcccatcacacccaattgctgtcaatatctgacctcggtatttacctgtcataaaagttccatctatgcatagaacaggtcgacaatgcacaaaagcattgatgcaagcacccaatgagaaaaaggctctttgcagcacactctttgttcgatcatcaaccgatgtaaatgtatgtaggtcatagtacgtattattattcctctgggcaatggtggctaacaaacgaggcaaattatcataagaagcttcaaatgtgccatacctcatctcaatgatcttttgtttggctctccaggcctttgcatagcttatggtgtacttgaatttgttctcgatgtgcctaataattgattttggttcaaagccaatgttaccaacaacactgctgtacatctcacttgccacaaaagctgaagtgatgtttcggtgatacttctccaccccttgtaagtagcacttgtgctcggtcacaatgctaactttccaataatcattccatttacccttatatgcatggacacgccacggacaatcttccttcatgcacctcacttcatacacataatttgttgacttgaccaccctaaactctctctgcaaggaaactgcccaatgcttcaccgcctccttcatctcatccttatgagcatatcttgcaccctcaattacctcgttctccttatactcccagggtacatgatcaccctctgatataacaagtccagagaagtcctcatttgcccaatcagtggccattacatcaccttcctcatcggatgatgcgtcgtcgtccacttcctcattatccgaattttccctctccatttcatcaacaattataccgactctctccccctcatccgccatgcccatagcctgctcctcccttggttgattttcctcattttgcatcgatggtccaacaacatcccctgcattgataggaccctctacatcttcggtttgcattgaaacatttatatctttctcttctgttgcacgactcactacaactgacactgacattgtgtagacttcttggtctattctaaatcctctcaacaaccaactataaattgactgaaatgttctctccgcaggcctatcgatgcccttagatgtcattacaaaatctaacagatcaacaccatctggaccaaatctaatatttccttcaccgtgaactatctgaaatgtgaccttacttgacat

SEQ ID NO: 4389 - DNA, 1242 bp, Oryza sativa
  Clone ID: PAT_MRT4530_11278C.1
atgtcaaataaggtcacatttcagatagttcacggtgaaggaaatattagatttggtccagatggtgttgatctgtcagattttgtaatgacatctaaggacatcgataggcctgcggagagaacatttcagtcaatttatagttggttgttgagaggatttagaatagaccaagaagtctacacaatgtcagtgtcagttgtagtgagtcgtgcaacagaaggttatttttgggaactaatgccgatggacagcactgatgcttggagacggtatgtggaaatggcttttgaacggtcatggcccctcgttatatttgtgtcggtacaagagaaagatataaatgtttcaatgcaaaccgaagatgtagagggtcctatcaatgcaggggatgttgttggaccatcgatgcaaaatgaggaaaatcaaccaagggaggagcaggctatgggcatggcggatgagggggagagagtcggtataattgttgatgaaatggagagggaagattcggataatgaggaagtggacgacgacgcatcatccgatgaggaaggtgatgtaatggccactgattgggcaaatgaggacttctctggacttgttatatcagagggtgatcatgtaccctgggagtataaggagaacgaggtaattgagggtgcaagatatgctcataaggatgagatgaaggaggcggtgaagcattgggcagtttccttgcagagagagtttagggtggtcaagtcaacaaattatgtgtatgaagtgaggtgcatgaaggaagattgtccgtggcgtgtccatgcatataagggtaaatggaatgattattggaaagttagcattgtgaccgagcacaagtgctacttacaaggggtggagaagtatcaccgaaacatcacttcagcttttgtggcaagtgagatgtacagcagtgttgttggtaacattggctttgaaccaaaatcaattattaggcacatcgagaacaaattcaagtacaccataagctatgcaaaggcctggagagccaaacaaaagatcattgagatgaggacctcgtctgccttcgagcgcgttcgcaggcacgaccggcgcttccacgagctccgcaggggcgttcgccacctcttcgggcgcgttcgccagctcttcctctcacggagcgtcgatccctcgcccacacggatttgcagccgggatcttcggtactggggcctctttgtctcacgccggtag

SEQ ID NO: 4390 - DNA, 3453 bp, Oryza sativa
  Clone ID: PAT_MRT4530_11279C.1
atgccgccggcgagaggcgggaggcgtgggagggggcgaggtaggcgaggtggacgcggaggcgccgcctctagggcgcgaggcgagaacgtcgtagacgtcgagccgatcaagctcggtgatgatgatgcgaaggtagatccacagacgaagtcacctaacgaagaaataacaagcgcggaggtttgcgaggtggagacctctgaggctagcccgcttggtgccccggaggaagatgaggggaagccaggttccactaggaacctgaagcgtcttcggaagacgatcacgatcgattccgcagccgctgaggagcatggggcagagagtgacgatgaagagtttgatgttcttgccacagcaagttgccaagagttggctccatgcagaaggtccaagcgcctaaggtgcaaaccaactaggaagaggtccaaaccaactgggaagagggatttgggtggcaaggagagtgaagatgatgtatttgcaaatagctcgagcagttcccaggatgacgccgggaagttagcttctagaagatcaaagcgtctcagggagaggcttacatctgattattttgatggtgatatgaaaattgttcggctccccgccgaggatcaaaacgccttcggaacagactgggccccagaaatatttcatatgctgatgatgatagcgacaccgatgatacatgttacattaactactgaaattaccacagatcgcaagaagattgtcccatgcaggagaacgtcaaagcgcctacaggagaagcggaaagctcatgatgtttcagaggagagttacactgaagcttcgtcttgcatgttgtcgacttcttcttcatcagatgatgaattattgcacaattctataaaacctggcagacgtaattcgggtggacctagttgttcgatctgtaagattggaattgcctgctctttcctcatcaaatgcaagaattccacttgttctcgtagcttccacaccttttgtcttgatcctcctttgcaagagattataggcacctgggaatgttcttggtgcaaaagcaatgcagcaccagcagtcaaggtgacagaagtgttaacatcaaaaaaaatccaaagacttgttggccacagacgaattcttcaggaggcagatttccagtatcaattcctcgtgaaatggcaatctctttctcatcatcatgactgctgggttccgcttgaatggcttcatgtatctgatcctttacgagtacagagctatctaaacaagaactgcttgcctaaggaagtttattcagaggatcaaaggaagcttgagtggtttgaagtagatcatgccattgcatgtcggaggaagttccatcatgaaggtttatgtgatgtcttggctactttccaggataaccaagatttcgacgggtatgagttccttgtgaaatggaagggccttgattactgtgaagctacatgggagccatgttgtaccgatggtgtgcaacaggctgtttctatgcttgtcaggaggcataaaaatgcttcaaaaagagttaacatcagccaaacatgtctagatggatcaaaaatagaagaggtgcactgtggtgctctatatgactatcaacttcaaggtttacaatggttaatagataacttcaaaactaggagaagcgttattcttgctgatgaaatgggtcttgggaaaaccgttcaagttgtttgctttctgtaccacattattaaggaaagtttgactgcatccccagcattgatccttgctccaaagagcatcctcctgcaatgggaaaaggaattttgccagtgggctagtgatcttaatgttattgtttatcaaggagacagagactctcgaaagtgtatccaagtccatgaaatgtactcttctgatgggaaacctttatttgatgctctagtgacgagttatgagtttgtccaaattgacaaggcagttctacagaaattcaagtggtctacaattgtcattgacgaggctcacagaatgaagaagcttgactgcaaccttgcagcttgcctaaaacgatactgctctgaatttcggttgctccttacgggaacaccgttacaaaataacatcatggaactgttttctttgcttcattatattgatccggatgagttctctgatccaaaggctgatggattgttctcaccaattgaatctggaagggatttgacaatggatgaaaaagttgctaggattcacaatattttaaagcccaggatgttgcggagaatgaaatctgatgttctaacagattctatgccagtaaagaagtgggttgaagttccatgtgcacttgcagattcccagagagaactttacattaatattttagagaggaattactcaaagcttaacagtgccattcggaatggcagaaaactttctctgaacaacatacttatggaactcagaaaatgctgcaatcatccagtaggacttgaagttggacagcaagcaactgaagatgtgtttttatcacttattgcttcatcaggcaaacttcaacttcttcataagttgctcccaagattgaaagaaaggggaaatcgtgtactgattttctcgcagatgaccaggatgcttgacattcttgaggattttctttgttccctgggatacaaatatgcacgcatcgatgggcagacatcactctctgctaggcaggagagcatagaagagtacaaaaacattgatagtgaaacatttattttcttgatgtcaactcgtgctggtggcatgggagttgacctgcctggtgcagatagggtaattatatacgatcctgacttcaatccatttatggacttgcaagcacaatctcgggctcatcggatcgggcagacaagaccagtggttgtttaccaactcattacaaagtgttctgtcgaggaaaagatactgcagaagtcaaagcagaagttggccatcgaaaatatgttgatgaactcttccaagaagccaagtgctgatgagttgcagtctatattactccatggagcaaagacaattgtggacaggaagatcagtgcaacatccatccattatgacaatgaagccattgagaatctcctcaagttagacccttccactggtgagaaatgctcgtcggatgataacggttatcttggcagcattgtgagctttgctcatggcgtcgaggatgaagcaccttcttccccaaaggttgaggatctgaaagttctcaagcctgctactcccaaggttgatctcggccgtgggaagaggcaaaggaaagtcgtgaactacgctgacgaggttgagaatgaagacagtgatgatatgtatgccccggaaggttcgtcgacttccgaattcagcagttcgtcctccgatgatgaaactgacagcgctctgcagctgcaaatagttacagtaccggacattgatgcagattag

SEQ ID NO: 4391 - DNA, 532 bp, Oryza sativa
  Clone ID: PAT_MRT4530_1127C.1
atctcagcgcttattctttcctccatcttcacagataattatcagattttgggaagataaatagttaggtaacttggcttttaaagctaagtttccttccttatataccattatccgaaggaaatgttcttcaattgttagtgttatgagttctgttcctcttaatgtgtcttttaggagagttctgttccacatcagaattttatttcttggcatgatttgtgtgcttctattgtacatatccagttgaatcgctcatctgattgttttaaatggaactttaatcggaatggtcagttcatggtaaggtcaatgtatcttgctttaattaatagtggctatattaagagaaataagataatttggaagctcaagatgccgcttaatattaagatctttatgtggtatttgcttaaaggtgtcgtgttaactaaagacaatttggcaagacggaattagaatggtagtttgagatgttctgcatgaaaaatgaatctatccaacatccttttatagattgccattatgcaaa

SEQ ID NO: 4392 - DNA, 1209 bp, Oryza sativa
  Clone ID: PAT_MRT4530_11280C.1
atgtcaaataaggtcacatttcagatagttcacggtgaaggaaatattagatttggtccagatggtgttgatctgtcagattttgtaatgacatctaagggcatcgataggcctgcggagagaatatttcagtcaatttatagttggttgttgagaggatttagaatagaccaagaagtctacacaatgtcagtatcagttgtagtgagtcgtgcaacagaaggttatttttgggaactaatgccgatggacagcactgctgcttggagacggtatgtggaaatagcttttgaacggtcatggcccctcgttatatttgtgtcggtacaagagaaagatataaatgtttcaatgcaaaccgaagatgtagagggtcctatcaatgcaggggatgttgttggaccatcgatgcaaaatgaggaaaatcaaccaagggaggagcaggccatgggcatggcggatgagggggccgcgttcgccagctcttcctctcacggagcgtcgatccctcgcccacacgcaggatttgtagccgggatcttcggtactggggcctcttcgtctcacgccggtaggactggtcctactagccagttctacaacgacgacttgcacggtgcacaccaccacgacgtactaggctcctctcagcttggaggagctccagaggcgcacactcaggagcagccagaggtcacacctgtacaggcaggacgggttggccgtgccgtacccccggaccgactcacatactcccaggggcacattagggcgcagggtaggagggacaggggcaacctcttcatatcttctttcccactagcacacaacacacgaaaatggaagcgccattccttgagcgtctcaactggtaaagcgatccttttgctgacatatcgtccaatgtgcaacttcatcgagtgggtagacatggagaacccacaaaacaacggaacccgtgcttacccacgtaatgaaacaagatcggactacctaaggcggaaggatgagcatgaacgtcgaattgctgctgaggctttagaatggcacggcaatccaaggatgggtggatttactcgatggatcgacaatgtcactccatcatatcatggccagaagataacagagtcagaaacacaagtagagtatcaacgattgaaggaccacgagaatgcaatgcattctgaccgacctagaaggggccgatag

SEQ ID NO: 4393 - DNA, 579 bp, Oryza sativa
  Clone ID: PAT_MRT4530_11281C.1
atgccgcgcgccgctcctctcctgagctgggttttatctgtgtctaatgattcgatgaatgttggatcgaagccgaacttttttttcttaatatacatgtacttcctccgtttcacaatgtctcaggaaagcttcatgcccgagaaattgaactgtgactcaccggagagggagaaatcgaaggtggagcttgacggctggaattggggaagagggagtcaatctccctcctcagtgcacgattcttgggaattcttggggggtttttggagaggatgtggagaaggtgttggtggtgctgtggctcagcctacgacggtctacaatggccggaacggcgacaatgtcgctgcggcggtgcgcagagcgcgctccagagctccggtgggcacggcagcgttcccgtcgattggctgcacgagagaggatgaaatcaaaaggagaaatattcggcatggtgaggagagtatggaacgtggaagagataggattggcgaagattcgtcttcatcacggccggcgatggatgaccaaattagttttgtggggtttgacattggccttgttgatatattttaa

SEQ ID NO: 4394 - DNA, 2340 bp, Oryza sativa
  Clone ID: PAT_MRT4530_11282C.1
atgtcaaataaggtcacatttcagatagttcacggtgaaggaaatattagatttggtccagatggtgttgatctgtcagattttgtaatgacatctaagggtatcgataggcctgcggagaaaacatttcagtcaatttatagttggttgttgagaggatttagaatagaccaagaagtctacaaaatgtcagtatcagttgtagtgagtcgtgcaacagaaggttatttttgggaactaatgccgatggacagcactgctgcttggagacggtatgtggaaatggcttttgaacggtcatggcccctcgttatatttgtgtcggtacaagagaaagatataaatgtttcaatgcaaaccgaagatgtagagggtcctatcaatgcaagggatgttgttggaccatcgatgcaaaatgaggaaaatcaaccaagggaggagcaggccatgggcatggcggatgagggggagagagtcggtataattgttgatgaaatggagagggaagattcggataatgaggaagcggacgacgacgcatcatccgatgaggaaggtgatgtaatggccactgattgggcaaatgaggacttctctggacttgttatatcagagggtgatcatgtaccctgggagtataaggagaacgaggtaattgagggtgcaaggtatgctcataaggatgagatgaaggaggcggtgaagcattgggcagtttccttgcagagagagtttagggtggtcaagtcaacaaattatgtgtatgaagtgaggtgcatgaaggaagattgtccgtggcgtgtccatgcatataagggtaaatggaatgattattggaaagttagcattgtgaccgagcacaagtgctacttacaaggggtggagaagtatcaccgaaacatcacttcagcttttgtgggaagtgagatgtacagcagtgttgttggtaacattggctttgaaccaaaatcaattattaggcacatcgagaacaaattcaagtacaccataagctatgcaaaggcctggagagccaaacaaaagattattgagatgaggtatggcacatttgaagcttcttatgataatttgcctcgtttgttagccaccattgcccagaggaataataatacttactatgacctacatacatttacatcggttgatgatcgaacaaagagtgtgctgcaaagagcctttttctcattgggtgcttgcatcaatgcttttgtgcattgtcgacctgttctatgcatagatggaacttttatgacagagagtgagaacactgaaagctggtactggttcctagagagagtgcacattgcagtggtgcatatgaggcccaacgtttgccttatacatgatcgtcatgcggaccacaacgagctcttcccacacacggaggagaactaccgtgactaccttcgctggtaccttcctcgcactcgtgcgcgtgtgaccttcactccagacgccccagagccgcacgttgccgctgtcacggacgcgtatcccacgcaccgtgaccgagactacttcgtgggggctgatgccgcacgggatatcagtgccgatatcaccgcagtccaagtgaggttgaacagaggtttgcacttgactgacgttgagcagagggtgaccttcgaccggatgcaggagaagatgcgtgcggtcatgcgcgtcttctcctgtcgtagcgccgtggacgtcgtacctccagctggtccggtacaaccacggcctcgcgcgcctaccgtcggagcaggacctcgacctacggcacctgtttcgcacggacctcgtctgccttcgagcgcgttcgcaggcacgaccggcgcttccgcgagctccgcaggggcgttcgccacctcttcgggcgcgttcgccagctcttcctctcacggagcgtcgatccctcgcccacacgcaggatttgcagccgggatcttcggtactggggcctcttcgtctcacgccggtaggactggtcctactagccagttctacgacgacgacttgcacggtgcacaccaccatgacgtactaggctcctctcagcttggaggagctccagagacgcacactcaggagcagccagaggtcacacctgtacaggcaggacgggttggccgtgccgtacccccggaccgactcacgtactcccaggggcacattagggcgcagggtaggagggacatggggcaatccaaggatgggtggatttactcgatggatcgacaatgtcactccatcatatcatggccagaagataacagagtcagaaacacaagtagagtatcaacgattgaaggaccacgagaatgcaatgcattctga

SEQ ID NO: 4395 - DNA, 6207 bp, Oryza sativa
  Clone ID: PAT_MRT4530_11283C.1
ttagcacccatctgctaatgactcattaaagagtggaacatatggtagatatggctcaaaggagtcatgtccgagattgcgtatagcacgaacttccttgcgatccatttcatatgccatcaacgttttgtcccatccataaacaaagaagatcaaattacattccggatgaactgcaattatttggtagtcaaatccaaaccgatatttcatccctccaaacagcctcaaggagctaacggtgtgctttaatatccaattatctgtatcataatcttcaagaatccaaattgacagtttgaagatgtcatctggatcaacattaaaagcacataggcgaccctgagtttgatgaattatgccagtatcaccttcaggctccggcatagcaatggtcctccatttcttcccctccatgtcaaccaccgcaatctcagcagcacacgtagcagaatgcagaaaaccattaaggaaaacacttctcggattggcccaatgccttagaaacacatcatcgccccatccactcacatgaagagtccacaacccagtttcggaagagtagatctcaacccccgtgacatcttcatattcagcctccacatactcaagaacatggaaatgcgaggagattgctgggtcgaaacacaggcaggcaatgcgggtctcgccattagcccagtcggcatccggcaacatcacccattccttggtcgcaggattgcacacggcataatggaacggctcaatctcatcatcgctgttgttaggcccgggctggaagcagcggcagaggaggaggccattgcagcagtccaaggggacgaccgtgtcgcactggggcaggaaggagaatgacgggtagatgagaggcacccctttcccggagacgttggtgaagtggtgcgccgagcaagggcagcgctcgccgctgatgcttttgtagaagaagccggacagcgtctgcggcagcttcttgcggtgctcacggtcggcgatgaggttgcgccaggaccggcagacgcgcttgaagcggcacacggagcggacggggaggcggcggaggatctcgacgacgaggtcgtcggtgaggctggccgccgggttccgccgccccatggggagatcctccatctcgggtgaagctgcggagagggtgtcagcctgcaatccgcgaagagaaggggattcgccggcaagagcagaacatggggattggattacccgaacagaaacatcgaaatgacaaagaagtaaaaatcgcggagcacgtcgcacgcgccggcaacctacagccctcgccggcaaagccgcgccgggccgccggctgcctcgccggtcaccgagaagaagaagacctagaagcggcggcgacgcatccccgatgtgggaatgccgttgcagttcagtacacccatgagtccgaccgtgacccctgtccctcctaccctgcgccctaatgtgcccgtgggagtacgtgagtcggtccgggggtacggcacggccaacccgtcctgcctgtacaggtgtgacctctggctgctcctgagtgtgcgcctctggagctcctccaagctgagaggagcctagtacgtcgtggtggtctgcaccgtgcaagtcgtcgtcgtagaactggctagtaggaccagtcctaccggcgtgagacgaagaggccccagtaccgaagatcccggctgcaaatcctgcgtgtgggcgagggatcgacgctccgtgagaggaagagctggcgaacgcgcccgaagaggtggcgaacgcccctgcggagctcgtggaagcgccggtcgtgcctgcgaacgcgctcgaaggcagacgaggtccgtgcgaaataggtgccgtaggtcgaggtcctgctccgacagtaggcgcgcgaggccgtggttgtaccggaccagctggaggtacgacgtccacggcgctgcgacaggagaagacgcgcatgaccgcacgcatcttctcctgcatccggtcgaaggtcaccctctgctcaacgtcagtcaagtgcaaacctctgttcaacctcacttggactgcggtgatatcggcactgatatcccgtgcggcatcagccgccacgaagtagtctcggtcacggtgcgtgggatacgcgtccgtgacagcggcaacgtgcggctctggggcatctggagtgaaggtcacacgcgcacgagtgcgaggaaggtaccagcgaaggtagtcacggtagttctcctccgtgtgtgggaagagctcgttgatcacctcctctgtagctaacacccagtcgtcaacgtactgctgtacacgtggagcccaaagtgcgcctgctagctgtccccgtcgagtcaacgagtggtcggcagggaggacggtcggctgcacgttgcccggaaacacctgcctaagtccgaactgtctcatcacacgctgcgggcagtgaggctcaacgaaaatgtcgaacaccatcggcaggatggtgagccagtaagcctggtcgcgtgtgcacaaggacgaaagtcctagcggtgctctcgcagcgacggcctcttctatgtacggctcccagatgacgtcgctcggctggagacggtcaaactcgaacacgaagtccgggtaaccacgtctcacctggacgtgagcgtaacgacgcccacgtcgacaccagtaagtccccatcgtgggaccgtcctctggccactgcgcgctgcgaccaaccccgtagggtgcgctgtccaccactggtcgacctatggcaaacctctcggctgcccaaagctgaagcaacatagggcagccagcgatgatcgctcccgcgtcagtcttcgtgcacgcctcacagagggcacggtacgtggctgctagcacggcagaaccccagctccactgcggcacgtcctgtggctgagcatccgcgatggaccgtgcgtagtggaccagccggaagtccacagcgtgcccgtgggtgctagtgaacatcacccacccgaacaaccacaacaggtacgcctcaagggagcgtcggaccgagtaatcatcagcgtcagggtgcagaaggtccgcagtgaactggagcaaccaagccttgctaggcccgactgtagagtacggaggaagggtggtggtcggtcctaggtgtggaaggcgcatcacctgctcgaagcgcgcagtgatatcctccttccacccaaaaacaccgtccacgggaccaactgctgctcccgccagcggtagcccgagcaggtacgacacgtcctgcagtgtcggagccatctccccacagggaaggtggaacgtgtgcgtctcaggtctccagcggtctacaagagcggcaaggagtgaccggtctgcatcccaccgcttcgctgggtcacggtcgtccgccgccgcctcaacaagcctacaaagtggtagaaggcctgccgcacgcaaccaaggaacgtgatgggggtcgacacgcaaccactcgcgcgacgtgcgtggacggaaggtgccgagctgtgcaccctcgactgctgacaggaacgagcggtggttcctgtcaatcccacggttcaacagcgccggtgtgtcgtacgccataccatcacttgcctgtccagatggactagcatctgcgccgcttggaacttctgcattcttcgggcatttcttgtaagtatggccgcgcagatcacacttgctgcaacgtaaagtcctcccacctgcttctgactcatccatatcatttctgatgcgtctagtttggcgtcgaccctttttcacccttaacttagatggatctggaatataaaaaacttgggcactcagcgttgtgtaagatcctgagatcccgaacccatatatctcctcactccatgtatgaaagattgcttctttcctgaaataatttgagacgtacacattgggagatatgccacaatcaccggcagcagcaagaacgtgtgagcaaggaaggtgatgaagcttcggcttcatacaactgcaggtacatccaccatccgccttcaagacacattcctgcacggcttgcttgcgatagataccacgcctgctcctatcaacacacattatttcataccgatgcacttgtgtgccttgagcaacaactcgatgtctccgtgcctttttgattttatcttccatgtactttgtcactacgttgccaaacactatgttgttatcggccatggacggaccaattttcttgtatcgatccctaaagtacgcttgcgtgccgtgaaggatgaattcaacaatagcaaccaatggaagtacccgaactcctcgcattacccagttgtacacctctgccaaattggttgtcattatgccataccgagatccatcggtgtcgaacaatagagaccacttctccttaggctcattctcaatccactgagtgaaatttctaatggacgaccctgacctccttctcattgttggtgggtcatcatgtaatgcaccaagaggtatgggaggctcgtcaccttcaactagtggtctgcgagattgctcatctgtttgcttcgttgtcaactcatccaacttgtcccacaactcattaaatttcttctcttggttctgtgcacagagcctcttaaagagctccataagatgcttgttcttgaattgcttgtagaaatttgcacccatgtgacgcatgcaccaccgactccgaacatcaggccacttagctggaagtcccttctcatcccaaccgttctgcaagtagtcaatagcccgcaacatacccgcatgatgatcatgtataaggcaaacgttgggcctcatacgcaccactgcaatgtgcactctctctaggaaccagtaccagctttcagtgttctcactctctacaaatgcaaaagccataggtagaacctggttgttcccatcacacccaattgctgtcaatatctgacctcggtatttacctgtcataaaagttccatctatgcatagaacaggtcgacaatgcacaaaagcattgatgcaagcacccaatgagaaaaaggctctttgcagcacactctttgttcgatcatcaaccgatgtaaatgtatgtaggtcatagtacgtattattattcctctgggcaatggtggctaacaaacgaggcaaattatcataagaagcttcaaatgtgccatacctcatctcaatgatcttttgtttggctctccaggcctttgcatagcttatggtgtacttgaatttgttctcgatgtgcctaataattgattttggttcaaagccaatgttaccaacaacactgctgtacatctcacttgccacaaaagctgaagtgatgtttcggtgatacttctccaccccttgtaagtagcacttgtgctcggtcacaatgctaactttccaataatcattccatttacccttatatgcatggacacgccacggacaatcttccttaatgcacctcacttcatacacataatttgttgacttgaccaccctaaactctctctgcaaggaaactgcccaatgcttcaccgcctccttcatctcatccttatgagcataccttgcaccctcaattacctcgttctccttatactcccagggtacatgatcaccctctgatataacaagtccagagaagtcctcatttgcccaatcagtggccattacatcaccttcctcatcggatgatgcgtcgtcgtccacttcctcattatccgaatcttccctctccatttcatcaacaattataccgactctctccccctcatccgccatgcccatagcctgctcctcccttggttgattttcctcattttgcatcgatggtccaacaacatcccctgcattgataggaccctctacatcttcggtttgcattgaaacatttatatctttctcttgtaccgacacaaatataacgaggggccatgaccgttcaaaagccatttccacataccgtctccaagcatcagtgctgtccatcggcattagttcccaaaaataaccttctgttgcacgactcactacaactgacactgacattgtgtagacttcttggtctattctaaatcctctcaacaaccaactataaattgactgaaatgttctctccgcaggcctatcgatgcccttagatgtcattacaaaatctgacagatcaacaccatctggaccaaatctaatatttccttcaccgtgaactatctgaaatgtgaccttacttgacat

SEQ ID NO: 4396 - DNA, 450 bp, Oryza sativa
  Clone ID: PAT_MRT4530_11284C.1
tcaatccattacactcaggtaactaagatcgcctcagcaagtcagcaggcacatttttttattataaatgtcgagtcctctctcattggctcctccgtgctgttctccgatttgctcagccatgtgttccacggcgaacctcctctataacctcaacttaatcccagagcacatttcaatccatgctatgggcctcatcctagactctctagtgccctagattctcactagcttgcttagtaccacctgtgtcgtgtagtcctagtcctagatctgcattgccaatgtcattgtagcctcacttctcatcaccagcatcatcccatcctcgatccacatgtacaatatcatctcgacatctcttcaaagataggagtcccttcgatttgtgatattgcataattgggccttaggctcaaatgggcagacaagaagaaaccaaaaagagag

SEQ ID NO: 4397 - DNA, 189 bp, Oryza sativa
  unsure (1)..(189): unsure at all n locations
  Clone ID: PAT_MRT4530_11285C.1
tgctgacctggaaaataaggtgcgggacactntgttgcgaggctgactgccagtgaggaggcttccattgaccccgtgacccccgccttgttggtgttgttggctgggctgtgttgcgcatggatggtgtgttgattgaaaacctgcggatggtgaaatggttgaatttgtgtgtacttcatttccggc

SEQ ID NO: 4398 - DNA, 296 bp, Oryza sativa
  Clone ID: PAT_MRT4530_11286C.1
cccacgcgtgcgcgtacactgacccggacgcgtgtgcagctcaggcacagaaacatattcacttgtagtgatcgtatgatagatcactcaatggctctacaagggcacccttcttgcatgaccgacctcatggcgggcatggtgcggcattttcacaacgcatgctgagtcgagaacgggagatagatgttcatgagacagtgcagtgccagcgacaaggtgcaacacagcgccattgacacgagccggcaagagctctaccgtctgctcaccggccgggagaggttccagccgat

SEQ ID NO: 4399 - DNA, 191 bp, Oryza sativa
  unsure (1)..(191): unsure at all n locations
  Clone ID: PAT_MRT4530_11287C.1
gacgaggaagtgacgagatgatccgtgagctgacgtngatggcgatggcagatcaactacgaggagtttgttaaggttatgatggccaagtgaggagggttcccattaaataagttctgtctgaagtgaactaaaactgtcagggcctacaacaaagctgtactttgtgatgttcttttaagtacctatct

SEQ ID NO: 4400 - DNA, 296 bp, Oryza sativa
  Clone ID: PAT_MRT4530_11288C.1
gcacgaggcccccccccttttttttttttttttttttttttttttttttttttcagcaaatcagcaatttaattaaccaccccaacaacagatcattatagtatattctacctctatttcttgaaaaaaaaaggggctgcaattcatgtgatctgtgcacgggttggtggcatagtggcattagatgttcccccactatacataaatcatgatttttatagatgatcatgttctaaaaagagagataattataggtgatcagatcagttcctggtgcagtttagctagcacttagc

SEQ ID NO: 4401 - DNA, 433 bp, Oryza sativa
  Clone ID: PAT_MRT4530_11289C.1
ctgttggatttttgttccagactggctttcttggctgttttggttccgaggtggatgccattgaatactacaaagcagagattgagaagattgggaaagaagtaagttgtactccctccgtaccgtaatataagggattttgactttttgcttgcactgtttgaccactcgtcttattccaaaaatttgtgccaatataaaaaacgaaaagttgtgcttaaagtactttggataataaagcaagtcacaaataaaataaataataattccaattttttttttaataagacgagtggcatttttgtctattaattccaaataaataataatcccttatattacgggacggagggagtagtatttttgtctatatcatcattggaccattcggcattgtccattttttctgattgagttgtatcattctatgaac

SEQ ID NO: 4402 - DNA, 228 bp, Oryza sativa
  unsure (1)..(228): unsure at all n locations
  Clone ID: PAT_MRT4530_1128C.1
ggtgttggggttttttttttttgtgttttattnantagttatttatgttttgttagaacgaaggttggggtttgttttttacttggcccgcaggttgttaggcgtttaaaccgttgccttttgggtttaaagaccccccatagttggtttgaagtttcacgtgtcccaaggccggtagtttagccggacggggggccgtatggggtgttggggcattggatgacgggt

SEQ ID NO: 4403 - DNA, 116 bp, Oryza sativa
  unsure (1)..(116): unsure at all n locations
  Clone ID: PAT_MRT4530_11290C.1
atgacgctacgtaacttgatcctctgatcggcnncgccctttacccgcccggtggcttagacggctgccgcgaccaaccagatggccgacgcgccgtctaggtgcctactcgtcac

SEQ ID NO: 4404 - DNA, 2250 bp, Oryza sativa
  Clone ID: PAT_MRT4530_11291C.1
atgaacccagccacgatcttgggtcacattcagcttgttcacatgcaccctgacgtttcctgcggggtgcacttcgtcacttgcttccaagaaccccgtgacaaggcgggaaggaatccgaatcgcagcgagatgatttgccgcagtctcctccttctcagatctaatgcggcctccaaggcaagcaacatagtaaaacatgtagctgccactggatgtttgccaaaatattcctcagaggcaccagccagatatttcagctctgaaccgtctcttcaggtcgactcgacagaagaaaatgggttcaaggggcatggcatgctggccccattcactgctggatggcagagcaccgatttgcatcctctggttattgacagatctgagggttcttacgtttatgatatcaatgggaagaagtacatagatgctcttgcaggattgtggtctacggcattgggtggtaatgagcctcgattgatcaaagctgcaactgatcaattgaacaaattacccttctaccactccttttggaaccgtactaccaaaccctcattggatcttgctaatgaaattctcagcatgttcactgcaagggaaatgggaaaaatattctttacaaatagtggttcagaagcaaatgattctcaggtaaagctagtttggtattataacaatgcattgggaagacctaacaagaagaaatttatcgcacgctcaaaatcatatcatggatcaacattagtgtcagccagtctatcaggtcttcctgctcttcaccaaaagtttgatctgccagctccttttgttctgcacacagattgccctcactactggcgcttccatcttcctgatgagacagaagaagaatttgcaactagacttgccaccaacctggagaatcttattctcaaagaaggaccagaaacaattgctgctttcattgctgaacctgtgatgggtgctggcggtgttatccctcctccaaagacatactttgagaagattcaagcagtcctcaagaagtatgacatcttattaatagcagatgaggtcattacagcatttggtagattgggaaccatgtttggatgtgatatgtatgacattaaaccagatcttgtctcaatagccaaggctctatcttctgcctacatgccaattggagctattcttgttagtccggaaataacagatgtaatttattcacagagcaacaagctcggttcttttgctcatggatttacatactcggggcatccagtttcctgtgctgtcgccatagaagcattgaagatttataaagaaaggaatatcatcgaacatgttcagaaaattgccccaaggttccaggagggaatcaaggccttctctggaagtccaattgtaggcgagatacgtggtttaggactgatacttgggactgaatttgtcgacaacaagtctccgaatgatccattccctgctgaatggggtgttggttcattgtttggtgccgagtgtgagaagcgcggaatgcttatcagggttgctggggataacattatgctttcgccaccgcttataatgactcctgatgaagttgaagaaattatttgcaaatatggtgatgccctgaaggccacagaggaaaggattgcagagctcaaagccaagagggtgattgatgatggtgatgacaaattgacaatgttcaatgtatacagagtggtttcatctgtagatgccaataatgaactgttgtttgaattagctgactttgagagctttgctgatgcgttaggtggctatcttcttcttctattggtggccacttgggagatggagatggattgcttaggcgcgtcgtggagatcagatagatatgcatgggtcgttggtgacggaggaagtagagaagaaactcaacgcccgcggggcagcatgaacacgcaagacagcaagagaatgagatcgttggggaaggttctgggttcacgtgtcgccggccgtcgtcaggaagtccacgtggcgcgtggatatgggaagaaaatggcgactaagggaaggaaatatgatatgaggtccggtggagggagaggaggcacgtggagacgcgtaacagtaatgaatgatatatcacatctatacaaaattgcactcctacttatattgggatggatgtactccctacattcagctagaactggatatatgggtctcacatattctattcttgtaaatctggacacgtatagcaacttgtactga

SEQ ID NO: 4405 - DNA, 1823 bp, Oryza sativa
  Clone ID: PAT_MRT4530_11292C.1
gaagcaattgccattttccccattccaatattcagttgaagataacaattgtatcattttcaatgttcgcatctagaacaagcttcaggcttacagttcattattggcatctacagatgaaaccactctgtatacattgaacattgtcaatttgtcatcaccatcatcaatcactacaacaacgacagcggcagtggcaatggctaacccctcttggctttgagctctgcaatcctttcctctgtggccttcagggcatcaccatatttgcaaataatttcttcaacttcatcaggagtcattataagcggtggcgaaagcataatgttatccccagcaaccctgataagcattccgcgcttctcacactcggcaccaaacaatgaaccaacaccccattcagcagggaatggatcattcggagacttgttgtcgacaaattcagtcccaagtatcagtcctaaaccacgtatctcgcctacaattggacttccagagaaggctttgattccctcctggaaccttggggcaattttctgaacatgttcgatgatattcctttctttataaatcttcaatgcttctatagcgacagcacaggaaactggatgccccgagtatgtaaatccatgagcaaaagaaccgagcttgttgctctgtgaataaattacatctgttatttccggactaacaagaatagctccaattggcatgtaggcagaagatagagccttggctattgagacaagatctggtttaatgtcatacatatcacatccaaacatggttcccaatctaccaaatgctgtaatgacctcatctgctattaataagatgtcatacttcttgaggactgcttgaatcttctcaaagtatgtctttggaggagggataacaccgccagcacccatcacaggttcagcaatgaaagcagcaattgtttctggtccttctttgagaataagattctccaggttggtggcaagtctagttgcaaattcttcttctgtctcatcaggaagatggaagcgccagtagtgagggcagtccgtgtgcagaacaaaaggtgccaggcagatcaaacttctgatgcagtgcaggaagaccggatagactagctgatattagtgttgatccatggtatgattttgatcgtgcaataaatttcttcttgtctggccttcccagtgcattgttataataccagaccagttttacctgagaatcatttgcttctgaaccactatttgtgaagaacacttttcccatttcccttgcagtgaacatgctaagcagttcctttgcaagatccagagatggtttggtcgtacggttccaaaaggagtgatagaagggcaacttgtgtaattgctcagttgcagctttgactaatcgaggttcactaccacctaaagctgtacaccatagtcccgcaagagaatctagatacttctttccgtcgatatcatatacatacgaaccctcagatctttcaatgactaacggatgaacatcggtgctctgccaaccagctgtgaatggtgccaacatgccatgccccttgaacccattctcttcagttgagttgtactggggcgatggtactgaactgaaatgtctggttgatgcatcacacaaattttgcgtgtgcccttgcagacttccagtgctagttacatacttcaataagttgattgcctgagaggaggaagaagaggcattcgatcggagaaggccgcgcgcaatcaccatcttgcacagctccaacccacgcgtccgaagaaattagagtgctcaaagcaagccatcgccggacgcgtggg

SEQ ID NO: 4406 - DNA, 1356 bp, Oryza sativa
  unsure (1)..(1356): unsure at all n locations
  Clone ID: PAT_MRT4530_11293C.1
ttttttttgatcttctaatacagggcaaatatatatgggccaacccagccacatgttcaaatacaatcacaggttcactgaccatgaatacattataggttaactagccaaaacaaaatacatcggcacataatcaggttcagtacatcagtatatcactctgaccaaaaccagccagttattgactttaacacataatcacaagtcaaaatacatatgcgccaacccaaccaagtccaaatacaatctcaggttcacttaccaaacgcaaaaccaagtgtcgaaatcacactaaccaaaatccactgccgtctcatcatgaatcatcaaggcgacatgaggaggattgacaaaccttacctcttctcaaagtatgtctttggaggagcgataacaccgccagcacccatcacaggttcagcaatgaaagcagcaattgtttctggtccttctttnagaataagattctccaggttggtgncaagtctagttncaaattcttcttctgtctcatcaggaagatgnaagcgccagtagtnagnncaatctgtgtgcagaacaaaagnagctgncagatcaaacttttggtaagagcagnaagacctgatagactggctgacactaatgttgatccatgatatgattttgagcgtgcgataaatttcttcttgttaggtcttcccaatgcattgttataataccaaactagctttacctgagaatcatttgcttctgaaccactatttgtaaagaatatttttcccatttcccttgcagtgaacatgctgagaatttcattagcaagatccaatgagggtttggtagtacggttccaaaaggagtggtagaagggtaatttgttcaattgatcagttgcagctttgatcaatcgaggctcattaccacccaatgccgtagaccacaatcctgcaagagcatctatgtacttcttcccattgatatcataaacgtaagaaccctcagatctgtcaataaccagaggatgcaaatcggtgctctgccatccagcagtgaatggggccagcatgccatgccccttgaacccattttcttctgtcgagtcgacctgaagagacggttcagagctgaaatatctggctggtgcctctgaggaatattttggcaaacatccagtggcagctacatgttttactatgttgcttgccttggaggccgcattagatctgagaaggaggagactgcggcaaatcatctcgctgcgattcggattccttcccgccttgtcacggggttcttggaagcaagtgacgaactgacgaggagtgaggaggtgggagatgaaaaggatgggagaggaggacgtggtgaaattac

SEQ ID NO: 4407 - DNA, 351 bp, Oryza sativa
  Clone ID: PAT_MRT4530_11294C.1
atgggattgccccaatctacggcaattgccggccagaggtggcgaaagggtggtggtctggtggagctcgggttagtgatggaggtggcagctcggtggcggattggagtggagtggcggccaggacgtggcgcggcgctgcgatgcggcaacgtgaacagcacggtgcgatggtggctaggcggtggcagcgtgcgcccggagtggggaacaacggcggatgtgagcggcggtgtggtccggccggtcaaccaaccggaggttgaaggagagcccaacaggtcgtgcggggagcttgggcctaatgtccctggtggttgtggcatcgacatttgtgacgcctaccagtga

SEQ ID NO: 4408 - DNA, 228 bp, Oryza sativa
  unsure (1)..(228): unsure at all n locations
  Clone ID: PAT_MRT4530_11295C.1
gcccttttgttccacacgagatttctgttctcgttgagctcatcttaggacacctgnggtatcttttaacanatgtgccggcccagccaaactncccanctnacaannnnttncggccggttngnnccgagggacttnggcntttagagccaaaaggaggggccaggncccggttccgactnanggnataagtaaaataacgttaaaagtagtggtatttcacttgcg

SEQ ID NO: 4409 - DNA, 861 bp, Oryza sativa
  Clone ID: PAT_MRT4530_11296C.1
atggcgtggtcttcggcgcacgaaggctggccggcgggggacgtcggtgcaggggtcccacatgtcggcagagcttgtgtggtggtggcgcatcggtgcgtcagccgtggattcgcagccggtgagcggcgggtgaaaacccagtgcggccttggccgaaccgacaacgatcctcctgagggtgttgttgtgctgtctcacccctcaagggtgatagccgggcgaaagcccagtcttggctcttttgagtcccgacggacgggcggtggtttttccgtcgcttctcttcttgaagacgttgttttggcatcccctagggggcgatctcgtctgtgtccctttgttggtctaggtgacgactttccttctcgtcgccggtcgccgtgggccttcgccgccgccttccaacccctatataaggatccccaagctctcctctacccgccgccaccctcgccttcgtctctcgccgtcggtagcgccctagcgccgtgtaacctcgagccgccgtcgttgccgccgctccagccgtgcttcgccatcgtttcagtcgtcgccgtcgctcgggaaggtcgccatcgtggtcgccgtcgcgtcgccgtcctcgtccgccccttcgccgtcgctgtagaccgccggagcatcgccgtcgtcgtcaagccgaaggactccgccgccttttcctcgacgccgccgccgtccgttcatcttccgccgcttctttggtcatcgtgccgtcgttcgccggcgagcaagtgcgcccgagccgccgccggaggtgacatcaccgctgacgtcgtcgtcatcgactctcgtggcccggtcgtggaccgttcgatctcggccgtccgttttggatag

SEQ ID NO: 4410 - DNA, 468 bp, Oryza sativa
  Clone ID: PAT_MRT4530_11297C.1
atgggattgccccaatctacggcaattgccggccagaggtggcgaaagggtggtggtctggtggagctcgggttagtgatggaggtggcagctcggtggcggattggagtggagtggcggccaggacgtggcgcggcgctgcgatgcggcaacgtgaacagcacggtgcgatggtggctaggcggtggcagcgtgcgcccggagtggggaacaacggcggcttgggaggctggctcgagcctcgaggtcgggaagagcgggaacaaccagcggagtgaggctccggcgacttggggccacggggatgatgtgagcggcggtgtggtccggccggtcaaccaaccggaggttgaaggagagcccaacaggtcgtgcggggagcttgggcctaatgtccctggtggttgtggcatcgacatttgtggtcatggcacgggacgcccgcagcagcggagtggtaggcgctag

SEQ ID NO: 4411 - DNA, 791 bp, Oryza sativa
  Clone ID: PAT_MRT4530_11298C.1
atggactccccagcgacctccgtgggcttatctccgccacttctcagtctggtgctccgcaatgaatcatgttatacaaaaggaaaaagggaattattgcgtcatcggctagggtttgcggtgaaccgggtgcacggcggcggctcacgggaacgaacggccgagatcgatcctatccaaaacggacggccgagatcgaacggtccacgaccgggccacgagagtcgatgacgacgacgtcagcggtgatgtcacctccggcggcggctcgggcgcacttgctcgccggcgaacgacggcactacggcacgaacggagggcaccagcacgtagagagcgacgcggcgaactcaccgatgaccaaagaagcggcggaagatgaacggacggcggcggcgtcgaggaaaaggcggcggagtccttcggcttgacgacgacggcgatgctccggcggtctacagcgacggcgaaggggcggacgaggacggcgacgcgacggcgaccacgatggcgaccttcccgagcgacggcgacgactgaaacgatggcgaagcacggctggagcggcggcaacgacggcggctcgaggttacacggcgctagggcgctaccgacggcgagagacgaaggcgagggtggcggcgggtagaggagagcttggggatccttatataggggttggaaggcggcggcgaaggcccacggcgaccggcgacgagaaggaaagtctagggttaggggagagagatgaatccgattcgagatcgaatccacaagtttccaaaccgaat

SEQ ID NO: 4412 - DNA, 352 bp, Oryza sativa
  unsure (1)..(352): unsure at all n locations
  Clone ID: PAT_MRT4530_11299C.1
tntttttntttttgtttgtttttagtaaagatcactaatttatattcagaactgaaggggtgaagctgatcagggtggctagtagattaactcatattgcattgctcttnctacaaataccccctccaggagtgccgcataaacaacnnggcccaaattcactgaagagtgagcccatntnnngccaatggtgtgggctaaaatgctgagcagttggccagcagcagnagtgattttgctcatcactgcagtatagtgtgtaaaactagcagctggtgtaccattccatccaatacattggcaaaatgaatgaaagtaataaaaaggaacaattttgcagcactaacacata

SEQ ID NO: 4413 - DNA, 218 bp, Oryza sativa
  unsure (1)..(218): unsure at all n locations
  Clone ID: PAT_MRT4530_1129C.1
aagataatacaaggtgtgcagctgtgaatgggcaagccactgacanccatgggtgagctggaccttggggagccaaattgtgcttgaggtgaactggttggatggtgcacagaaaactgctggcaaatggggatggtggtgcaggagcatgcatggtgaaatggaatgcatggttgcgtgcatgaggtgttggaatgaaccaaantgggaccgtgatt

SEQ ID NO: 4414 - DNA, 335 bp, Oryza sativa
  Clone ID: PAT_MRT4530_112C.1
tgcaggcccataggcgcagcaagctgacaagctgccagcagtttggtggatgctgcttactttggatgcggaatctggctgcaagctgcaagctgctgttgggcttgttaacgttgccatgctgagatatgggtatgctgaccctgacgtgactatgggtcgcacctgagtgaccatgtgagccacccttggccggtgtgcttggtaatgagttttaacagtatatggttcggaagttaaaaataagctcagatatcatcatatgtgacatgtgaaactttgggtgatataaatagcccccaagttgtctcttcatatttaaaaaaaaaaaaaaa

SEQ ID NO: 4415 - DNA, 777 bp, Oryza sativa
  Clone ID: PAT_MRT4530_11300C.1
cgccgcctcccccacttggaagttgcaaagcgaagcccaccaacctcaaaaacccaaaccctagctctcctcgccgccatcccatggcgcgcctccacctcgtggtcgtggccatggccgcgctcttcgccgccgcggcggtggcgcagggcccgagcgcctccccgacgccggctccgaaggcgcagccaccggtggcgaccccgccgactcggccgccggccgtggcgccggtgtctcctcccgccgcccagccgccagtgacgacgcctcccccggtttccgcgcccgcgcccgtgcccgccccgagcgccgccgcgacaccgtcaccccaggcctcggcgccgaccgcggagccccccgtcctctcgccgcccgcgccggctccggggtcgatctcccagtccccgacggaggccccgacgtctccgccgccaccgagcgccgcgtccggagtctccccctccgccgccgccgtcgtcgccgcctgggccgccgtggcagccgtcgcggcgttctactgagatccggctcccggagatgagttcctcgccgccgccgatatcatcaccgccattactgccgttaatttattattgttattattagctatttccccccttcgctctggggttgctaatcccattgcgttttaatctagatctagcttttgtgagtgagagagagactgtgcttgccattgtataatcctcccccaccggattcttttctttaatctactttcggacattattagtaaaaaaaaaaaaaaaaaaa

SEQ ID NO: 4416 - DNA, 570 bp, Oryza sativa
  Clone ID: PAT_MRT4530_11301C.1
atggcctcctcctccacctcctcgccgctgccggcgctgctgctgctcgtcctcctggccgcctcgtcggcggcgggcgaagacgtcgccgccgccggcggccgcgacaagctcacccgcatccgcgtgtacatgcacgagaggttcgccggcgcgaacgcgacggcgctggccgtggtcccgtcgccgctgggcgcgaacgaggcgttcggccgcgtcgccgtgctcgacgacgagctccgcgacggcccggaccgggcgagctccgcgctgatcggccgtttccagggcgtcgtcgccgggacgtcgctgccggggacggcgccgccggcgtcgttccagtcggcgatcagcctcgtgttcaccgccggcgagcacgccgggagcacgctgtccatggtgggccccgtgctggggttcgccggcgccatcgagcgccccctggtgggcggcaccggcgcgttcaggatggcgcgcgggtactgcgtcatgacggcggcggcggcggcgtcgacggcggtgtccgtcgtcttcgagaccgacctcttcgtgctcttgcataaaccgtga

SEQ ID NO: 4417 - DNA, 1775 bp, Oryza sativa
  Clone ID: PAT_MRT4530_11302C.1
cgggctgcaggtttttaattaagtatgtactgattactcaatgtacatgggtgtggcgcaggcacaacccagtttacatacacaagtcatttgtttcctttatggagtgtttctacaaaaccatgaacaccaatgtttacacaagtacaatcgcctactttctctccggtcgatggaacagagataaaagagatccaaaagcaccgagccaaacaccaacaaaaccgaaaaaaaaaaggaagagaaaaacttttgaattgaacaacgttatactacttgaatcgtgcagcttcgacaaattttgcgtgaacttttgtgccaatcgagtccatgaggcatacgatcgaacgcaggcaagtctcgacaccggacacgtacgcatggtgccgcgcgccgggccgtgcgcgatcgtacgtctaggtgacggcgcacggggcggcggcggcggaggggcgcttgacgaaccggcccttcatccgcggccgtttctcggcgttcagcttccgcacctcgtaccgtatcttcttggagaacagccgcgtacgccgcttctccctgtacctcgtcacccgcgcctcccgccccgggccgtccatccgcggcctcaccgtcatcatccccacctccgcgccatgcccgccccctcccgcagcccacaaccccgagtaatggtggtcgttgggccagaagtcgtcgagctggccgtgcggcggccggccgtcggtccacggcgagttgccccagctctcgatgatcgcctcgtagttgagcctgagatccaggctcctgtggaagaactgcgaatcggctgcggcgccgttgctcgccgacgacttctgttcgtccggcgaggtgcagttgaaatcgatgtccagcacgtcggcggattcgacgtcctccggcttcggatgagcgcggcatgatgggagagataccctgctgttggaggcaacaccgccgtcgagctccatcttcacccggccggattcttctaccggcggcgttattagccctagggtctccatgtagaacgagtcctgcagctcgttgctgtcgtccaggccttgtccgagtagggcttccatgtcggcggcgaactccctcagctcggcgtccgtcggttcgaagttgacaaagctatccgggagctgctgcacgggcgacgacgccgcagctgccggatactttgcgtcttccacggcgccgtcggcggcgtcctccttgaagcacgatgaggatgcggccgccgcgtcatcgatcgggggcggcgagcagaactcggcgagggaggggtcaaagaccggaacgcggtacagcaactgcccctcgagctcctcgtgagctccgtcttcgtcggccttccgttcgtccgacgactccaccgccatctccggcacgacgagccgcctcgagagcagctgcccgacgctcttgacctgcgggcgccgggtgcgcgccttgcgcttcgaccatgccggcgtgacgccgccctctctcttcgacgtcgtcgtcgtcgtcgtccccaccgccgccgccgcctcctcctccaccgacgcccgcgccgtcagcggcgggggcgacgagacgcgcaggcgcaggcgctcgtgccgcctggcgagcgggttggccgagtgcaccgacgtgtcgcacccctggcacaggaaggcgtcatccgccgcgcagtaccaccgcgcccgccgccgcaggcagctgtcgcacgcgcgcgccgccttgccgcccacggccccggccgccttctccgagctgcagctcat

SEQ ID NO: 4418 - DNA, 499 bp, Oryza sativa
  Clone ID: PAT_MRT4530_11303C.1
ctaactggtagtcagtcatgaaggtgctcatcgttctcgctctggtagcatgcgccgcggccgtcggccgtaaccgccccgacacgcacatcgtcggaggccaaaacgccgacgccaacgagtggcgctggcaggcaggatggctgagcggcggctcgttcagctgcggctgctcgatcgtgcacgccaactggatcatcacggccggtcactgcgtcggtggagtcatcggacagtacagcgtcgaggtgggcagcgccaaccgcggcgctggccagagaatcaccgtcagctccgtcgtccgtcaccccgactacaacgtcggcgccggattcacgcccaacgacctcgctgttgtcggcgctagcgtgcccctcgacggtagttcggtgatcgctgttcccggtggcattgacaaaggcgagaatcgcgagtcgcagaactgctacatcaccggctggggccgcacgtgcggctcgtgcagtctgcccgtcgccct

SEQ ID NO: 4419 - DNA, 4572 bp, Oryza sativa
  Clone ID: PAT_MRT4530_11304C.1
ctatcggccccttctaggtcggtcggaatgcattgcattctcgtggtccttcaatcgttgatactctacttgtgtttctgactctgttatcttctggccatgatatgatggagtgacattgtcgatccatcgagtaaatccacccatccttggattgccgtgccattctaaagcctcagcagcaattcgacattcatgctcatccttccgccttaggtagtccgatcttgtttcactacgtgggtaagcacgggttccgtcattttgtgggttctccatgtctacccactcgatgaagttgcacattggacgatatgtcgtgaagcgccgaaagtgtgttgtcgtgagcataagttgttctagcaccatatgaatgaaaagaaccctatccctcctaccctgcgccctaatgtgcccctgggagtacgtgagtcggtccgggggtacggcacggccaacccgtcctgcctgtacaggtgtgatctctggctgctcctgagtgtgctcctctggagctcctccaagctgagaggagcctagtacgtcgtggtggtgtgcaccgtgcaagtcgtcgtcgtagaactggctagtaggaccagtcctaccggcgtgagacgaagaggccccagtaccgaagatcccggctgcaaatcctgcgtgcgaaacaggtaccgtaggtcgaggtcctgctccgacggtaggtgtgcgaggccgtggttgtaccggaccagctggaggtacgacgtccacggcgctgcgacaggagaagacgcgcatgaccgcacgcatcttctcctgcatccggtcgaaggtcaccctctgctcaacgtcagtcaagtgcaaacctctgttcaacctcacttggactgcggtgatatcggcactgatatcccgtgcggcatcagcccccacgaagtagtctcggtcacggtgcgtgggatacgcgtccgtcacagcggcaacgtgcggctctagggcgtctggagtgaaggtcacacgcgcacgagtgcgaggaaggtaccagcgaaggtagtcacggtagttctcctccgtgtgtgggaagagctcgttgatcacctcctctgtagctaacacccagtcgtcaacgtactgctgtacacgtggagcccaaagtgcgcctgctagctgtccccgtcgagtcaacgagtggtcggcagggaggacggtcggctgcacgttgcccggaaacacctgcctaagtccgaactgtctcatcacacgctgcgggcagtgaggctcaacgaaaatgtcgaacaccatcggtaggatggtgagccagtaagcctggtcgcgtgtgcacaacgacgaaagtcctagcggtgctctcgcagcgacggcctcttctgtgtacggctcccagatgacgtcgctcggctggagacggtcaaactcgaacacgaagtctgggtaacctcgtctcacctggacgtgagcgtaacgacgcccgtagggtgcgctgtccaccactggtcgacctatggcaaacctctcggctgcccaaagctgaagcaacatagggcagccagcgatgatcgctcccgcgtcagtcttcgtgcacgcctcacagagggcacggtacgtggctgctagcacggcataaccccagctccactgcggcacgtcctgtggctgagcatccgcgatggaccgtgcgtagtggaccagccggaagtccacagcgtacccgtgggtgctagtgaacatcacccacccgaacaaccacaacaggtacgcctcaagggagcgtcggaccgagttatcatcagcgtcagggtgcagaaggtccgcagtgaactggagcaaccaagccttgctaggcccgactgtagagtacggaggaagggtgttggccggtcctaggtgtggaaggcgcatcacctgctcgaagcgcgcagtgatatcctccttccacccaaaaacaccgtccacgggaccaactggtgctcccgccagcggtagcccgagcaggtacgacacgtcctgcagtgtcggagccatctccccacagggaaggtggaacgtgtgcgtctcaggtctccagcggtctaccagagcggcaaggagtgaccggtctgcatcccaccgcttcgctgggtcacggtcgtccgccgccgcctcaacaagcctacaaagtggtagaaggcctgccgcacgcaaccaaggaacgtgacgggggtcgacacgcaaccactcgcgcgacgtgcgtggacggaaggtgccgagctgtgcaccctcgactgctgacaggaacgagcggtggttcctgtcaatcccacggttcaacagcgccggtgtgtcgtacgccataccatcacttgcctgtccagatggactagcatctgcgccgcttggaacttctgcattcttcgggcatttcttgtaagtatggccgcgcagatcacacttgctgcagcgtaaagtcctcccacctgcttctgactcatccatatcatttctgatgcgtctagtttggcgtcgaccctttttcacccttaacttagatggatctggaatgtaaaaaacttgggcactcagcgttgtgtaagatcctgagatcccgaacccatatatctcctcactccatgtatgaaagattgcttctttcctgaaataatttgagacgtacacattgggagatatgccacaatcaccggcagcagcaagaacgtgtgagcaaggaaggtgatgaagcttcggcttcatacaactgcaggtacatccaccatccgccttcaagacacattcctgcacggcttgcttgcgatagataccacgcctgctcctatcaacacacattatttcataccgatgcacttgtgtgccttgagcaacaactctatgtctccgtgcctttttgattttatcttccatgtactttgtcactacgttgccaaacactatgttgttatcggccatggacggaccaattttcttgtatcgatccctaaagtacgcttgcgtgccgtgaaggatgaattcaacaatagcaaccaatggaagtacccgaactcctcgcattacccagttgtacacctctgccaaattggttgtcattataccataccgagatccatcggtgtcgaacaatagagaccacttctccttaggctcattctcaatccactgagtgaaatttctgatggacgaccctgacctccttctcattgttggtgggtcatcatgtaatgcaccaagaggtatgggaggctcgtcaccttcaacttgtggtctgcgagattgctcatctgtttgcttcgttgtcaactcatccaacttgtcccacaactcattaaatttcttctcttggttctgtgcacagagcctcttaaagagctccataagatgcttgttcttgaattgcttgtagaaatttgcacccatgtgacgcatgcaccaccgactccgaacatcaggccacttagctggaagtcccttctcatcccaaccgttctgcaagtagtcaatagcccgcaacatacccgcatgacgatcatgtataaggcaaacgttgggcctcatacgcaccactgcaatgtgcactctctctaggaaccagtaccagctttcagtgttctcactctctacaaatgcaaaagccataggtacaacctggttgttcccatcacacccaattgctgtcaatatctgacctcggtatttacctgtcataaaagttccatctatgcatagaacaggtcgacaatgcacaaaagcattgatgcaagcacccaatgagaaaaaggctctttgcaacacactctttgttcgatcatcaaccgatgtaaatgtatgtaggtcatagtaagtattattattcctctgggcaatggtggctaacaaacgaggcaaattatcataagaagcttcaaatgtgccatacctcatctcaataatcttttgtttggctctccaggcctttgcatagcttatggtgtacttgaatttgttctcgatgtgcctaataattgattttggttcaaagccaatgttaccaacaacactgttgtacatctcacttgccacgaaagctgaagtgatgtttcggtgatacttctccaccccttgtaagtagcacttgtgctcggtcacaatggtaactttccaataatcattccatttacccttatatgcatggacacgccacggacaatcttccttcatgcaccttgcaccgtcaattacctcgttctccttatactcccagggtacatgatcaccctctgatgtaacaagtccagaaaagtcctcatttgcccaatcagtggccattacatcaccttcctcatcggatgatgcgtcgtcgtccgcttcctcattatccgaatcttccctctccatttcatcaacaattataccgactctctccccctcatccgccatgcccatggcctgctcctcccttggttgattttcctcattttgcatcgatggtccaacaacatcccctgccttgataggaccctctacatcttcggtttgcattgaaacatttatatctttctcttgtaccgacacaaatataacgaggggccatgaccgttcaaaagccat

SEQ ID NO: 4420 - DNA, 552 bp, Oryza sativa
  Clone ID: PAT_MRT4530_11305C.1
atggcggacgtgttgttggtgacgggctccaacttcaacccagccaaggaattatgcaaaacaagatcaaagttcctgaacaacagcggctcgcgcgtggaatctggtgacagctgtggctcgctcatgcggatctatcggcagcaggggctcgctcgtgcagatacgtcggggcctcaccattgggtggatccagtggcagcatctccctccttggcgagctacggtgaaggctactctacctccccagcagatggtccatggctacacggagtgaaggcagcaatgacgacggtttgggggtgggcgcagccgacgacgaagattttaggattctgttgtggccagacttcaggtggcaggagggaggcgcccattaagggaacatcgccgattcctgaggtagccagctattacccggccccctccggcctccggagccctcgcatggctctggagggcacgggtgtctcggagtccttggccgtctccggagctccagacgaggcctccgtagcctcatctggctccggagctcggggcagcctctga

SEQ ID NO: 4421 - DNA, 1361 bp, Oryza sativa
  Clone ID: PAT_MRT4530_11306C.1
gggataatgatcttgaactccggaggcagcttcatcaacacctgtccgctggattccgagcagctcaagaccttctacttctggatcttcccaatcttcaatagatactgcctctgccgcctctaattgacaagcattcaaccatatatatgtgataaattgtgccaatctgcctcaagtattagcatttaggcaaattgacactacatctagctagctagctagctttgctccgattagtagtattgtttgcctcttctttccattgttaaccttcgattgaacaattaggtttgcgcttgcttgcccaagatattagaataggttttgcaagtgtacatttgtctgaaattcagtcggttgatttgatcatgggtaccatgactctgcccccgggtttccggttccacccgaccgacgatgaattggtcggctactacctcaagaggaaagtcgacagcctcaagatcgagcttgaggtcatccctgtcattgatctctacaagttcgagccatgggagctaccagagaagtcgttcttgccgaagcgtgacctggagtggttcttcttctgcccacgagaccggaagtatccgaacgggtcgcggacgaacagggcgacgagcaccgggtactggaaggccaccggcaaggatcgcaagatcgcctgcgccggcgaggtcttcggcctccgcaagacgctcgtcttctacaagggtcgcgctcccggcggcgagcgcaccgactgggtcatgcacgagtaccgcctctgccaggacctcgcccatggcgtctccaacttcatcggggcgtacgcgctgtgccgcgtgatcaagaggcacgaggcgggcctccatggcgagccgccggcggcgaaggcgaaaggaatgatcagcaaggtgtcgagcagctcgtcccttgtcaccgtcgaacaccagctcagcagccggggcaacgcctcgccgtcgttcacgcccaccaacaatggcagcccgctcgtcgacgagatgttcgtcggcggcggcggcggcgacccgttccagctgcttccgagctgcgtcccgtaccatggcggcgacgcgtgcgggttcgacttgccgccgctgtgcatgcctcagactcaggacccgttcttctccgacgccggcttcacgcaggcagcgcctcctctctacggcgacgtcatgggaagcgtgtcggagcacgagctcaagtgggacaccctgggcggctactccggcggcggcggtggggagctctggaacgcggcggcggcgccgctgctgtgcaggcaggccagcgacggcgacgacctcacggcgtggttcacggccgccgacgacaacatgtccgtcttctga

SEQ ID NO: 4422 - DNA, 791 bp, Oryza sativa
  Clone ID: PAT_MRT4530_11307C.1
gtatgcctactgctgttcttgcatttgtcaaagcatgtcttggagttgcgtcatgttttgtcgcatggcctccatgtcgaccggtcgaagggtctcatgacataccgccaacatgtacaaaatgtgtttaattggaaacaacactagaacgttcccgaagtcacaagttttctcggcctagctgattattatcatcgattcatcaaaaacttctctaaaatcacaaggcccttgactcaactctttaaaagagaacacaaatttgagtggtctgagatatgcgaattaagccttcatgaattgagaaaaaggctcaaagcagccctagtgctagtgatgccagatattcatgaaagctttcatatttactgtgatgcatctcgacacggacttgattttatattaatgcaagagggcaaagtggtggcttatgcttcacgtcaattatccaacccatgatttggaattagcggccgtagttcatgctctaaagatttggcatcattatctaataggcaactgatgcgaaatcttcatcgatcataagagcttgaaatatttcttcacccaattagatctgaatctgaggcaaagaagatagttagaactcatcaaggattacaatcttggcattcattaccatcccgaaaaagctaatgtggtagcagatgctctcagctgaaagctacatcacattaccacctctgtccaagttgatcaaccgaagttactctctgatttttagaaactcaatttggagattgtagatgaaggttatgttgctgctttag

SEQ ID NO: 4423 - DNA, 4062 bp, Oryza sativa
  Clone ID: PAT_MRT4530_11308C.1
atgtcaagtaaggtcacatttcagatagttcacggtgaaggaaatattagatttggtccagatggtgttgatctgtcagattttgtaatgacatctaagggcatcgataggcctgcggagagaacatttcagtcaatttatagttggttgttgagaggatttagaatagaccaagaagtctacacaatgtcagtgtcagttgtagtgagtcgtgcaacagaaggttatttttgggaactaatgccgatggacagcactgatgcttggagacggtatgtggaaatggcttttgaacggtcatggcccctcgttatatttgtgtcggtacaagagaaagatataaatgtttcaatgcaaaccgaagatgtagagggtcctatcaatgcaggggatgttggaccatcgatgcaaaatgaggaaaatcaaccaagggaggagcaggctatgggcatggcggatgagggggagagagtcggtataattgttgatgaaatggagagggaagattcggataatgaggaagtggacgacgacgcatcatccgatgaggaaggtgatgtaatggccactgattgggcaaatgaggacttctctggacttgttatatcagagggtgatcatgtaccctgggagtataaggagaacgaggtaattgagggtgcaagatatgctcataaggatgagatgaaggaggcggtgaagcattgggcagtttccttgcagagagagtttagggtggtcaagtcaacaaattatgtgtatgaagtgaggtgcatgaaggaagattgtccgtggcgtgtccatgcatataagggtaaatggaatgattattggaaagttagcattgtgaccgagcacaagtgctacttacaaggggtggagaagtatcaccgaaacatcacttcagcttttgtggcaagtgagatgtacagcagtgttgttggtaacattggctttgaaccaaaatcaattattaggcacatcgagaacaaattcaagtacaccataagctatgcaaaggcctggagagccaaacaaaagatcattgagatgaggtatggcacatttgaagcttcttatgataatttgcctcgtttgttagccaccattgcccagaggaataataatacgtactatgacctacatacatttacatcggttgatgatcgaacaaagagtgtgctgcaaagagcctttttctcattgggtgcttgcatcaatgcttttgtgcattgtcgacctgttctatgcatagatggaacttttatgacaggtaaataccgaggtcagatattgacagcaattgggtgtgatgggaacaaccaggttctacctatggcttttgcatttgtagagagtgagaacactgaaagctggtactggttcctagagagagtgcacattgcagtggtgcgtatgaggcccaacgtttgccttatacatgatcgtcatgcgggtatgttgcgggctattgactacttgcagaacggttgggatgagaagggacttccaactaagtggcctgatgttcggagtcggtggtgcatgcgtcacatgggtgcaaatttctacaagcaattcaagaacaagcatcttatggagctctttaagaggctctgtgcacagaaccaagagaagaaatttaatgagttgtgggacaagttggatgagttgataacgaagcaaacagatgagcaatctcgcagtccactagttgaaggtgacgagcctcccatacctcttggtgcattacatgatgacccaccaacaatgagaaggaggtcagggtcgtccatcagaaatttcactcagtggattgagaatgagcctaaggagaagtggtctctattgttcgacaccgatggatctcggtatggcataatgacaaccaatttggcagaggtgtacaactgggtaatgcgaggagttcgggtacttccattggttgctattgttgaattcatccttcacggcacgcaagcgtactttagggatcgatacaaaaaaattggtccgtccatggccgatgacaacatagtgtttggcaacgtagtgacaaagtacatggaagacaaagaggatatcactgcgcgcttcgagcaggtgatgcgccttccacacctaggaccgaccaccacccttcctccgtactctacagtcgggcctagcaaggcttggttgctccagttcactgcggaccttctacaccctgacgctgatgattactcggtccgacgctcccttgaggcgtacctgttgtggttgttcgggtgggtgatgttcactagcacccacgggcacgctgtggacttccggctggtccactacgcacggtccatcgcggatgctcagccacaggacgtgccgcagtggagctggggttctgccgtgctagcagccacgtaccgtgccctttgtgaggcgtgcacgaagactgacgcgggagcgatcatcgctggctgccctatgttgcttcagctttgggcagccgagaggtttgccataggtcgaccagtggtggacagcgcaccctatggggttggtcgcagcgcgcagtggccagaggacggtcccacgatggggacttactggtgtcgacgtgggcgtcgttacgctcacgtccaggtgagacgtggttacccggacttcgtgttcgagtttgaccgtctccagccgagcgacgtcatctgggagccgtacacagaagaggccgtcgctgcgagagcaccgctaggactttcgtccttgtgcacacgcgaccaggcttactggctcaccatcctgccgatggtgttcgacattttcgttgagcctcactgcccgcagcgtgtgatgagacagttcggacttaggcaggtgtttccgggcaacgtgcagccgaccgtcctccctgccgaccactcgttgactcgacggggacagctagcaggcgcactttgggctccacgtgtacagcagtacgttgacgactgggtgttagctacagaggaggtgatcaacgagctcttcccacacacggaggagaactaccgtgactaccttcgttggtaccttcctcgcactcgtgcgcgtgtgaccttcactccagacgccccagagccgcacgttgccgctgtcacggacgcgtatcccacgcaccgtgaccgagactacttcgtggcggctgatgccgcacgggatatcagtgccgatatcactgcagtccaagtgaggttgaacagaggtttgcacttgactgacgttgagcagagggtgaccttcgaccggatgcaggagaagatgcgtgcggtcatgcgcgtcttctcctgtcgcagcgccgtggacgtcgtacctccagctggtccggtacaaccacggcctcgcgcgcctaccgtcggagcaggacctcgacctacggcacctatttcgcacggacctcgtctgccttcgagcgcgttcgcaggcacgaccggcgcttccacgagctccgcaggggcgttcgccacctcttcgggcgcgttcgccagctcttcctctcacggagcgtcgatccctcgcccacacgcaggatttgcagccgggatcttcggtactggggcctcttcgtctcacgccggtaggactggtcctactagccagttctatgacgacgacttgcacggtgcagaccaccacgacgtactaggctcctctcagcttggaggagctccagaggcacacactcaggagcagccagaggtcacacctgtacaggcaggacgggttggccgtgccgtacccccggaccgactcacgtactcccacgggcacattagggcgcagggtaggagggacagggagcacagtacaaaatcgcccttgcggagggcggcaagggggccgcctgcaaaattccatgccccctcgccgcccatttgcaggcggccccccgcacagtacaaaatcgccctcgccgagggcggcaagggggccgcctgcaaaattccatgccccccctcgccgcccatttgcaggcggccccccgcacagtacaaaatcgccctcgcggagggcggcaagggggccgcctgcaaatttcgttga

SEQ ID NO: 4424 - DNA, 3966 bp, Oryza sativa
  Clone ID: PAT_MRT4530_11309C.1
ctatcggcctcttctaggtcggtcagaatgcattgcattctcgtggtccttcaatcgttgatactctacttgtgtttctaactctgttatcttctggccttgatatgatggagtgacattgtcgatccatcgagtaaatccacacatccttggattgccctgccattctaaagcctcagcagcaattcgacgttcatgctcatccttccgccttaggtagtccgatcttgtttcactacgtgggtatgcacgtgttccgtcgttttgtgggttctccatgtctacccagtcgatgaagttgcacattggacgatatgtgtcgtggtggtgtgcaccgtgcaagtcatcatcgtagaactggctagtaggaccagtcctaccggcgtgagacgaagaggccccagtaccgaagatcccggctgcaaattcgtgtgggcgagggattgacgctccgtgagaggaagagctggcgaacgcgcccgaagaggtggcgaatgtgccggaagtgctggcgaatgcccttgcggagctcgcggaagcgccggtcgtggctgcgaacgcgctcaaaggcagacgaggtcctctaggctgaactgtaccgtgcgaaaccggtgctgtaggtcgcactgctccgaagctaggggcgctcgaaggcaaatgaggtccgtgtgaaacaggtgccgtaggtcgaggtcctgctccgacggtagacgcgcgaggccgtggttgtactggaccagctggaggtatgacgtccacggcgctgcgacaggagaagacgcgcatgaccgcacgcatcttctcctgcatccggtcgaaggtcaccctctgctcaacgttagtcaagtgcaaacctctgttcaacctcacttggactgcggtgatatcggcaccgatatcccgtgcggcatcggcccccacgaagtagtctcggtcacggtgcgtgggatacgcgtccgtgacagcggcaacgtgcggctctggggcgtctggagtgaaggtcacacgtgcatgagtgcgaggaaggtaccagcgaagatagtcacggtacgtggctgctagcacggcagaaccccagctccactgcggcacgtcctgtggctgagcatccgcgatggatcgtgcgtagtggaccagccggcagtccacagtgtgcccgtgggtgctagtgaacatcacccacccgaacaaccacaacaggtacgcctcaagggagcgtcggaccgagtaatcatcagcgtcagggtgcagaaggtccgcagtgaactggagcaaccaagccttgctaggcccaatggtagagtacggaggaagggtgttggccagtcctaggtgtggaaggcgcatcacctgctcgaagcgcgtagtgatatcctccttccacccaaaaacaccgtccacgggaccaactggtgctccggccagcggtagcccgagcaggtacgacacgtcctgcagtgtcggagccatctccccacagggaaggtggaacgtgtgcgtctcaggtctccagcggtctaccagagcggcaaggagtgaccggtctgcatcccaccgcttcgctgggtcacggtcatctgccgccgcctcaacaagcctacaaagtggtagaagtcctgccgcacgcaaccaaggaacgtgacgggggtcgacacgcaaccactcgcgcgacgtgcgtggacggaaggtgccgagctgtgcaccctcgactgctgacaggaacgagcggtggttcctgtcaatcccacggttcaacagcgccggtgtgtcgtacgccatactgcagcgtaaagtcctcccacctgcttctgactcatcaatatcatttctgatgcgtctaatttggcgtcgaccctttttcacccttaacttagatggatctcgcctgctcattacccagttgtacacctctgccaaattggttgtcattatgccataccgagatccatcggtgtcgaacaatagagaccacttctccttaggctcattcttaatccactgagtgaaatttctgatggacgaccccgacctccttctcattgttggtgggtcatcatgtaatgcaccaagaggtatgggaggctcgtcaccttcaacttgtggtctgcgagattgctcgtctgtttgcttcgttgtcaactcatccaacttgtcccataactcattaaatttcttctcttggttctgtgcacagagcctcttaaagagctccataagatgcttgttcttgaattgcttgtagaaatttgcacccatgtgacgcatgcaccaccgactccgaacatcaggccacttagctggaactcccttctcatcccaaccgttcttcaagtagtcaatagcccgcaacatgcccgcatgacgatcatgtataaggcaaacgttgggcctcatacgcaccactgcaatgtgcactctctctaggaaccagtaccaactttcagtgttctcactctctacaaatgcaaaagccataggtagaacctggttgttcccatcacacccaattgctgtcaatatctgacctcggtatttacctgtcaaaaaagttccatctatgcatagaacaggtcgacaatgcacaaaagcattgatgcaagcacccaatgagaaaaaggctcgttgcagcacactctttgttcgatcatcaaccgatgtaaatgtatgtacgtcatagtaagtattattattcctctgggcaatggtggctaacaaacgaggcaaattatcataagaagcttcaaatgtgccatacctcatctcaatcatcttttgtttggctctccaggcctttgcatagcttatggtgtacttgaatttgttctcgatgtgcctaataattgattttggttcaaagccaatgttaccaacaacactgctgtacatctcacttgcaacaaaagctgaagtgatgtttcggtgatacttctccaccccttgtaagtagcacttgtgctcggtcacaatgctaactttcgccgccgccgccgtcgtcgtcgcgctcaagcgagtgcgggagcggcgtgagcgaggtaagactggacggagagcactgccaggttctccggaggagatgtcgaagagggtgatggtgacgctggcggcggcgggaggcggattgggcgccacgaacgcgaagccgtccgccggcaacccaccggagaggttcgtgctcctcacgccgaacgtcgacgactgccgccaccccgtgccacggcggtcgaacgacactttgcactcgaacctcggcgcgtcgccgtgcccgtgggccgccgcctccacggcgagaacggtgccgacgaggccggcctcgccggcctgcgcgacgttgagcaggaacaggtggctgccgcggccgtcgtcgtccaggaggctgaggacccgcttgccttcctggagcgggacgccgaccgccgccctgcggcgccacatcacggtggccggccagccgtgcgtgccggtgaagtgggcgagcagcgcggcggtggcgccggcggcgaagccgcagccgggctcggggcagaagcacggcgcgtgggggcacccggcggcgtggccgtggctgtcgtggtagggcgtcctggcggcgcagccgtgggcggcgttggggcagggcaccgtgatggcgtacaggatgtggtcgacggcgacgcagcgccggtagccgccgtcccggctgcacatgtggcagcggcttgtgtcgaggagcttgccatggcaggacgaacgacagctcaagtagcctaatgcaaaatctccttcactccaggtctccagtcctccgccatctccatcttcttcggccgtcgtcattaaactctctcgtccaatcaacttcaccttctccgccgcctggaagacggggggttggaggggattgtagcagatggtgcagtcgagagcgtccagatcgatggtggcgacggagctcctctgcctgctggatccagtgctcgtcgtctccat

SEQ ID NO: 4425 - DNA, 1317 bp, Oryza sativa
  Clone ID: PAT_MRT4530_1130C.1
ccatcaaattatttctccattttattcagcaggcaacaaactaaaagaacccaatgggatcaatggaacaatcaggaattcagcagctagcaatatacaaacaatttgatccaaaagaatcaacaattgcatagatctgtcgttgctaatgctaaacaatcatcagttcatcaccagagagctaggcagttcaattcacccatgtcaccggcgtctcatcgtcgccgccaatgcgccccgaaacgccgatgcgcgcctatggatctcgagatcttccactccggcggcgtcgccgtcgtccgcccggcgctgcaccgccggcggcaagtcggtctcctccggcgccaacgccgagtggtcctctctcgcgagcaacacgttgtggagcattgcgcatgtcccgatgcacgccacggcggcgcgagggctctcctcgtcacggaggcgagcgatggcgccccatcccttcaggctccggaccgtgcgcctcgccttgcggcacgttgcgtcgtgcgcggcgttgaactccgcctccggcgagccgggcaccgctggcccccggaacggcaccatgagccaggggagaagagggtacccgtcgccgtcaccggcgaggtactggccgtggtcgagcaccttcccctgctccagctcctggtacagggacgagagcttgagcacctcgagatcggtgcggtcgccgcggaacccggcggcgagggagaggacgcgggaggaggcgccggccacgagctgcgcggcgaggggcccgtccgggccgtcgaagcgcgcgcaggcgagcgcgccgcggcaggacgggagaggggaggacgcggcggcgctgctcggctcggcggggaacgcgagccagaatcggaagttcgcgaggagcacgcggcggaggcggcgcgaggcggcgcgcggcgccgatgcgggcacccggaagagcgccgcgagcgtcgcgtagggcaaccccgtggcgaggcgcgcgagcgcgagcgcgaggagcgtcgaggacgggagcgaagggtgggagaggagcgggtcgaggaggcccgcgaggaagttgaaggtgggcgccgacacccggaacgcgagcgggtagtggtccgggctcgtcggcggcaacggcagcggctccggctccggctgcagcgagggaggcggaacggggtccagttcctcgacgtcgaggcgcctgcgcttgcgggcggagggggcgggggggtcgaggaggacgaggagcgcggcggcggcggcggtgaggtggtgggtgaggaggaggaggaggaggggggtggtgggaggcggcgtcat

SEQ ID NO: 4426 - DNA, 1059 bp, Oryza sativa
  Clone ID: PAT_MRT4530_11310C.1
aaggtgaacttcactgatatcagagtaccttgtcacgagggcatatcagagagaatatcagacaaaactgctgcttataagcacaaattattcacagattggaatactagatgtgatacatcactgtcaatccgtaggcagaattgatactacaaaaagcatcctactcagactatactatgatttctaagaatgcatagctataacgtccacttattcgagcagtaatcgccagcaaaatggaacagcatcccttgatctccagaaggcatccctcttctattgctagaccttggaacttcagaggggaaataagcgtcgcctactctgaaatctgacactgggttgctacatccaccaaaagttggtgtcgacagcaacatagaattacgagcactgaaacaaggatccggtgagaactcggagccatatcgtgaaagtgacagatttgccctgaaatgatttgagaggttttcccgacttgttgctgtcaaactgaaccttgaacgatagccatcagctgaacacaactcattttgagcaaaagagtctgttggcaaccggaacaaaccagcaagtcccaccggcactttcacgtcatcccgtggtatgatcctgctgcgatactctgctggttctggtagcgccaatatttcctggctaggaaacgttgacatgcaaagtgaaagctctgtgtctctgactggcgaatcatccgttgcgtagtgatactctggtgctggaagtgctaacatttccaggctaggtggacttggtttgctcagcttttctctaagggacatcttggcacgttgaagggcctccaaaacacctcccacaccatcacttgaaggttgatgcatctgtgtgtcaatctggttatcagtgtggttgtgaaagcatgatgagctccattcagagactttgcttttaggggtgtcacttgatcggctagcaactgatggtgtgttgatgtagtgctcataagagcaagcatttacatggtagcctgttcaacagtcccagctttcatctactccatcttcattatgtcttgca

SEQ ID NO: 4427 - DNA, 2088 bp, Oryza sativa
  Clone ID: PAT_MRT4530_11311C.1
atgtcagtatctgttgtagtgagtcgtgcaatagaaggttatttttgggaactaatgccgatggacagcactgctgcttggagacggtatgtggaaatggcttttgaacggtcatggcccctcgttatatttgtgtcggtacaagagaaagatacaaatgtttcaatgcaaaccgaagatgtggaggttcctagcaatgcaggggatgttgttggaccatcgatgcaaaatgagaaaaatcaaccaagggaggagcaggccatgggcatggcggatgagggggagagagtcggtataattgttgatgaaatggagagggaagattcggataatgagcaagcggaggacgacgcatcatccgatgaggaaggtgatgtaatggctactgattgggcaaatgaggacttctctggtcttgttatatcagagggtgatcatgtaccctgggagtataaggagaacgaggtaattgagggtgcaaggtatgctcataaggatgagatgaaggaggcggtgaagcattgggcagtttcattgcagagagagtttagggtggtcaagtcaacaaattatgtgtatgaagtgaggtgcatgaaggaagattgtccgtggcgtgtccatgcatataagggtaaatggaatgattattggaaagttagcattgtgaccgagcacaagtgctacttacaaggggtggagaagtatcaccgaaacatcacttcagcttttgtggcaagtgagatgtacagcagtgttgttggtaacattggctttgaaccaaaatcaattattaggcacatcgagaacaaattcaagtacaccataagctatgcaaaggcctggagagccaaacaaaagatcattgagacgagatcgaacaaagagtgtgctgcaaagagcctttttctcattgggtgcttgcatcaatgcttttgtgcattgtcgacctgttctatgcatagatggaacttttatgacagagagagtgcacattgcagtgaccgagactacttcgtggcggctgatgcggcgcgggatatcagtgccgatatcaccgcagtccaggtgaggttgaacagaggtttgcacttgactgacgttgagcagagggcgaccttcgaccggatgcaggagaagatgcgtgcggtcatgcgcgtcttctcctgtcgcagcgccgtggacgtcgtacctccagctggtccggtacacccacggcctcgcgcgcctaccgtcggagcaggacctcgtttgtcttcgagcgcccctagcttcggagcagtgcgacctacagcaccggtttcgcacggacctcgtctgcattcgagcgcgttcgcaggcacgaccggcgcttccgcgagctccgcaggggcgttcgccacctcttcgggcgcgttcgccagctcttcctcccacggagcgtcgatccctcgcccacacgcaggatttgcagccgggatcttcggtactggggcctcttcgtctcacgccggtaggactggtcctactagccagttctacgacgacgacttgcacggtgcagaccaccaggacgtactaggctcctctcagcttggaggagctccagaggcgcacactcaggagcagccagaggtcacacctgtacaggcaggacgggttggccgtgccgtacccccggaccgactcacgtactcccaggggcacattagggcgcagggtaggagggacagggtgaacgacatgcttgtcgggctcacaccacgtaccgccaccctctcgctggtcagacgtgccccgttttcagctatgccggaacttccatgccaccacatttacatggctgacgctggagttcagatagccgtcttcgaatccatcgatcttgcatcttggcacccccggaatcaatgccccaagagtagccatctgatcgagttggtaggagcacaactgccaccagatcagatgtgtcctctgtctctacatccctctttccacatggatctgacatctgccaacacggccaacatcagatcgggcaacctaagggagatgatttatgaagagaatagtgttatgggtaaccttaagcttaagggtagaccataa

SEQ ID NO: 4428 - DNA, 3738 bp, Oryza sativa
  Clone ID: PAT_MRT4530_11312C.1
atggcttttgaatggtcatggcccctcgttatatttgtgtcggtacaagagaaagatacaaatgtttcaatgcaaaccaaatatgtggagggtcctagcaatgcaggggatgttgttggaccatcgatgcaaaatgaggaaaatcaaccaagggaggagcaggccatgggcatggcggatgagggggagagagtcggtataattgttgatgaaatggagagggaagattcggataatgagcaagcggaggacgacgcatcatccgatgaggaaggtgatgtaatggccactgattgggcaaatgaggacttctctggacttgttatatcagagggtgatcatgtaccctgggagtataaggagaacgaggtaattgagggtgctaggtatgctcataaggatgagatagaggaggcggtgaagcattgggcagtttccttgcagagagagtttagggtggtcaagtcaacaaattatgtgtatgaagtgaggtgcatgaaggaagattgtccgtggcgtgtccatgcatataagggtaaatggaatgattattggaaagttagcatagtgaccgagcaccagtgctacttacaaggggtggagaagtatcaccgaaacatcactttagcttttgtggtaagtgagatgtacagcagtgttgttagtaactttggctttgaaccaaaatcaattattagctacatcgagaacaaattcaagtacaccataagctatgcaaaggcctggagagccaaacaaaagattattgagatgaggtatggcacatttgaagcttcttatgataatttgccttgtctgttagccaccattgcccagaggaataataatacttactgtgacctacatacatttacatcggctgatgatcgaacaaagagtgtgctgcaaggagcctttttctcattgggtgcttgtatcaatgcttttgtgcattgtcgacctgttctatgcatagatggaacatttttgacaggtaaataccgaggtcagatattgacaacaattgggtgtgatgggaacaaccaggttctacctatggcttttgcatttgtagagagtgagaacactgaaagctggtactggttcctagagagagtgcacattgtagtggtgcgtatgaggcccaacgtttgccttatacatgatcgtcatgcgggtatgttgcgggctattgactacttgcagaatggttgggatgagaagggacttccagctaagtggcctgatgttcggagtcggtggtgcatgcgtcacatgggtgcaaatttctacaagcaattcaagaacaagcatcttatggagctctttaagaggctctgtgcacagaaccaagagaagaaatttaatgagttgtgggacaagttggatgagttgacaacgaagcaaacagacgagcaatctcgcagaccacaagttgaaggtgacgagcctcccatacctcttggtgcattacatgatgacccaccaacaatgagaaggaggtcggggtcgtccatcagaaattttactcagtggattgagaatgagcctaaggagaagtggtctctattattcgacactgatggatctcggtatggcataatgacaaccaatttggcagaggtgtacaactgggtaatgcgaggagttcgggtacttccattggttgctattgttgaattcatccttcacggcacgcaagcctactttagggatcgatacaagaaaattggtccgtccatggccgataacaacatagtgtttggcaacgtagtgacaaagtacatggaagataaaatcaaaaaggcacggagacatagagttgttgctcaaggcacacaagtgcatcgttatgttgaactaattatttttatgtttctgatcaatctattggatgcaggtatggcgtacgacacaccggcgctattcaaccgtgggattgacaggaaccaccgctcgttcctgtcagcatacgagggtgcacagctcggcaccttccgtccacgcacgtcgcgcgagtggctgcgtgtcgacccccgtcacgttccttggttgcgtgcagcaggccttctaccactttgtaggattgttgaggcggtggcggacgaccgtgacccagcgaagcggtgggatgcagaccgatcactccttgccgctttggacgtgtcgtacctgctcgggctaccactggcaggagccccagttggtcccgtggacggtgtttttggctggaaggaggatatcaccgcgctcttcaagcacgtgatgcgccttccacacataggaccgcccaacacccttcccccgtactctaccgtcgggcctagcaaggcttggttgcttcagttcactgcggacattctccaccctgacgctgatgattacttgctttgggcagctgagaggtttgccataggtcgaccagtggtggacagcgcaccctacggggttggtcgcagcgcgcagtggccagaggacggtcccacgatggggacttactggtgtcgacatgggcgtcgttatgctcacgtccaggtgagacgaggttacccggacttcgtgtttgagtttgaccgtctccagccgagcgacgtcatctgggagccgtacacagaagaggccgtcgctgcgagagcaccgctaggactttcgtccttgtgcacacgcgaccaggcttactggctcaccatcctgccgatggtgttcgacattttcgtcgagcctcactgcccgcagtgtgtgatgagacagttcggactgaggcaggtgtttccgggcaacgtggagccgaccgtcccccctgccgaccactcgttgactcgacggggacagctagcaggcgcactttgggctccacgtgtacagcagtacgttgacgactgggtgttagctacagaggaggtgatcaacgagctcttcccacacacggaggagaactaccgtgactacctccgttggtaccttcctcgcactcgtgcgcgtgtgaccttcactccagacgccccagagcagcacgttgccgctgtcacgggtgcgtatcccacgcaccgtggccgagactacttcgtgggggccgatgccgcacgggatatcagtaccgatatcaccgcagtccaagtgaggttgaacagaggacctcatttgccttcgagcgcccctagcgtcggagcagtgcgacctacagcaccggtttcgcacggtactgctcagcccagagcaggatttccagccgggatcttcggtactggtgcctcttcgtctcacgccggtaggtctggtcctactagccagttctacgacgacgatttgcacggtgcgcacggccacgacatactaggctcctctcagcttggaggagctccagaggcgcacactcaggagcagccagaggtcacacctgtacaggcaggacgggttggccgtgccataccatcggaccgactcacgtactcccaggggcacgttagggcgcagggtaggagggacagggatgttacgcagacatatctcaagtgggtacacatggagaatccacaaaacgacggaacacgtgcatacccacgtagtgaaacaagatcggactacctaaggcggaaggatgagcatgaacgtcgaattgctgctgaggctttagaatggcaggaggatgtaaggaaatgtcaattcgtacaatggattgacacagtcagagttacttcgagtggcgggccgataacgcaacctgaaccgaccatatag

SEQ ID NO: 4429 - DNA, 1099 bp, Oryza sativa
  Clone ID: PAT_MRT4530_11313C.1
gggctgcaggattcggcacccggccggggagagcccgagaaggcggagaccccgggagcagaggggagagcagcgcagccgccatggaccgcgtgcagctcgtgctcctcggcctccccatcctcctcttctgctccgacctcgtcacgctcttcgggccggagcagctgcccaccccgcagcccgacctgccgccccaccccagccccgacgcggcctccgacgccgtccagcccgacgacatcgccgccgatgccgccgcttccgcgcagattgctgagccgcaggtggatgggcctgcctccggcaccaccgtcgagttgaagttctgcgcctcctgctcttataggggaaatgcagtcaccgtgaagaagatgctggaaacctcatttcctggtattcatgtcgttttagaaaattaccctccaccattcccaaaacgcgcactcagcaaagctgtaccttttcttcaagttggagcaatggcaacattaatggccggtgatcagattttccctaggtttggaatggttccacctccatggtactactcgctccgtgctaatagatttggaacaatggcaacaatctggctgtttggcaatttcgcccagtcatttctacaaagttctggtgcctttgaagtttactgcaatggacaattggttttctcaaaattatccgaacagagatttcccagcgagtttgagctacgggagctcattggcaacaggttaccagattctcaattcgggaaaaatctggaaaaggtttggtcatagatgttgatgtcaagagagcccacttcatttacctgctatttaattgatagaaccgcttgaaagtttacgcctaattgtcaatcacatgctatttgtcttcttcttttgtgaaggcaggtacttttctttttgttgtaaataatgttttaccctcgcaaagaaagtgaaggagttctgtggctatgttagtttgttagaactgtcatatttactcaaagaggatgtgaaccataacgccccttctcgagtattcctaattaattatcagaaataattactctgacttaggattggaaaaaaaaaaaaaaaaaaaaggg

SEQ ID NO: 4430 - DNA, 358 bp, Oryza sativa
  Clone ID: PAT_MRT4530_11314C.1
aggtataccctctacccttcgatgtatgttgtatatcgatacggtatacctgtgcgtacacggatgtttcctgtacgcattaaggaaattcatcgtgtaacaaaaacggaatccacggacggaaggagtcctactcggactgaactgggtctttactgtatcatgtggggtctgatatctccaagttctacttggagatcaactgacccgcggtataaaagggaccccccgggaggacctaaggcatcgaatctcatcgccaacacaaccaccacagcctacaaagtcggagcctacaggagccaagtcgccggatgatctagtcgaaccaactcgactacagtctcgtcggtatcat

SEQ ID NO: 4431 - DNA, 555 bp, Oryza sativa
  Clone ID: PAT_MRT4530_11315C.1
cggcacgaggagaacttctgaagtaaaaaattgtaattcctgcatatgcacaaccaaacttgatgaatggatatagaattggtgcagatgtgccgtgttaccaaagatattcaggaaatacagcatgttaagattgctataaatttattatttttaataaaaacttatgtttcatttttctgtggtgcttttattagtattctccttgtaatgggtgagtctatacatttttttcttgaaatttccgaattgaatgctttttatggacaatgtcacataagtgccactattatgtagtggagtttaaaccttaatattgctgctattatttccttagtggctgaagagtagcactgcaagagctcacactttgatagccttccatattttccatgtcttaatcccagtggtttgatgaatatttgtattgatggctattgattattagatgaaaagctcctatggttataactagatggatggccttaaacaagtactaatgttggtcatataaacattcatttctggttaaaccttttcaggcttcatgttagt

SEQ ID NO: 4432 - DNA, 1968 bp, Oryza sativa
  Clone ID: PAT_MRT4530_11316C.1
atgaaggaggcggtgaagcattgggcagtttcattgcagagagagtttagggtggtcaagtcaacaaattatgtgtatgaagtgaggtgcatgaaggaagattgtccgtggcgtgtccatgcatataagggtaaatggaatgattattggaaagttagcattgtgaccgagcacaagtgctacttacaaggggtggagaagtatcaccgaaacatcacttcagcttttgtggcaagtgagatgtacagcagtgttgttggtaacattggctttgaaccaaaatcaattattaggcacatcgagaacaaattcaagtacaccataagctatgcaaaggcctggagagccaaacaaaagatcattgagatgagatggaacttttatgacagaacggttgggattagaagggacttccagttaagtggcctgatgttcggagtcggtggtgcatgcgtcacatggaaccaagagaagaaatttaatgagttgtgggacaagttggatgagttgacaacgaagcaaacagatgagcaatctcgcagaccacaagttgaaggtgacgagcctcccatacctcttggtgcattacatgatgacccaccaacaatgagaaggaggtcagggtcggccatcagaaatttctctcagtggattgagaatgagcctaaggagaagtgggctctattgttcgacaccgatggatctcggtatggcataatgacaaccaatttggcagaggtgtacaactgggtaatgcgaggagttcgggtacttccattggttgctattgttgaattcatccttcacggcacgcaagcctactttagggatcgatacaagaaaattggtccgtccatggccgataacaacatagtgtttggcaacgtagtgacaaagtacatggaagataaaatcaaaaaggcacggagacatagagttgttgctcaaggcacacaagtgcatcggtatgaaataatgtgtgttgataggagcaggcgtggtatctatcgcaagcaagccgtgcaggaatgtgtcttgaaggcggatggtggatgtacctacagttgtatgaagccgaagcttcattaccttccttgctcacacgttcttgctgctgccggtgattgtggcatatctcccaatgtgtacgtctcaaattatttcaggaaagaagcaatctttcatacatggagtgaggagatatatgggttcgggatctcaggatcttacacaacgctgagtgcccaagttttttatattccagatccatctaagtttagggtgaaaaagggtcgacgccaaactagacgcatcagaaatgatatggatgagtcagaagcaggtgggaggactttacgctgcagcaagtgtgatctgcgcggccatacttacaagacatgcccgaagaatgcagaagttccaagcggcgcagatgctagtccatctggacaggcaagtgatggagaagatgcgtgcggtcatgcgcgtcttctcctgtcgcagcgccgtggacgtcgtacctccagctggtccgcaggatttgcagccgggatcttcggtactggggcctcttcgtctcacgccggtaggactggtcctactagccagttctacgacgacgacttgcacggtgcagaccaccaggacgtactaggctcctctcagcttggaggagctccagaggcgcacactcaggagcagccagaggtcacacctgtacaggcaggacgggttggccgtgccgtacccccggaccgactcacgtactccccggggcacattagggcgcagggtaggagggacagggttcttttcattcgtatggtgcttgaacaacttatgctcacaacaacacactttcggcgcttcacggtagtgccatatccagtagcgcgcacagtccacaacagcacacatgaaaagcggcagctcgagttatcactatcaactttcggcgctgcctgttga

SEQ ID NO: 4433 - DNA, 4585 bp, Oryza sativa
  Clone ID: PAT_MRT4530_11317C.1
gttagttaggatagtaataataagcagatgctagttaaatttgtaatttgttatacgtacaacgaaatcgtcgtcttctttgggggcaaacaaagtatctcctgccaattgtttattttgcaaacgaggtagccgcctggcagcgatctttacaaccacactttggacgctccgaccatttaggtaaacctaatggattgttcctccagtctaagcttgcaatttgtacctgacgttcgtactccatccatccctgaatgaagatgaaatcgtcgtcgtaatgttaggacacacgaagcatctttgtcctcgagttcgttgtcttacagaccttatcacctgacaatggtcaccacaacgacactctggacgttcccgccatgtggggagtcccaggggatttacctgccattctaaagcttccgcaacaatttgacgctcatgctcatccttccgccttaggtagtccgatcttgtttcactacgtgggtaagcacgtgttccgtcgttttgtgggttctccgtatctaccccactcaatgtagttgcacattggacgatatgtcagcaaaaggatcgcttcgccagttgagacgctcaaggaatggcgcttccattttcgtgtgttgtgtgctagtgggaaagaagatatgaagaggttgcccctgtccctcctaccctgcgccctaatgtgcccctgggagtacgtgagtcggtccgggggtacagcacggccaacccgtcctgcctgtacaggtgtgacctctggctgctcctgagtgtgcgcctctggtgctcctccaagctgagaggagcctagtacgtcatggtggtgtgcaccgtgcaagtcgtcgtcgtagaactggctagtaggaccagtcctaccggcgtgagacgaagaggccccagtaccgaagatcccggctgcaaatcctgcgtgtgggcgagggatcgacgctccgtgagaggaagagctggcgaacacgcccgaagaggtggcgaacgcccctgcggagctcgtagaagcgccggtcgtgcctgcgaacgcgctcgaaggcagacgaggtccagctggaggtacgacgtccacggcgctgcgacaggagaagacgcgcatgaccgcatgcatcttctcctgcatccggtcgaaggtcaccctctgctcaacgtcagtcaagtgcaaacctctgttcaacctcacttggactacggtgatatcggcactgatatcccgtgcggcatcagcccccacgaagtagtctcggtcacggtgcgtgggatacgcgtccgtgacagcggcaacgtgcggctctggggcgtctggagtgaaggtcacacgcgcacaagtgcgaggaagctcctctgtagctaacacccagtcgtcaacgtactgctgtacacgtggagcccaaagtgcgcctgctagctgtccccgtcgagtcaacgagtggtcggcagggaggacggtcggctgcacgttgcccggaaacacctgcctaagtccgaactgtctcatcacacgctgcgggcagtgaggctcaacgaaaatgtcgaacaccatcggcaggatggtgagccagtaagcctggtcgcgtgtgcacaaggacgaaagtcctagcggtgctctcgcagcgacggcctctgctgtgtacggctcccagatgacgtcgctcggctggagacggtcaaactcgaacacgaagtccgggtaacctcgtctcacctggacgtgagcgtaacgacgcccacgtcgacaccagtaagtccccatcgtgggaccgtcctctggccactgcgcgctgcgaccaaccccgtagggtgcgctgtccaccactggtcgacctatggcaaacctctcggagagggcacggtacgtggctgctagcacggcagaaccccagctccactgcggcacatcctgtggctgagcatccgcgatggaccgtgcgtagtggaccagccggaagtccacaacgtgcccgtgggtgctagtgaacatcacccacccgaacaaccacaacaggtacgcctcaagggagcgtcggaccgagtaatcatcagcgtcagggtgcagaaggtccgcagtgaactggagcaaccaagccttgctaggcccgactgtagagtacggaggaagggtgttggccggtcctaggtgtggaaggcgcatcacctgctcgaagcgcgcagtgatatcctccttccacccaaaaacaccgtccacgggaccaactggtgctcccgccagcggtagcccgagcaggtacgacacgtcctgcagtgtcggagccatctccccacagggaaggtggaacgtgtgcgtctcaggtctccagcggtctaccagagcggcaaggagtgaccggtctgcatcccaccgcttcgctgggtcacggtcgtccgccgccgcctcaacaagcctacaaagtggtagaaggcctgccgcacgcaaccaaggaacgtgacgggggtcgacacgcaaccactcgcgcgacgtgcgtggacggaaggtgccgagctgtgcaccctcgactgctgacaggaacgagcggtggttcctgtcaatcccacggttgaacagcgccggtgtgtcgtacgctataccatcacttgcctgtccagatggactagcatctgcgccgcttggaacttctgcattcttcgggcatttcttgtaagtatggccgcgcagatcacacttgctgcagcgtaaagtcctcccacctgcttctgactcatccatatcatttctgatgcgtctagtttggcgtcgaccctttttcacccttaacttagatggatctggaatataaaaaacttgggcactcagcgttgtgtaagatcctgagatcccgaacccatatatctcctcactccatgtatgaaagactgcttctttccgatgcacttgtgtgccttgagcaacaactctatgtctccgtgcctttttgattttatcttccatgtactttgtcactatgttgccaaacactatgttgttatcggccatggacggaccaattttcttgtatcgatccctaaagtaggcttgcgtgccgtgaaggatgaattcaatgatagcaaccaatggaagtacccgaactcctcgcattacccagttgtacacctctgccaaattggttgtcattatgccataccgagatccatcggtgtcgaacaatagagaccacttctccttaggctcattctcaatccactgagtgaaatttctgatggacggccctaacctccttctcattgttggtgggtcatcatgtaatgcaccaagaggtatgggaggctcgtcaccttcaacttgtggtctgcgagattgctcatctgtttgcttcgttgtcaactcatccaacttgtcccacaactcattaaatttcttctcttggttctgtgcacagagcctcttaaagagctccataagatgcttgttcttgaattgcttgtagaaatttgcacccatgtgacgcatgcaccaccgactccgaacatcaggccacttagctggaagtcccttctcatcccaaccgttctgcaagtagtcaatagcccgcaacatacccgcataacgatcatgtataaggcaaacgttgggcctcatacgcaccactgcaatgtgcactctctctaggaaccagtaccagctttcagtgttctcactctctacaaatgcaaaagccataggtagaacctggttgttcccatcacacccaattgctgtcaatatctgacctcggtatttacctgtcataaaagttccatctatgcatagaacaggtcgacaatgcacaaaagcattgatgcaagcacccaatgagaaaaaggctctttgcagcacactctttgttcgatcatcaaccgatgtaaatgtatgtaggtcatagtaagtattattattcctctgggcaatggtggctaacaaacgagacaaattatcataagaagcttcaaatgtgccatacctcatctcaataatcttttgtttggctctccaggcctttgcatagcttatggtgtacttgaatttgttctcgatgtgcctaataattgattttggttcaaagccaatgttaccaacaacactgctgtacatctcacttgccacaaaagctgaagtgatgtttcggtgatacttctccaccccttgtaagtagcacttgtgctcggtcacaatgctaactttccaataatcattccatttacccttatatgcatggacacgccacggacaatcttccttcatgcacctcacttcatacacataatttgttgacttgactaccctaaactctctctgcaaggaaactgcccaatgtttcaccgcctccttcatctcatccttatgagcataccttgcaccctcaattacctcgttctccttatactcccagggtacatgatcaccctctgatataacaagtccagagaagtcctcatttgcccaatcagtggccattacatcaccttcctcatcggatgatgcgtcgtcgtccgcttcctcattatccgaatcttccctctccatttcatcaacaattataccgactctctccccctcatccgccatgcccat

SEQ ID NO: 4434 - DNA, 4527 bp, Oryza sativa
  Clone ID: PAT_MRT4530_11318C.1
acaggcagcgccgaaagttgatagtgataactcgagctgccgcttttcatgtgtgttgttgtggactgtgcgcgctactggatctgacactaccgtgaagcgccgaaagtgtgttgtcgtgagcataagttgttctagcaccatatgaatgaaaagaaccctgtccctcctaccctgcgccctaatgtgcccctgggagtacgtgagtcggtccgggggtacggcacggccaacccgtcctgcctgtacaggtgtgacctctggctgctcctgagtgtgcgcctctggagctcctccaagctgagaggagcctagtacgtcgtggtggtgtgcaccgtgcaagtcgtcgtcgtagaactggctagtaggaccagtcctaccggcgtgagacgaagaggccctagtaccgaagatcccggctgcaaatcctgcgtgtgggcgagggatcgacgctccgtgagaggaagagctggcgaacgcgcccgaagaggtggcgaacgcccctgcggagctcgcggaagcgccggtcgtgcctgcgaacgcgctcgaaggcagacgaggtccgtgcgaaacaggtgccgtaggtcgaggtcctgctccgacggtaggcgcgcgaggccgtggttgtaccggaccagctggaggtacgacgtccacggcgctgcgacaggagaagatgcgcatgaccacacgcatcttctcctgcatccggtcgaaggtcaccctctgctcaacgtcagtcaagtgcaaacctctgttcaacctcacttggactgcggtgatatcggcactgatatcccgtgcgtcatcagccgccacgaagtagtctcggtcacggtgcgtgggatacgcgtccgtgacagcggcaacgtgcggctctggggcgtctggagtgaaggtcacacgcgcacgagtgcgaggaaggtaccaacgaaggtagtcacggtagttctcctccgtgtgtgggaagagctcgttgatcacctcctctgtagctaacacccagtcgtcaacgtactgctgtacacgtggagcccaaagtgcgcctgctagctgtccccgtcgagtcaacgagtggtcggcagggaggacggtcggctgcacgttgcccggaaacacctgcctaagtccgaactgtctcatcacacgctgcgggcagtgaggctcaacgaaaatgtcgaacaccatcggcaggatggtgagccagtaagcctggtcgcgtgtgcacaaggacgaaagtcctagcggtgctctcgcagcgacggcctcttctgtgtacggctcccagatgacgtcgctcggctggagacggtcaaactcgaacacgaagtccgggtaaccacgtctcacctggacgtgagcgtaacgacgcccacgtcgacaccagtaagtccccatcgtgggaccgtcctctggccactgcgcgctgcgaccaaccccgtagggtgcgctgtccaccactggtcgacctatggcaaacctctcggctgcccaaagctgaagcaacatagggcagccagcgatgatcgctcccgcgtcagtcttcgtgcacgcctcacagagggcacggtacgtggctgctagcacggcagaaccccagctccactgcggcacgtcctgtggctgagcatccgcgatggaccgtgcgtagtggaccagccggaagtccacagcgtgcccgtgggtgctagtgaacatcacccacccgaacaaccacaacaggtacgcctcaagggagcgtcggaccgagtaatcatcagcgtcagggtgcagaaggtccgcagtgaactggagcaaccaagccttgctaggcccgactgtagagtacggaggaagggtgttggtcggtcctaggtgtggaaggcgcatcacctgctcgaagcgcgcagtgatatcctccttccacccaaaaacaccgtccacgggaccaactggtgctcccgccagcggtagcccgagcaggtacgacacgtcaagagcggcaaggagtgaccggtctgcatcccaccgcttcgctgggtcacggtcgtccgccgccgcctcaacaagcctacaaagtggtagaaggcctgccgcacgcaaccaaggaacgtgacgggggtcgacacgcaaccactcgcgcgacgtgcgtggacggaaggtgccgagctgtgcaccctcgactgctgacaggaacgagcggtggttcctgtcaatcccacggttcaacagcgccggtgtgtcgtacgccataccatcacttgcctgtccagatggactagcatctgcgccgcttggaacttctgcattcttcgggcatttcttgtaagtatggccgcgcagatcacacttgctgcagcgtaaagtcctcccacctgcttctgactcatccatatcatttctgatgcgtctagtttggcgtcgaccctttttcacccttaacttagatggatctggaatataaaaaacttgggcactcagcgttgtgtaagatcctgagatcccgaacccatatatctcctcactccatgtatgaaagattgcttctttcctgaaataatttgagacgtacacattgggagatatgccacaatcaccggcagcagcaagaacgtgtgagcaaggaaggtgatgaagcttcggcttcatacaactgcaggtacatccaccatccgccttcaagacacattcctgcacggcttgcttgcgatagataccacgcctgctcctatcaacacacattatttcataccgatgcacttgtgtgccttgagcaacaactcgatgtctccgtgcctttttgattttatcttccatgtactttgtcactatgttgccaaacactatgttgttatcggccatggacggaccaattttcttgtatcgatccctaaagtacgcttgcgtgccgtgaaggatgaattcaacaatagcaaccaatggaagtacccgaactcctcgcattacccagttgtacacctctaccaaattggttgtcattatgccataccgagatccatcggtgtcgaacaatagagaccacttctccttaggctcattctcaatccactgagtgaaatttctgatggacgaccctgacctccttctcattgttggtgggtcatcatgtaatgcaccaagaggtatgggaggctcgtcacattcaactagtggtctgcgagattgctcatctgtttgcttcgttgtcaactcatccaacttgtcccacaacactgcaatgtgcactctctctaggaaccagtaccagctttcagtgttctcactctctacaaatgcaaaagccataggtagaacctggttgttcccatcacacccaattgctgtcaatatctgacctcggtatttactctttgttcgatcatcaaccgatgtaaatgtatgtaggtcatagtacgtatcattattcctctgggcaatggtggctaacaaacgaggcaaattatcataagaagcttcaaatgtgccatacctcatctcaatgatcttttgtttggctctccaggcctttgcatagcttatggtgtacttgaatttgttctcgatgtgcctaataattgattttggttcaaagacaatgttaccaacaacactgctgtacatctcacttgccacaaaagctgaagtgatatttcggtgatacttctccaccccttgtaagtagcacttgtgctcggtcacaatgctaactttccaataatcattccatttacccttatatgcatggacacgccacggacaatcttccttcatgcacctcacttcatacacataatttgttgacttgaccaccctaaactctctctgcaaggaaactgcccaatgcttcaccgtctccttcatctcatccttatgagcataccttgcaccctcaattacctcgttctccttatactcccagggtacatgatcaccctctgatataacaagtccagagaagtcctcatttgcccaatcagtggccattacatcaccttcctcatcggatgatgcgtcgtcgtccacttcctcattatccgaatcttccctctccatttcatcaacaattataccgactctctccccctcatccgccatgcccatagcctgttcctcccttcgttgattttcctcattttgcatcgatggtccaacaacatcccttgcattgataggaccctctacatcttcggtttgcattgaaacatttatatctttctcttgtaccgacacaaatataacgaggggccatgaccgttcaaaagccatttccacataccgtctccaagcatcagtgctgtccatcggcattagttcccaaaaataaccttctgttgcacgactcactacaactgacactgacattgtgtagacttcttggtctattctaaatcctctcaacaaccaactataaattgactgaaatgttctctccgcaggcctatcgatgcccttagatgtcattacaaaatctgacagatcaacaccatctggaccaaatctaatatttccttcaccgtgaactatctgaaatgtgaccttacttgacat

SEQ ID NO: 4435 - DNA, 150 bp, Oryza sativa
  Clone ID: PAT_MRT4530_11319C.1
atggaggagtggcgtggaacaaggcctgccggcttagagcggccacaatggcggagtacagcggcaccgccggaagggcatgacaacgtcggtactgactacaatggcaacgaggtgatagatctcgacaagcacgatcgcaacacctaa

SEQ ID NO: 4436 - DNA, 490 bp, Oryza sativa
  Clone ID: PAT_MRT4530_1131C.1
gttgtttccggagcggacggagccctggggcttttgcatgttcagatcgacgcatccttcctctggacattgctggtaggctgcgattgctgaacaagctaatcaaccgactgtgcttcagatgttcggtggtctgtctcaccttgactctaccttctctgaaggcgtacggcctcgtaacatttgcccatctgtcttatactatgacatgcgcttttccacaatgagctacatgacccagggccttgttaatggtggcatcaacgttccaatgatgtcgcactctccaattgttgctaatgctccaactgagaaaggtggcaaacacttcatgattgatatcctcatgggtggagtgtcagccgtagtttctgagactgctgctgctccgattgagcgtgtgaagctgcttatccagaaccaggatgaaatgatcaaggctgagatgctctcataacatacagggtattgaagactgcttgggcgcact

SEQ ID NO: 4437 - DNA, 4776 bp, Oryza sativa
  Clone ID: PAT_MRT4530_11320C.1
actgttttcacccatagtcatatatatagggaggggctgggctttataggggggaggcaaaaatcgccctcccccagggcggcaagggggccgcctgcaaaattccatgccccctcgccgcccatttgcaggcggccccccgcacagtgcaaaatcgccctcgcggagggcggaaagggggccgcctgccaatttcgttaccggccgtcgcccgagagcgaacggccgtctgccacgtcattttcgccgccctctgggagagcgatttttaaaaatcgccctcccagagggcggcgaaaatgacgtggcagacggccgttcgctctcgggcgagggggggcatggaaatttgcaggcggcccccttgccgccctccgcgagggcgattttgcactgtgcgggggcccgcctgcaaatgggcggcgagggggcatggaattttgcaggcggcccccttgccgccctgggggagggcgattttgtactgtgctccctgtccctcctaccctgcgccctaatgtgcccctgggagtacgtgagtcggtccgggggtacggcacggccaacccgtcctgcctgtacaggtgtgacctctggctgctcctgagtgtgcgcctctggagctcctccaagctgagaggagcctagtacgtcctggtggtctgcaccgtgcaagtcatcgtcgtagaactggctagtaggaccagtcctaccggcgtgagacgaagaggccccagtaccgaagatcccggctgcaaatcctgcgtgtgggcgagggatcgacgctccgtgagaggaagagctggcgaacgcgcctgaagaggtggcgaacgcccctgcggagctcgcggaagcgccggtcgtgcctgcgaacgcgctcgaaggcatacgaggtccgtgcgaaaccggtgctgtaggtcgcactgctccgaagctaggggcgctcgaagacaaacgaggtcctgctccgacggtaggaccgcgaggccgtgggtgtaccggaccagctggaggtacgacgtccacggcgctgcgacaggagaagacgcgcatgaccgcacgcatcttctcctgcatccggtcgaaggtcgacctctgctcaacgtcagtcaagtgcaaacctctgttcaacctcacctggactgcggtgatatcggcactgatatcccgtgccgcatcagccgccacgaagtagtctcggtcacggtgcgtgggatacgcgtccgtgacagcggcaacgtgcggctctggggcgtctggagtgaaggtcacacgcgcacgagtgcgaggaaggtaccagcgaaggtagtcacggtagttctcctccgtgtgtgggaagagctcgttgatcacctcctctgtagctaacacccagtcgtcaacgtactgctgtacacgtggagcccaaagtgcgcctgctagctgtccccgtcgagtcaacgagtggtcggcaggggggacggtcggctgcacgttgccgggaaacacctgcctaagtccgaactgtctcatcacacgctgcggccagtgaggctcaacgaaaatgtcgaacaccatcggcaggatggtgagccagtaagcctggacgtgagcgtaacgacgcccacgtcgacaccagtaagtccccatcgtgggaccgtcctctggccactgcgcgctgcgaccaaccccgtagggtgcgctgtccaccactggtcgccctatggcaaacctctcggctgcccaaagctgaagcaacataggacagccagcgatgatcgctcccgcgtcagtcttcgtgcacgcctcacagagggcacggtacgtggctgctagcacggcagaaccccagctccactgcggcacgtcctgtggctgagcatccgcgatggaccgtgcgtagtggaccagccggaagtccacagcgtgcccgtgggtgctagtgaacatcacccacccgaacaaccacaacaggtacgcctcaagggagcgtcggaccgagtaatcatcagcgtcagggtgcagaaggtccgcagtgaactggagcaaccaagccttgctaggcccgactgtagagtacggaggaagggtggtggtcggtcctaggtgtggaaggcgcatcacctgctcgaagcgcgcagtgatatcctccttccacccaaaaacaccgtcgacgggaccaactggtgctcccgccagcggtagcccgagcaggtacgacacgtcctgcagtgtcggagccatctccccacagggaaggtggaacgtgtgcgtctcaggtctccagcggtctacaagagcggcaaggagtgaccggtctgcatcccaccgcttcgctgggtcacggtcgtccgccgccgcctcaacaagcctacaaagtggtagaaggcctgccgcacgcaaccaaggaacgtgacgggggtcgacacgcaaccactcgcgcgacgtgcgtggacggaaggtgccgagctgtgcaccctcgactgctgacaggaacgagcggtggttcctgtcaatcccacggttcaacagcgccggtgtgtcgtacgccataccatcacttgcctgtccagatggactagcatctgcgccgcttggaacttctgcattcttcgggcatgtcttgtaagtatggccgcgcagatcacacttgctgcagcgtaaagtcctcccacctgcttctgactcatccatatcatttctgatgcgtctagtttggcgtcgaccctttttcaccctaaacttagatggatctggaatataaaaaacttgggcactcagcgttgtgtaagatcctgagatcccgaacccatatatctcctcactccatgtatgaaagattgcttctttcctgaaataatttgagacgtacacattgggagatatgccacaatcaccggcagcagcaagaacgtgtgagcaaggaaggtgatgaagcttcggcttcatacaactgcaggtacatccaccatccgccttcaagacacattcctgcacggcttgcttgcgatagataccacgcctgctcctatcaacacacattatttcataccgatgcacttgtgtgccttgagcaacaactctatgtctccgtgcctttttgattttatcttccatgtactttgtcactacgttgccaaacactatgttgttatcggccatggacggaccaattttcttgtatcgatccctaaagtaggcttgcgtgccgtgaaggatgaattcaacaatagcaaccaatggaagtactcgaactcctcgcattacccagttgtacacctctgccaaattggttgtcattatgccataccgagatccatcggtgtcgaacaatagagcccacttctccttaggctcattctcaatccactgagagaaatttctgatggccgaccctgacctccttctcattgttggtgggtcatcatgtaatgcaccaagaggtatgggaggctcgtcaccttcaacttgtggtctgcgagattgctcatctgtttgcttcgttgtcaactcatccaacttgtcccacaactcattaaatttcttctcttggttctgtgcacagagcctcttaaagagctccataagatgcttgttcttgaattgcttgtagaaatttgcacccatgtgacgcatgcaccaccgactccgaacatcaggccacttagctggaagtcccttctcatcccaaccgttctgcaagtagtcaatagcccgcaacatacccgcatgacgatcatgtataaggcaaacgttgggcctcatacgcaccactgcaatgtgcactctctctaggaaccagtaccagctttcagtgttctcactctctacaaatgcaaaagccataggtagaacctggttgttcccatcacacccaattgctgtcaatatctgacctcggtatttaccaacaacactgctgtacatctcacttgccacaaaagctgaagtgatgtttcggtgatacttctccaccccttgtaagtagcacttgtgctcggtcacaatgctaactttccaataatcattccatttacccttatatgcatggacacgccacggacaatcttccttcatgcacctcacttcatacacataatttgttgacttgaccaccctaaactctctctgcaatgaaacttgccaatgcttcaccgccttcttcatctcatccttatgagcatacctggcaccctcaattacctcgtactccttatactcccagggtacatgatcaccctcttcctcatcggatgatgcgtcgtcctccgcttgctcattatacgaatcttccctctccatttcatcaacaattataccgactctctccccctcatccgccatgcccatggcctgctcctcccttggttgattttcctcattttgcatcgatggtccaacaacatcccctgcattgctaggaccctccacatcttcggtttgcattgaaacatttgtatctttctctggtaccgacacaaatataacgaggggccatgaccgttcaaaagccatttccacataccgtctccaagcagcagtgctgtccatcggcattagttcccaaaaataaccttctattgcacgactcactacaacagatactgacattgtgtagacttcttggtctattctaaatcctctcaacaaccaactataaattgactgaaatgttctctccgcaggcctatcgatgcccttagatgtcattacaaaatctgacagatcaacaccatctggaccaaatctaatattttcttcaccgtgaactatctgaaatgtgaccttacttgacat

SEQ ID NO: 4438 - DNA, 842 bp, Oryza sativa
  Clone ID: PAT_MRT4530_11321C.1
atccccgggctgcaggaatcggcacgagggccaaagtaaagccaggcatgatgccggaggaggaggaggagaatatggctgcaggtgaacacttaaaaggagaaagaaagaaggaggagaatatacaaagggaagttgttcccatctgatctgatccatcatccatctcaatgtgcagcagcagcagaagcagtgtattattctgttgttaggagagaagttcagagaagtaggggtagtccctataagaaaggggaaagaaaaaaaaaagaagaaaccctatccaaacaaaaacaaagggaagagagaagaaagttggagacttggaggaggaaccctccaccaccagcaaagccaatagagggatcatccgccgtaatctatctagccatcaatccatctccctctcctcctctgctctccatgaagagcaaatcctccaggaaggccgccgacgaggatgaggccaagtccaagaagctccgatcctcccgcggcaagcagcggcctaagcagcgccggcgaggccgctgcagcagcacctcctcccgctctgaatccccaccccgcaagcgctccaagaagctcaaggtctctgacaagaagagcaccaagaacaagggccgcagacgccaccacagtcttagccccagccccagcccttcatcgtcgtccgtgagttactcaacgcgcagcagcagcggtggcggcggcggcgcttctgagaggtcggtgagcccaccgcgtaggagccgctctagagatgttaggaagaagaagaaggagagggggagggacagcaagagggtgaggaggtcaagaagatctacaagctattcaac

SEQ ID NO: 4439 - DNA, 5550 bp, Oryza sativa
  Clone ID: PAT_MRT4530_11322C.1
tctagtttccatagctttaagtacattgtcatataagccaaaaggttgagttggcaatagagttaattgagcccctgtagcctggcgcagcaggttagatggagtactacccgcgaacacgtcgacgtattctgccacaagcaatacacatgtacacactgttcggcacgggccggtcgtacgcgtacgttgatcagtacgacgcgcgacggcctgcctctgactgatgatgaggtgacgggagccaaagcagcgtgcggtgcaaagggagcagcagtggcacgcgacgcagcgtgtcggccgatcgcctgcgtagtcccgggtggaaacgggtgttcgatctcccggtgcatcggccgtgaaggccgtggggggtggtatggtgggggaagaggaggaggagttgtcgactccagcggacaggggcgtgcaggtgcagatccgtagggtggcgatgggacgttggaagggacgggagctggcgctcgtgccgtgtggcgtgttgagtggccgagactcctgcttccggaaaagacggccaaaacataggatccgtctgctgaaatttttcactgtttgtgcaaagcactctgctagtaccaatgcgaggaacacgaacacgtggcagacggccgttcgctctcgggcgacggccgtcaacgaaatttgcaggcggcccccttgccgccctccgcgagggcgattttctactgtgcggggggccgcctgcaaatgggcggcgagggggggcatggaattttgcaggcggcccccttgccgccctccgctagggcgattttgcactgtgctggggggccgcctgcaaatgggcggcgagggggcatggaattttgcaggcggccccccttgccgccctccgctagggcgattttgcactgtgctccctgtccctcctaccctgcgccctaatgtgcccctgggagtacgtgagtcggtccgggggtacggcacggccaacccgtcctgcctgtacaggtgtgacctctggctgctcctgagtgtgcgcctctggagctcctccaagcggcttgagatgaagaggccccagtaccgaagatctcggcgtgtgggcgagggatcgacgctccgtgagaggaagagctggcgaacgcgcccgaagaggtggcgaacgcccctgcggagctcgcggaagcgccggtcgtgcctgcgaacgcgctcgaaggcagacgaggtccggtgctgtaggtcgcactgctccgaagctaggggcgctcgaaggcaaacgaggtccatgcgaaacaggtaccgtaggtcgaggtcctgctccgacggtaggcgcgcgaggccgtggttgtaccggaccagctggaggtacgacgtccacggcgctctgttcaacctcacttggactgcagtgatatcggcactgatatcccgtgcggcatcagcccccacgaagtagtctcggtcacggtgcgtgggatacgcgtccgtcacagcggcaacgtgcggctctggggcgtctggagtgaaggtcacacgcgcacgagtgcgagaaaggtaccagcaaaggtagtcacggtagttctcctccgtgtgtgggaagagctcgttgatcacctcctctgtagctaacacccagtcgtcaacgtactgctgtacacgtggagcccaaagtgcgcctgctagctgtccccgtcgagtcaacgagtggtcggcagggaggacggtcggctgcacgttgcccggaaacacctgcctaagtccgaactgtctcatcacacgctgcgggcagtaaggctcaacgaaaatgtcgaacaccatcagcaggatggtgagccagtaagcctggtcgcgtgtgcacaacgacgaaagtcctagcggtgctctcgcagcgacggcctcttctgtgtacggctcccagatgacgtcgctcggctggagacggtcaaactcgaacacgaagtccgggtaacctcgtctcacctggacgtgagcgtaacgacgcccacgtcgacaccagtaagtccccatcgtgggaccgtcctctggccactgcgcgctgcgaccaaccccgtagggtgcgctgtccaccactggtcgacctatggcaaacctctcggctgcccaaagctgaagcaacatagggcagccagcgatgatcgctcccgcgtcagtcttcgtgcacgcctcacagagggcacggtacgtggctgctagcacggcagaaccccagctccactgcggcacgtcctgtggctgagcatccgcgatggaccgtgcgtagtggaccagccggaagtccacagcgtgcccgtgggtgctagtgaacatcacccacccgaacaaccacaacaggtacgcctcaagggagcgtcggaccgagttatcatcagcgtcagggtgcagaaggtccgcagtgaactggagcaaccaagccttgctaggcccgactgtagagtacggaggaagggtgttggccggtcctaggtgtggaaggcgcatcacctgctcgaagcgcgcagtgatatcctccttccacccaaaaacaccgtccacgggaccaactggtgctcccgccagcggtagcccgagcaggtacgacacgtcctgcagtgtcggagccatctccccacagggaaggtggaacatgtgcgtctcaggtctccagcggtctaccagagcggcaaggagtgaccggtctgcatcccaccgcttcgctgggtcacggtcgtccgccgccgcctcaacaagcctacaaagtggtagaaggcctgccgcacgcaaccaaggaacgtgacgggggtcgacacgcaaccactcgcgcgacgtgcgtggacggaaggtgccgagctgtgcaccctcgactgctgacaggaacgagcggtggttcctgtcaatcccacggttcaacagcgccggtgtgtcgtacgtcatgccatcacttgcctgtccagatggactagcatctgcgccgcttggaacttctgcattcttcgggcatttcttgtaagtatggccacgcagatcacacttgctgcagcgtaaagtcctcccacctgcttctgactcatccatatcatttctgatgcgtctagtttggcgtcgaccctttttcacccttaacttagatggatctggaatgtaaaaaacttgggcactcagcgttgtgtaagatcctgagatcccgaacccatatatctcctcactccatgtatgaaagattgcttctttcctgaaataatttgagacgtacacattgggagatatgccacaatcaccggcagcagcaagaacgtgtgagcaaggaaggtgatgaagcttcggcttcatacaactgcatgtacatccaccatccgccttcaagacacattcctgcacggcttgcttgcgatagataccacgcctgctcctatcaacacacattatttcataccgatgcacttgtgtgccttgagcaacaactctatgtctccgtgcctttttgattttatcttccatgtactttgtcactatgttgccaaacactatgttgttatcggccatggacggaccaattttcttgtatcgatccctaaagtacgcttgcgtgccgtgaaggatgaattcaacaatagcaaccaatggaagtacccgaactcctcgcattacccagttgtacacctctgccaaattggttgtcattatgccataccgagatccatcggtgtcgaacaatagagaccacttctccttaggctcattctcaatccactgagtgaaatttttgatggacgaccctgacctccttctcattgttggtgggtcatcatgtaatgcaccaagaggtatgggaggctcgtcaccttcaacttgtggtctgcgagattgctcatctgtttgcttcgttgtcaactcatccaacttgtcccacaactcattaaatttcttctcttggttctctgcacagagcctcttaaagagctccataagatgcttgttcttgaattgcttgtagaaatttgcacccatgtgacgcatgcaccaccgactccgaacatcaggccacttagctggaagtcccttctcatcccaaccgttctgcaggtagtcaatagcccgcaacatacccgcatgacgatcatgtataaggcaaacgttgggcctcatacgcaccactgtaatgtgcactctctctaggaaccagtaccagctttcagtgttctcactctctacaaatgcaaaagccataggtagaacctggttgttcccatcacacccaattgctgtcaatatctgacctcggtatttacctgtcataaaagttccatctatgcatagaacaggtcgacaatgcacaaaagcattgatgcaagcatccaatgagaaaaaggctctttgcagcacactctttgttcgatcatcaaccgatgtaaatgtatgtaggtcatagtaagtattattattcctctgggcaatggtggctaacaaacgaggcaaattatcataagaagcttcaaatgtgccatacctcatctcaataatcttttgtttggctctccaggcctttgcatagcttatggtgtacttgaatttgttctcgatgtgcctaataattgattttggttcaaagccaatgttaccaacaacgctgctgtacatctcacttgccacaaaagctgaagtgatgtttcgatgatacttctccaccccttgtaagtagcacttgtgctcggtcacaatgctaactttccaataatcattacatttacccttatatgcatggacacgccacggacaatcttccttcatgcacctcacttcatacacataatttgttgacttgaccaccctaaactctctctgcaaggaaactgcccaatgcttcactgcctccttcatctcatccttatgagcataccttgcaccgtcaattacctcgttctccttatactcccagggtacatgatcaccctctgatataacaagtccagagaagtcctcatttgcccaatcagtggccattacatcaccttcctcatcggatgatgcgtcgtcgtctgcttcctcattatccgaatcttccctctccatttcatcaacaattataccgactctctccccctcatccgccatgcccatggcctgctcctcccttggttgatttttctcattttgcattgatggtccaacaacatcccctgcattgataggaccctctacatcttcggtttgcattgaaacatttatatctttctcttgtaccgacacaaatataacgaggggccatgaccgttcaaaagccatttccacataccgtctccaagcagcagtgatgtccatcggcattagttcccaaaaataaccttctgttgcacgactcactacaactgatactgacattgtgtagacttcttggtctattctaaatcctctcaacaaccaactataaattgactgtaatgttctctccgcaggcctatcgatgcccttagatgtcattacaaaatctgacagatcaacaccatctggaccaaatctaatatttccttcaccgtgaactatctgaaatgtgaccttatttgacat

SEQ ID NO: 4440 - DNA, 677 bp, Oryza sativa
  unsure (1)..(677): unsure at all n locations
  Clone ID: PAT_MRT4530_11323C.1
ataattaattcacaacaccatatttcattgatcaggttcaaaacctgcacagaaatacacactaccggtacagatcaacataagaaagcaatgcctcttcacaaattgctaaagggctaaaactggttccactaaacagaaacagtgcaaaatcactggaaattcctcaaaattgtgcacatctggggagcggcacctcgtgccgaattcctgcagcccgggggatccactatttctaaaacggccgccaccgcggtggagctccagcttttgttccctttagttgaaggttaatttccagcttggcgttaatcatggtccatactgtttcctgttgttgaaattgttatccgctcccnatnccccccnacatacaaacccgnaaacctaanttttaaaccccgggttccnaataaattnaccnncnccctttattgctttgcccccttgccnctttccattgggaaactttttgccccctgcttattaatccgccancccnggaaaaagnggttnnttttngccctcccctcccccncataaccctgncccgggtttcggngngggaaaggttncnccccagggggtttggttcccaaaccgganaccgaaaaattttccagggcccagggcnaacctaaggccttngtttttttcctggccccccccaaaaaann

SEQ ID NO: 4441 - DNA, 396 bp, Oryza sativa
  Clone ID: PAT_MRT4530_11324C.1
atgacgtggtcactgataggtgggctcacgagcggtgtgaatcatgtagctggaaatatgtttgagagcgtacctaaaggagatgcaattttcttgaagtcgatgctcctacgaaacgatgaggagtgcatcaagattctcaagaactgccactatgctctctcagacaatgggaaggtgattgttgttgatattgttctccctgaaaccccaaaaccggtacccgaagcacaaaacccactccggatggacgttatgatgctcaacaatcttcgtggaggaaagataaggacagagcaggagtacgcgaagctagctatggattctggcttcagtggttccttccggacaacctacattttcgccaactttatggcaattgaactatgcaagtag

SEQ ID NO: 4442 - DNA, 2502 bp, Oryza sativa
  Clone ID: PAT_MRT4530_11325C.1
tgcctctccaatccatcctctgctactttctccaacatttccatgcctcccctccacgcctatctcgggttcttcctcctcctcctcctcctctccttgcacaatccatcatgctccgccgcggcgaatgataccctcgcggtggggcaggtgctcgccgtcggggagaagctcgtctcgaggaacggcaagttcgcgctcggcttctacaagccggcactccctgaaggcgctgcaagtaagtatggcaacatcgcctctcctggctggtaccttgccatatggttcaacaagatcccggtttgtaccaccgtgtgggttgcaaacagggagaggccaatcactgatctagagctcaagctagcacagctgaaattctcacaaaatggcagtagccttgccatcatcataaaccgtgccactgaatacacagtatggtccagacaaattgccaataggacagcacaagccaaaaccagcatgaacactagtgcaattctcttggatagtggaaaccttgtcatagaaagcctatctgatgtttatctgtggcagagctttgatgacgcgacagatcttgtgcttcctggtgcaaagtttgggtggaataaggtcaccgggttgcatcgtaccggtatatcaaagaaaaaccttattgatccaggtctcggctcatatttcgtccaactgaacgagaggggttttatcctgtggcgtcgagatccttacatagagtatttgacctggtcatcggtacaattgacgaacatgctcataccgttacataattcgcaactagagatgaattcacagaccaaaggtttccttatgccatcttatgttaataatgatgaagaggaatacttcatgtaccactcatcagacgaattagcttcctcatttgtctcaatagacatgtctggccagctcaagttgagcatttggtcgcaagttaatcaatattggcaagaactatatgcccaacctcctgatccttgcactccgtttgctacctgcggaccttttggcatctgcaatggcaattcagaacaattttgtgattgtatggagagcttctctcaaaaatcacctcaagattggaagctcaaggatcgaagtgcaggttgcataaggaatacaccattagattgccccagtaataggagctcaacagacatgttccaaacaatagctcgggtcacattgcccgctaaccctgaaaaattagaagatgctactactcaaagcaaatgtgcagaagcttgtctcagtaactgctcctgcaatgcttatgcctacaaagatagcatatgctctgtttggcatagtgaactccttaatgtaaagctacatgataatattgaaagtctttctgaagatactctttaccttcgcctagctgccaaagatatgccagcttcaaccaaaaacaaacgagaaccagttattgcagttgttaccacttgcagcattgttggttttgggttactaatgctcgtgatgttcttcttgatttggcgaatcaaattcaattgttgtggtgtgccattacaccacaaccaaggcaacagtggaataatagccttcaaatacactgatttaagtcatgctaccaaaaatttctcagaaaagctagggtcgggtggttttggttctgtgttcaagggagtattaagtgactcaactactattgcggtgaaaaggcttgatggtttgcatcagggagagaagcaattcagagctgaggtgagctctcttggattgattcatcatataaacctagtcaaattgatcggtttctgctatgaaggtgataagaggctacttgtgtatgaacgcatgataaatggttctctggatgcccatctttttcatagcaatggtaccatcctagactggagcactaggcatcaaatagccataggagttgctagaggattgttctacctgcatgagagttgccacaaatgtatcatacactgtgatattaagccagaaaatatacttcttgaagcatcatttgctccaaaaattgcagactttgggatggcggcatttgtaggaagggattttagccgggttctaacttcatttaggggaactaaagggtatcttgctccggagtggcttagtggagttgctatcactccaaaagttgatgtttacagttttggtatggtattgctagaaatcatatcagggaggaggaatttatccgaagcatacacaagcaagcattatcattttgactattttcctatgcaagccatgagcaaacttcatgggggaagtgtgtaggatttgcttgatcccaaattaaatggtgattttaatttagaagaggctgaaaggatttgcaaagttgcatgttggtgcatccaagaaaatgagtttgataggccgacaatgggtgaagtggttcacattctcgagggtctacaagatgtagagatgcccccgacacccagactatttgcagacatatctgaaaaggtctcctat

SEQ ID NO: 4443 - DNA, 2286 bp, Oryza sativa
  Clone ID: PAT_MRT4530_11326C.1
atgccgcccaaatcgaaggcggcggcggcggcggccgccgccgcggcggcgcagccggtcgccgtggaggacctcttcaccacgctgcaccgccacatcgaggccggcgagttcccgcaggccgtcaaggtcgccgaccaagttctcgcggcggcgccgggcgacgaggatgcggtgcggtgcaaggtggtggcgcacatcaagtccgatgcgattgagaaggcgctcgccgcgatccgcgccgccgagcgcctcccgatcgacctcagctactgcaaggcctattgctactacaggcaaaataaactgcaagaagctctagacctattgaaaggtcaagaagaaacctctgctattcttcagttggaatctcagatttattataggctaggtagaatgaatgattgcatgaatagctatgagaagcttcagaaatttaaggttgagtcaatggatctgaagataaatatcattgctgctctggttgctgctggaagggcctctgaagttcaggcaaccatgaaggcacaaaaagttgatctctcctcgagggcactcagagatactcgaagctttgagcttgcatataattctgcctgctcgttgatagaaaataaaaagtattcagaagctaaagagcagctggacttggcaaaaagaattgggaaagaagagcttatggtggacgaatatggagatgatgatattgaatatgaactagctcctgtgtctgctcagcttgcttatgtgcatcagctacaaggacaaacccaggaagctatggaaacctataataatataacaagcaggaatttggcagatccctcatcacttgctgtggcaacaacgaaccttatctcgttgaaaggaaccagggacgctgctgatagcttgaggaagcttagccggcttattgaaaaatctactgctcccaaccagttgcaacttatcgaaagccttgaatccaagctatcaccaaggcaaaaagaagctctgtattctgcatatgttcttttactcctccacgcgaacaaaattgatcaggcacatgagtttgtcagtggactacttggtatgtttcaggacagcacattccctgttttgcttcaagctgcagttcatgtgagagaaaagaaggtgcagaaagctgaagaagttcttagccagtatgctgagaagcatcctgagaattctaaaggagtcctcctttcgcttgctcagatcgctgccagtgccaatcattttcagattgctgctgattcattgtctaaaatagttgacatccagcacatgcctgctacagtcgctacactagtagctcttaaagagcgccttggtgactctaatggtgcttcttctgtgcttgattctgctatccagtggtggaagaattccatgactgaggataacaaattagaggtgttcatgcgggaggctgctacatttaagctcaaccatgggcgtgacgaagaggcctgccaattgtatgaggatcttgttaagagctttggaagcgcagaagcgttggcggggctagtagcaacttcagcgcgcaccaaccttgagaaagctgaacagtatgagaagaaactgaaaccattgccaggtctcaagggaattaatgttgagagcctggagaaaacttctggtgcaaggccttttgaggcgcccaaacccatggaacaggacgttactgacgaagtgaagaagcagaaggctaagaagaggaagaggaaacctagatacccgaaaggctttgatccagcaaacccagggccaccaccagatccggagagatggctacccaagagagagcggtcaagttaccgcccaaagaggaaggataagagggctcaggtcagaggtgctcaaggagctgtgtcaagagatggaacttcatctgcgagcgccagttcatcttcgaaagcaaaccaagccaccaaagctccagctgcagccccagaaccaccaaagggttccaacaagtcccggaagaaaaaatcgagatgacgacgaatccaaactatcacagttcacaaaatcaaagataccctagactctgttcgtttagcgttttgactcgcaattttggtgttgattgcattgtgttgccggatttgtcatgcttttacaatcatattttgctggccacatccgagtctgtactgttgccaattctgttaaactgatgcagatctgattgaagttccgccctttacatgttagacatgtgcgttagcactcgattttaaaaaattaaaaaaaagggggggctcgtgccgaatt

SEQ ID NO: 4444 - DNA, 806 bp, Oryza sativa
  Clone ID: PAT_MRT4530_11327C.1
gcaaattcaagattgcaattcatgaatcatggagcactggtaattgagtttctgggtaagtgccagtgccacacatacgaagtctgaaactctgaaagtaactgatacatgagcatagagaaagatcatcaaactgacaaatttcatgcggccaatatacacacgcgattgcactactgttccaaattaatcaaccttttttcttttcttttttacccatctcatacataatcacgtagaaacaccagagatccattcagattacattgcatccatccaagatgagaatgatcagaagaagtttgggttgtatccgttgctgcaggtggcgaggatgtagtaggcgacgatgtggccgagggagccccaggcgaggacgtcgacgaggttgaagccgacggggtcgttggaccggagcaggccggcgaactccttggcgcgctcgtcgccggcgtcgaagtgcgtcttgccgttctgctccggcacctgcttcgccacgttctcccgctggaagttgaagaacacgaaccgccccaggaacagggagacgccggtgctcaggctgatcaccagcgacgggctcagctccgccctcgccgccaccgacctcctcctcgccggcgccgccctgaacgccacagacggcgaccgcacgcgcggcgacggcgccagccgcagcccggccacggtcggcggcgacagcgaggtggcggccatggttcttggagcttggagcttgagggtgggtctcgctgcgatcgagtggtggtgctccctcgtgccgaattcggcacgaggcctcgtgc

SEQ ID NO: 4445 - DNA, 435 bp, Oryza sativa
  Clone ID: PAT_MRT4530_11328C.1
atggctcgcgaaatgtctcggcagtggcgcttcaccttggatgaacaacgatggctcgatttcttcaaaggactaccatgcattcatgtctttcgtgttagagaggtccatgcgaggctaccatggcagggaatcggattgggactcaccggagagggagaaatcgaagatggagctcggcggccggagttggagaagatgatgccgatctccaagatcgctgcgccattgggtggggtacttggggatgttggcggtatagaatcggcatttaataactgccaacaaaaccccccacacttagctctttactcgtccctgagtaaagccaaaaatatggactcaagaagatcatcagtcatactcctagatcaagggtctttatttgtggtggaaaatggaaaagcaaaaatattttatggaatgatggaataa

SEQ ID NO: 4446 - DNA, 684 bp, Oryza sativa
  Clone ID: PAT_MRT4530_11329C.1
cttaacacagctttgcttgccaagtggatcatgaaaattgaatcagacgataagagtttgtgtattgagttgttattaagaaaaaagtatttgcatggaaaggggattttccaatgcaactctgataaggggtcccaattttggaaagggcttcttaacataaggagatggatgcaactaggttcagaatggctcttgggggatggcagccacatctggttttggtatgatatttggcatggtacttgccctctcaaaaccatcttccccaagatctttgagatttgtaatcaacaaaacataacagtttctgaggttcctacaaaaggagctgattacctgacctttaggagatcctttggagagattgaggtccaacaatggcaagatttgtgagagattattgatgagatcgaattacaaaactcccctgatatcctgacctggagtctggcggctaataagcagttcactaccaaatctctatatgaagctatatccttcagaggtatcaaagatatcaacatgcaaagagtttggaaatgtcctacggtcctaccccaatgaaaatgaagcacttcatttggctggcaatgaaggacagaattcaatctgcagggcaactaaagaaaaaaggctggggagacactaaaacacacaccaaaatctcatgtcacatgcaca

SEQ ID NO: 4447 - DNA, 719 bp, Oryza sativa
  Clone ID: PAT_MRT4530_1132C.1
ccggccggggcctttaccgtcatcatctcgcctatttcttctcccaaactccggcgactcctccgctaatcccctccggcgccgcctcctctccgctccccgcgccccccacctccggccacgcccgatcggattggttgagttgcctcgagggatttttgctctcgaggtatggtgttcatggcggagctggtgggtccgcgggtgtacagctgctgcaactgccggaaccacgtctgcctccacgacgacatcatctccaaggcttttcaggggaggaatggccgtgcctttctgttctctcatgccatgaatgttgttgtgggcgcgaaggaggacaggcaacttatgacggggcttcacactgttgctgatatctattgcaatgattgccgggaggtgttgggctggaagtacgagagagcctatgaggaaacacagaagtacaaggaagggaagttcatatttgagaagtcaaaaatcgtcaaagagaactggtagaatccaaaagattaggcactccaaactttctttagaggatgaaacattcactgttccaaggttatcagtgtgttctggttctttatgtctttgtaaatatcagtcatccacaagttttaatcttaagtctgcctgttcttgccttgccgcgaaaaataaattgttcttgctcccgtttctttctgtgaatacatatgggctgtgggtatttgttctct

SEQ ID NO: 4448 - DNA, 325 bp, Oryza sativa
  Clone ID: PAT_MRT4530_11330C.1
ttcattagagaagaatcctatttgacttattggatcggcatggtcagcataccgtatgatcaagagatggctttccaaacagctgcttcaatgaggaattcactggagggaccgcctattttgggtcaggttgatcacgggacagaaccacctcagtttatagacctttttcaggccatggtcattctaaagggtggaatcaggtctggataccagaagtccagtgactaaaatggcttgtaggatgaactcatattctagccactgcatccgtctttgctgaatctctggagcatccattgacatcagtatagtgcttaaagct

SEQ ID NO: 4449 - DNA, 289 bp, Oryza sativa
  Clone ID: PAT_MRT4530_11331C.1
acaacgcgtacggcttaaaccttccccggttgtcgtgtggctcaccagagtgaattccaagaatatttatatcagggtgcacttcttagaccattgtggagcgatgaccctcacaggattcatgatattacgcaaggacacgtcggtgctctagcagctggcgacgctcattggacatcgatgacggcgaggcacctattggagccgtgtatgttatacaccaacactactgcgccgatcagattgcacctagggaaagaggggctctctttgccttcaacaccaatcc

SEQ ID NO: 4450 - DNA, 3105 bp, Oryza sativa
  Clone ID: PAT_MRT4530_11332C.1
ttatatcaccaaccattcagtttggctggtggagtcagtcttattaatgaatttcacttctatatcttcttcactctggaactgactctcaataacaccatccatatcgtcgggtgggcactggtctgcattgctccttgcttctgtctggcagaagcactctggccatgagtttgtgtagaaagactctggatggatgcgcttccgcggaccgccaaaatgggcattgaacatgagctgcctgaccctctcctcatagccagatgcacggccttcctccctgtcaatgaatatcctagcaagtgccttcctgtctggtgcgatcgtcgtttggaaaccgtggtacaagcgatgacccatgaggttgtgcgcgaagttgcttggcccatcatatgtgggtatgaaaatgtccgacaggagacagaccatgtaatccactgccgaccacgctagcccttgggtattttcttccagcattccagttccaggtccaaccgtactgtggttttctagatgtggaaacatggcctcgaatggcttcgtgatcatgaggcgatccccagcaaagagcttgctaggagcaaggtagatccttgttgtgttgtcaaatcccatagcacgtagaagaagacccacctcttctggaattaaagggaactttccaatgagccttctttccttgtagacaaatctctttcctggataactttttcccaggagagttagcgtgcggattgctttctttggagcttccttcaagttggcagtggcctcccaccattctaaaacagatgaagctggctgccactgggcggggttcatttgacagcccctggttgccaatcggtcggaggtccatactctattttggatgatcagccagacgaaggtcttgcacttgcgtggagcccacggcttccatatcagatagttgaaattagtcgttgttgtacctaggagttgcgccttgtaggccgacgtcgtcatatattcaccatggctagtgaacttccatactatcttgtccttctcctggatgccgatgaggctgagggaggaggagaagagccaaatagtcccggccaccagcaccgccacggcgacccatagccccgccggtttgtggtgccggcagcaacgcctcgccgcggaggaaggacgtaggagctcggggagtccgtgatggcggcgtcccagctccgtcctcgtcctctgagacgtgggactccacaaggtcatggagggagcagaagcttgaggaagctgcggtggcgtgggaagacgaaggagcttgaggaagcaggagtgttgggttccgccgactgtgtgagcggcttcaccatcagcacgcgacacccgaagcgtacgcagtcgcatgcatcgctcaagtgccagaagcctcaccaagtccatgtttcggagggcgcctttgccgcccatgacggagcataaaatgccggacggctcgtgccttgttgaggtcgaccatgctagcatggcgcgcgacgccctcacggatgtggcggagcaccctgccaaggttgcggcagctgcagaccaaccccgtacatgttcgcggcgtcggcgctgttgttggcgttgaccatgccaacatggtgccgagatcgcactatcatagcagcgtagcttcacctgctgtacaagcggctcgtgcacgtgaagtgtcgcgtcgatgccgtctccaccgccggagtccatgaccccgccgctcctgttcgcgtctcgctcaacgtaccactgcgatgcttctcgcacacgcgagctaggctgctcctcgatggcttgacgcaccctgcttctagggaagatgaccttcgcctgaaaattggagtacagatgtctaacacagaatctgtgttctgaatcagggaaaatctgttggacagctggtataagacccttttgcttatcagtcattattgtccatgggtaggtattgtcaatgcccaggtcttcctttagggtctgtagaaaccatctccaagacctcaatgactctttcagcacccattccttctgacatttatgctccccaagatatgtcttcaccatcattgacttggacctgctatcaaatgatgcatataagttccatgggcaaccctcaacacagtgggccctaagtcttttttgctcattcctaggtatcttgatgtccactctagccttcaaactgtactctgttatggcccttctaagtacttctactgaaggaaacaccatgccaaccttaaaaattgggttcttaacatcctctgccatgaaagccttaaactttaatctcacttcaccatcatcatctaaatctaggagctgcaaatcttcatcatcagtggaaacttcctccccatcagaatttctaactactatttctttccccttcaactgactgcccttagctttcttccgaaactttgccttgcagtcagataagtcttcaacacccacatcaacattgtcaacatacaagtcatcatctgcatctgatatatcatagtcactatccacaaaatctgggtcatcttctaagctaccatcactgtcactgtcatcttgtttgtttggcaccttcctatcagcagttgacatcttcctaggactaagcaccttaggcaattcactaataggattagctactacatcatcccaatctacacctgcaattgtgtcaccctgatcaaagtagataataaaattcttaaccttgtgcacaactgatttcatcacttcaaagtcagccctagtagatataaccctaaggccatcttcaagagtctttccagggagcaaccaataagccttaaaatctggagtcatatcatacccaagcatagctaaaaattcatccaaacaaacaatatcccatgttcttgcttcacagtggtcaatccaatttatcgtttgatctacatatgccctgttgctaccctgaccaacaaaaaaaccaccatggtgtacctcagcggtgaatttaccatcatcaggaccgtcagagatgacctgattcggcgtagtgtgcatagctttatatgagcctgtacttaggccttgagctatggccgaggtagcccggttatgatccat

SEQ ID NO: 4451 - DNA, 114 bp, Oryza sativa
  Clone ID: PAT_MRT4530_11333C.1
atggggggccactcgcccgaacggatcgcgctgcgagcaaccgtggatgaagattctacggaaaatgctacacacacgactacggcgtccgactgtcgtacgaccacggcgtaa

SEQ ID NO: 4452 - DNA, 2652 bp, Oryza sativa
  Clone ID: PAT_MRT4530_11334C.1
atggaaggggctatagtgagcatagccaccggggcattgaagcccgtcctcatgaagctagccactctggtttgcaatgagtacatgatctccaaggaggtgcacaaagagatcgagaccctctctagcgaactcacggccatccattcatttcttctgaagatgtcagaggaagagaatcctgatgcccaagatcatgcttggatgatggatgtaagggagctatcctacgacattgaggatattattgatgagttcatggtccgagttgatgatgattctgctaatcctgatgggtttatcagcaagtgtaagaactcgctcgcgaagatgaagactagaagtcgaattgccaaggcaatcagagatttcaagagccaaatcacgaaggttggagataggcatgcaagtaatgatgggtgtgaatctatgcagcaacaaccaaaggttatctcgattgttggatttggaggactaggtaaaactacccttgcataccaagtataccaagagctcaaggggaaatttgactgttcggctttcctatcagtatcacgaaatccaaacatgatgagaattctaagaactattttaagtgaggtggcacaacgtgactatgctttgacagaagatggatatgaacaacaacttattatcaaaatttccaattttctttccaacaaaaggtaccttattgtaattgatgacatatggaaggtggaaatatggaacattattaagggtgcattctcaatgagcagtcagtgcagtaaaataatcaccactactcgtataaatgatgtcgctagatcatgctgttcttcatttagtggtcatgtgtataatataaggccacttaatatggtacattcaagacatttattccacagaagattattcaattccgaagaaaaatgcccttcacaccttgaagaagtttctgatcaaatcttgaaaaagtgtgatggcttacctctggcaatcatagctatatctggtttgttggttaacaaaccaatgacaaaggatcaatgggatcatgtaaaaaattcaattggttctgcgctcgaaagaaatcctagcgtggatgtaatgataagtatattatcactgagttactatgatcttcctcctcatctgaaaacttgcctattacatctcagtatatttccagaagattacttaattgagaaggatgacttaatacttagatgggttgccgagggattcattcataaaaagggaagttatacatcatttgagctaggagaaatgtgtttcaatgaactcgccaacagaaatttgatccaacgttgcagtaacaaggatgattggaaagttcatgacacaattcttgattttatcatctcgatgtccatcaaagataactttgttactttagtagcttctcctgatcaaactattgggacgaacaaggttcgtcggctctcccttcaaattggtatcgaggatgggaattcaatcttacaaagaaggttgtctgacttgtctcatgctcgatctcttgatgtgttctgctatcaaccaaagttgccttctctattggagttcaggcacttgcgtgttctgagttttagatattgcaaatggttgaaaagccactgtattgcaaatataggcaggttgtttcaattaaggtacctgaatctcaagaaaacaggtttaactgaacttcctgaagaaatcggatgtctacagagcttggagacgctgaatgttatggacaaccatatggttcagttaccacaatgtattacacgacttggaaatttgatgcatctatttattggcaatcagattcaactcccagatggcattgcaaagatgcaggcactagagacattacaagcggtggacctatccaagcattcctctaacatcgtcaaagaacttggacagctaaagaatctgagggaactgaatttgttgatctacgactatgatgcatgcacagaagagcatatgaagactattgcctcttgtctacttcaactaggcacgtacaacctccgtcgtctaaatattatgacttctatcatacttggcaacatctacttaccagatccctggtgccctgctccgcttaaactcgaaggacttgacatctcaggctcaccaatgccacgagttccaacttggataggttcgttggtcaacctcaaaaggttaggccttgctctagagggagtgaattgtgaagatctatcaatcatcggatgtttaccttctctgctacagctttctctccgtgtaccagggtacagagacagtctcataatcagtggctgctatggattctcttgtttgagggacttttgtttcatcgggcaacaaccaatttttacagcgggatcaatgccaaggctagaactactcatactcaatataaatgcatctaaaccagagactgtgactaatgctgctctagaaaatctcccctgcctcatgacggtccagtatttgctttaccaatataacaaaaatgatcatgagattgaaaatgcagaggctgcattgaagagagcagcatatacctatcttaataaaaggagcaaggccagcaggcaggacgggcagtgcagccgccttggcccccaggcgtcaaggccctggccggccatgcacaattag

SEQ ID NO: 4453 - DNA, 5513 bp, Oryza sativa
  Clone ID: PAT_MRT4530_11335C.1
acgtcgaggccgtcaagaccgtcgacccggcgaaggcgacggggaagccgccgccgcacacgctctggctcgcgttcgccaagatgtacgaggaccgcggcctcctcgacagcgcgcgggaggtgttgcggagagccacgcaggcgagcttcaaggcggcggaccacctcgccgccgtttggtgcgagtgggcggagatggagctgagacagcacaatgccaacagggccatcgagctcattcggcaggcgacgtcagagccgtcgctcgaggtcaggaggcaggtcgccgccggcgtcggcgagaccgtcgtccaaacaaagctgcatcggtctctcaagctgtggtgcttctacgccgacaatcgccctcccagagggcggcgaaaatgacgtggcagacggccgttcgctctcgggcgacggccgtcaacgaaatttgcaggcggcccccttgccgccctccgcgagggcgattttgtactgtgcggggggccgcctgcaaatgggcggcgagggggggcatggaattttgcaggcggcccccttgccgccctccgcgagggcgattttgtactgtgcggggggccgcctgcaaatgggcggcgagggggcatggaattttgcaggcggcccccttgccgccctccgcaagggtgattttgtactgtgctccctgtccctcctaccctgcgccctaatgtgcccgtgggagtacgtgagtcggtccgggagtacggcacggccaacccgtcctgcctgtacaggtgtgacctctggctgctcctgagtgtgcgcctctggagctcctccaagctgagaggagcctagtacgtcgtggtggtctgcaccgtgcaagtcgtcgtcgtagaactggctagtaggaccagtcctaccggcgtgagacgaagaggccccagtaccgaagatcccggctgcaaatcctgcgtgtgggcgagagatcgacgctccgtgagaggaagagctggcgaacgcgcccgaagaggtggcgaacgcccctgcggagctcgtggaagcgccggtcgtgcctgcgaacgcgctcgaaggcagacgaggtccgtgcgaaataggtgccgtaggtcgaggtcctgctccgacggtaggcgcgcgaggccgtggttgtaccggaccagctggaggtacgacgtccacggcgctgcgacaggagaagacgcgcatgaccgcacgcatcttctcctgcatccggtcgaaggtcaccctctgctcaacgtcagtcaagtgcaaacctctgttcaacctcacttggactgcggtgatatcggcactgatatcccgtgcggcatcagccgccacgaagtagtctcggtcacggtgcgtgggatacgcgtccgtgacagcggcaacgtgcggctctggggcgtctggagtgaaggtcacacgcgcacgagtgcgaggaaggtaccaacgaaggtagtcacggtagttctcctccgtgtgtgagaagagctcgttgatcacctcctctgtagctaacacccagtcgtcaacgtactgctgtacacgtggagcccaaagtgcgcctgctagctgtccccgtcgagtcaacgagtggtcggcagggaggacggtcggctgcacgttgcccggaaacacctgcctaagtccgaactgtctcatcacacgctgcgggcagtgaggctcaacgaaaatgtcgaacaccatcggcaggatggtgagccagtaagcctggtcgcgtgtgcacaaggacgaaagtcctagcggtgctctcgcagcgacggcctcttctgtgtacggctcccagatgacgtcgctcggctggagacggtcaaacttgaacacgaagtccgggtaaccacgtctcacctggacgtgagcgtaacgacgcccacgtcgacaccagtaagtccccatcgtgggaccgtcctctggccactgcgcgctgcgaccaaccccgtagggtgcgctgtccaccactggtcgacctatggcaaacctctcggctgcccaaagctgaagcaacatagggcagccagcgatgatcgctcccgcgtcagtcttcgtgcacgcctcacagagggcacggtacgtggctgctagcacggcagaaccccagctccactgcggcacgtcctgtggctgagcatccgcgatggaccgtgcgtagtggaccagccggaagtccacagcgtgcccgtgggtgctagtgaacatcacccacccgaacaaccacaacaggtacgcctcaagggagcgtcggaccgagtaatcatcagcgtcagggtgcagaaggtccgcagtgaactggagcaaccaagccttgctaggcccgactgtagagtacggaggaagggtggtggtcggtcctaggtgtggaaggcgcatcacctgctcgaagcgcgcagtgatatcctccttccacccaaaaacaccgtccacgggaccaactgctgctcccgccagcggtagcccgagcaggtacgacacgtcctgcagtgtcggagccatctccccacagggaaggtggaacgtgtgcgtctcaggtctccagcggtctacaagagcggcaaggagtgaccgatctgcatcccaccgcttcgctgggtcacggtcgtccgccgccgcctcaacaagcctacaaagtggtagaaggcctgccgcacgcaaccaaggaacgtgacgggggtcgacacgcaaccactcgcgcgacgtgcgtggacggaaggtgccgagctgtgcaccctcgactgctgacaggaacgagcggtggttcctgtcaatcccacggttcaacagcgccggtgtgtcgtacgccataccatcacttgcctgtccagatggactagcatctgcgccgcttggaacttctgcattcttcgggcatttcttgtaagtatggccgcgcagatcacacttgctgcagcgtaaagtcctcccacctgcttctgactcatccatatcatttctgatgcgtctagtttggcgtcgaccctttttcacccttaacttagatggatctggaatataaaaaacttgggcactcagcgttgtgtaagatcctgagatcccgaacccatatatctcctcactccatgtatgaaagattgcttctttcctgaaataatttgagacgtacacattgggagatatgccacaatcaccggcagcagcaagaacgtgtgagcaaggaaggtgatgaagcttcggcttcatacaactgcaggtacatccaccatccgccttcaagacacattcctgcacggcttgcttgcgatagataccacgcctgctcctatcaacacatattatttcataccgatgcacttgtgtgccttgagcaacaactcgatgtctccgtgcctttttgattttatcttccatgtactttgtcactacgttgccaaacactatgttgtcatcggccatggacggaccaattttcttgtatcgatccctaaagtacgcttgcgtgccgtgaaggatgaattcaacaatagcaaccaatggaagtacccgaactcctcgcattacccagttgtacacctctgccaaattggttgtcattatgccataccgagatccatcggtgtcgaacaatagagaccacttctccttaggctcattctcaatccactgagtgaaatttctgatggacgaccctgacctccttctcattgttggtgggtcatcatataatgcaccaagaggtatgggaggctcgtcaccttcaactagtggtctgcgagattgctcatctgtttgcttcgttgtcaactcatccaacttgtcccacaactcattaaatttcttctcttggttctgtgcacagagcctcttaaagagctccataagatgcttgttcttgaattgcttgtagaaatttgcacccatgtgacgcatgcaccaccgactccgaacatcaggccacttagctggaagtcccttctcatcccaaccgttctggttgttcccatcacacccaattgctgtcaatatctgacctcggtatttacctatcataaaagttccatctatgcatagaacaggtcgacaatgcacaaaagcattgatgcaagcacccaatgagaaaaaggctctttgcagcacactctttgttcgatcatcaaccgatgtaaatgtatgtaggtcatagtacgtattattattcctctgggcaatggtggctaacaaacgaggcaaattatcataagaagcttcaaatgtgccatacctcatctcaatgatcttttgtttggctctccaggcctttgcatagcttatggtgtacttgaatttgttctcgatgtgcctaataattgattttggttcaaagccaatgttaccaacaacactgctgtacatctcacttgccacaaaagctgaagtgatgtttcggtgatacttctccaccccttgtaagtagcacttgtgctcggtcacaatgctaactttccaataatcattccatttacccttatatgcatggacacgccacggacaatcttccttcatgcacctcacttcatacacataatttgttgacttgaccaccctaaactctctctgcaaggaaactgcccaatgcttcaccgcctccttcatctcatccttatgagcatatcttgcaccctcaattacctcgttctccttatactcccagggtacatgatcaccctctgatataacaagtccagagaagtcctcatttgcccaatcagtggccattacatcaccttcctcatcggatgatgcgtcgtcctccgcttgctcattatccgaatcttccctctccatttcatcaacaattataccgactctctccccctcatccgccatgcccatagcctgctcctcccttggttgattttcctcattttgcatcgatggtccaacaacatcccctgcattgataggaccctctacatcttcggtttgcattgaaacatttatatctttctcttgtaccgacacaaatataacgaggggccatgaccgttcaaaagccatttccacataccgtctccaagcatcagtgctgtccatcggcattagttcccaaaaataaccttctgttgcacgactcactacaactgacactgacattgtgtagacttcttggtctattctaaatcctctcaacaaccaactataaattgactgaaatgttctctccgcaggcctatcgatgcccttagatgtcattacaaaatctgacagatcaacaccatctggaccaaatctaatatttccttcaccgtgaactatctgaaatgtgaccttacttgacattgtgcctctcgccgctccttttgctatctgaagccttgtttgccaacttaatctagatggaccatcaggcttttcatgaagccaatggtctaggctaccattctccatgtaagagtagatcagtagcctatcattgccaatcctgcaataaccttgcagaagtacaagattaggatgttgagcttttgataaagtctccaccttggctttgaactcacgctccat

SEQ ID NO: 4454 - DNA, 283 bp, Oryza sativa
  Clone ID: PAT_MRT4530_11336C.1
tccagtactctccaaagtccaaacctagcgtcatcagtcgtccacggctccactccttccgccgctgccgctccctccccttgcttcgcctcctccacctctccgccaccgtccgcgaatccgccgccaagccgtcgccggtgaagcagaagaagaggaaggtgcgtgcgccgccgggcgctggcgaggatgtcctcctctggcggtccggccgcgtcgccaatctccctaagaagcccaagtaccacgacgagttccaagatttcaagaagaagataaggag

SEQ ID NO: 4455 - DNA, 423 bp, Oryza sativa
  Clone ID: PAT_MRT4530_11337C.1
actttgtcttcttgatcatctcacggactctatttttttttttttatttttgttcaaaattcaaattgtttgaggagaaaaaatgtggcacattagaaatgtgggatcaaaagttatccacttagggggggtcgcctaggtacctgaattttcttaagaaatccagagggaattatctctagctcgcgagggagataccttacctgaccggcttaatacccgttatgcccttatcgcgcagctaatggccaaagtggctaccaccttgttggagggccctacgacttttttgatcaacaaggtttagaacttgatcgctacctttccaggggtgattgtggaagcctggaaattggcctgtaaaacctaaataatgctgttacttgtcgccccccctccttggtctcctaaggactcaggggc

SEQ ID NO: 4456 - DNA, 4992 bp, Oryza sativa
  Clone ID: PAT_MRT4530_11338C.1
ctatcggccccttctaggtcggtcagaatgcattgcattctcgtggtccttcaatcgttgatactctacttgtgtttctgactctgttatcttctggccatgatatgatggagtgacattgtcgatccatcgagtaaatccacccatccttggattgccgtgccattctaaagcctcagcagcaattcgacgttcatgctcatccttccgccttaggtagtccgatcttgtttcactacgtgggtaagcacgggttccgtcgttttgtgggttctccatgtctacccactcgatgaagttgcacattggacgatatgtcgtgaagcgccgaaagtgtgttgtcgtgagcataagttgttctagcaccatatgaatgaaaagaaccctgtccctcctaccctgcgccctaatgtgcccctgggagtacgtgagtcggtccgggggtacggcacggccaacccgtcctgcctgtacaggtgtgacctctggctgctcctgagtgtgcgcctctggagctcctccaagctgagaggagcctagtacgtcgtggtggtgtgcaccgtgcaagtcgtcgtcgtagaactggctagtaggaccagtcctaccggcgtgagacgaagaggccccagtaccgaagatcccggctgcaaatcctgcgtgtgggcgagggatcgacactccatgagaggaagagctggcgaacgcgcccgaagaggtggcgaacgcccctgcggagctcgcggaagcgccgatcgtgcctgcgaacgcgctcgaaggcatacgaggtccgtgcgaaacaggtgccgtaggtcgaggtcttgctccgacggtaggcgcgcgaggccgtggttgtaccggaccagctggaggtacgacgtccacgacgctgcgacaggagaagacgcgcatgaccgcacgcatcttctcctgcatccggtcgaaggtcaccctctgctcaacgtcagtcaagtgcaaacctctgttcaacctcacttggactgcggtgatatcggcactgatatcccgtgcggcatcagcccccacgaagtagtctcggtcacggtgcgtgggatacgcgtccgtgacagcggcaacgtgcggctctggggcgtctggagtgaaggtcacacgcgcacgagtgcgaggaaggtaccagcgaaggtagtcacggtagttctcctccgtgtgtgggaagagctcgttgatcacctcctctgtagctaacacccagtcgtcaatgtactgctgtacacgtggagcccaaagtgtgcctgctagctgtccccgtcgagtcaacgagtggtcggcagggaggacggtcggctgcacgttgcccggaaacacctgcctaagtccgaactgtctcatcacacgctgcgggcagtgaggctcaacgaaaatgtcgaacaccatcggcaggatggtgagccagtaagcctggtcgcgtgtgcacaaggacgaaagtcctagcggtgctctcgcagcgacggcctcttctgtgtacggctcccagatgacgtcgctcggctggagacggtcaaactcgaacacgaagtccgggtaacctcgtctcacctggacgtgagcgtaacgacgcccacgtcgacaccagtaagtccccatcgtgggaccgtcctctggccactgcgcgctgcgaccaaccccgtagggtgcgctgtccaccactggtcgacctatggcaaacctctcggctgcccaaagctgaagcaacatagggcagccagcgatgatcgctctcgcgtcagtcttcgtgcacgcctcacagagggcacggtacgtggctgctagcacggcagaaccccagctccactgcggcacgtcttgtggctgagcatccgcgatggaccgtgcgtagtggaccagccggaagtccacagcgtgcccgtgggtgctagtgaacatcacccacccgaacaaccacaacaggtacgccttaagggagcgtcggaccgagtaatcatcagcgtcagggtgcagaaggtccgcagtgaactggagcaaccaagccttactaggcccgactgtagagtacggaggaagggtgttggccggtcctaggtgtggaaggcgcatcacctgctcgaagcgcgcagtgatatcctccttccacccaacaacactgtccacgggaccaactggtgctcccgccagcggtagcccgagcaggtacgacacgtcctgcagtgtcggagccatctccccacagggaaggtggaacgtgtgcgtctcaggtctccagcggtctaccaaagcggcaaggagtgaccggtctgcatcccaccgcttcgctgggtcacggtcgtccgccgccgcctcaacaagcctacaaagtggtagaaggcctgccgcacgcaaccaaggaacgtgacgggggtcaacacgcaaccactcgcgcgacgtgcatggacggaaggtgccgagctgtgcaccctcgactgctgacaggaacgagcggtggttcctgtcaatcccacggttcaacagcgccggtgtgtcgtacgccataccatcacttgcctgtccagatggactagcatctgcgccgcttggaacttctgcattcttcgggcatttcttgtaagtatggccgcgcagattacacttgctgcagcgtaaagtcctcccacctgcttctgactcatccatatcatttctgatgagtctagtttggcgtcgaccctttttcacccttaacttagatggatctggaatataaaaaacttgggcactcagcgttgtgtaagatcctgagatcccgaacccatatatctcctcactccatgtatgaaagattgcttctttcctgaaataatttgagacgtacacattggaagatatgccacaatcaccggcagcagcaagaacgtgtgagcaaggaaggtgatgaagcttcggcttcatacaactgcaggtacatccaccatccgcctttaagacacattcctgcacggcttgcttgcgatagataccacgcctgctcctatcaacacacattatttcataccgatgcacttgtgtgccttgagcaacaactctatgtctccgtgcctttttgattttatcttccatgtactttgtcactacgttgccaaacactatgttgttatcggccatggacggaccaattttcttgtatcgatccctaaagtacgcttgcgtgccgtgaaggatgaattcaacaatagcaaccaatggaagtacccgaactcctcgcattacccagttgtacacctctgccaaattggttgtcattatgccataccgagatccatcggtgtcgaacaatagagaccacttctccttaggctcattctcaatccactgagtgaaatttctgatggacgaccctgacctccttctcattgttggtgggtcatcatgtaatgcaccaagaggtatgggaggctcgtcaccttcaacttgtggtctgcgagattgctcatttgtttgcttcgttgtcaactcatccaacttgtcccacaactcattaaatttcttctcttggttctgtacacagagcctcttaaagagcttcataagatgcttgttcttgaattgcttgtagaaatttgcacccatgtgacgcatgcaccaccgactccgaacatcatgccacttagctggaagtcccttctcatcccaaccgttctgcaagtagtcaatagcccgcaacatacccgcgtgacgatcatgtataaggcaaacgttgggcctcatacgcaccactgcaatgtgcactctctctaggaaccagtaccagctttcagtgttctcactctctacaaatgcaaaagccataggtagaacctggttgttcccatcacacccaattgctgtcaatatctgacctcggtatttacctgtcataaaagttccatctatgcatagaacaggtcgacaatgcacaaaagcattgatgcaagcacccaatgagaaaaaggctctttgcagcacactctttgttcgatcatcaaccgatgtaaatgtatgtaggtcatagtaagtattattattcctctgggcaatggtggctaacaaacgaggcaaattatcataagaagcttcaaatgtgccatacctcatctcaataatcttttgtttggctctccaggcctttgcatagcttatggtgtacttgaatttgttctcgatgtgcctaataattgattttggttcaaagcaaatgttaccaacaacactgctgtacatctcacttgccacaaaagctgaagtgatgtttcggtgatacttctccatcccttgtaagtagcacttgtgctcggtcacaatgctaactttccaataatcattccatttaccctcgttctccttatactcccagggtacatgatcaccctctgatataacaagtccagagaagtcctcatttgcccaatcagtggccattacatcaccttcctcatcggatgatgcgtcatcgtccgcttcctcattatccgaatcttccctctccatttcatcaacaattataccgactctctccccctcatccgccatgcccatggcctgctcctcccttggttgattttcctcattttgcatcgatggtccaacaacatcccctgcattgataggaccctctacatcttcggtttgcattgaaacatttatatctttctcttgtaccgacacaaatataacgaggggccatgaccgttcaaaagccatttccacataccgtctccaagcagcagtgctgtccatcggcattagttcccaaaaataaccttctgttgcacgactcactacaactgatactgacattgtgtagacttcttggtctattctaaatcctctcaacaaccaactataaattgactgaaatgttttctccgcaggcctatcgatgcccttagatgtcattacaaaatctgacagatcaacaccatctggaccaaatctaatatttccttcaccgtgaactatctgaaatgtgaccttatttgacat

SEQ ID NO: 4457 - DNA, 5051 bp, Oryza sativa
  Clone ID: PAT_MRT4530_11339C.1
aagatgacgccaagggaccacaaatctgctgtgtggttgtaaggttgttccctcacaagttctggagccatgtatagaggtgttccttttatagaacgtaacacaacagtattagctgacatggcacgagcaaacccaaaatcacagagcttgacaacagatcctttcccaataaggatgttctgaggtttcatatcccgatggataatacgattggagtgcaagtaatgcagtgccttaacctgaaataaggagatttgcagctgcttagcaattgcttgaacctgttcttctggaaggcacttatcatcctcaagcacctcaaacagctctccctgagcaaactctgttaccacacaaaattcctgaggggtttcaaatgaatcgatcatttcgattatattctcatgtttgagtttcctcagaatctcaatctcctgccttagattatgtatatctttgtcagtcttcccatgcttaaggataaacttcatagctaccgtctggcgagtgtacttgcgccttcccatgtacaccttcccgaaggagccctccccaacgagcacgatgacatggtaatcttctatccccatcaccacccacccactaggctcacacaaacccgtgaagcgccgaaagtgtgttgtcgtgagcataagttgttctagcaccatatgaatgaaaagaaccctgtccctcctaccctgcgccctaatgtgcccctgggagtacgtgagtcggtccgggggtacggcacggccaacccgtcctgcctgtacaggtgtgacctctggctgctcctgagtgtgcgcctctggagctcctccaagctgagaggagcctagtacgtcgtggtggtgtgcaccgtgcaagtcgtcgtcgtagaactggctagtaggaccagtcctaccggtgtgagacgaagaggccccagtaccgaagatcccggctgcaaatcctgcgtgtgggcgagggatcgacgctccgtgagaggaagagctggcgaacgcgcccgaagaggtggcgaacgcccctgcggagctcgcggaagcgccggtcgtgcctgcgaacgcgctcgaaggcagacgaggtccgtgcgaaacaggtgccgtaggtcgaggtcctgctccgacggtaggcgcgcgaggccgtggttgtaccggaccagctggaggtacgacgtccacggcgctgcgacaggagaagacgcgcatgaccgcacgcatcttctcctgcatccggtcgaaggtcaccctctgctcaacgtcagtcaagtgcaaacctctgttcaacctcacttggactgcggtgatatcggcactgatatcccgtgcggcatcagccgccacgaagtagtctcggtcacggtgcgtgggatacgcgtccgtgacagcggcaacgtgcggctctggggcgtctggagtgaaggtcacacgcgcacgagtgcgaggaacgtaccagcgaaggtagtcacggtagttctcctccgtgtgtgggaagagctcgttgatcacctcctctgtagctaacacccagtcgtcaacgtactgctgtacacgtggagcccaaagtgcgactgctagctgtccccgtcgagtcaacgagtggtcggcagggaggacggtcggctgcacgtttcccggaaacacctgcctaagtccgaactgtctcatcacacgctgcgggcagtgaggctcaacgaaaatgtcgaacaccatcggcaggatggtgagccagtaagcctggtcgcgtgtgcacaaggacgaaagtcctagcggtgctctcgcagcgacggcctcttctgtgtacggctcccagatgacgtcgctcggctggagacggtcaaactcgaacacgaagtccgggtaaccacgtctcacctggacgtgagcgtaacgacgcccacgtcgacaccagtaagtccctatcgtgggaccgtcctctggccactgcgcgctgcgaccaaccccgtagggtgcgctgtccaccactggtcgacctatggcaaacctctcggctgcccaaagctgaagcaacatagggcagccagcgatgatcgctcccgcgtcagtcttcgtgcacgcctcacagagggcacggtacgtggctgctagcacggcagaaccccagctccactgcggcacgtcctgtggctgagcatccgcgatggaccgtgcgtagtggaccagccggaagtccacagcgtgcctgtgggtgctagtgaacatcacccacccgaacaaccacaacaggtacgcctcaagggagcgtcggaccgagtaatcatcagcgtcagggtgtagaaggtccgcagtgaactggagcaaccaagccttgctaggcccgactgtagagtacggaggaagggtgttggccggtcctaggtgtggaaggcgcatcacctgctcgaagcgcgcagtgatatcctcattccacccaaaaacaccgtccacaggaccaactggtgctcccgccagcggtagcccgagcaggtacgacacgtcctgcagtgtcggagccatctccccacagggaaggtggaacgtgtgcgtctcaggtctccagcggtctaccagagcggcaaggagtgaccggtctgcatcccaccgcttcgctgggtcacggtcgtccgccgccgcctcaacaagcctacaaagtggtagaaggcctgcctcacgcaaccaaggaacgtgacgggggtcgacacgcaaccactcgcgcgacgtgcgtggacggaaggtgccgagctgtgcaccctcgactgctgacaggaacgagcggtggttcctgtcaatctcacggttcaacagcgccggtgtgtcgtacgccataccatcacttgaatgtccagatggactagcatctgcgccgcttggaacttctgcattcttcggacatttcttgtaagtatggccgcgcagatcacacttgctacagcgtaaagtcctcccacctacttctgactcatccatatcatttctgatgcgtctagtttggcgtcgaccctttttcacccttaacttagatggatctggaacataaaaaacttgggcactcagcattgtgtaagatcctgagatcccgaacccatatatctcctcactccatgtatgaaagattgcttctttcattacccagttgtatacctctgccaaattggttgtcattatgccataccgagatccatcggtgtcgaacaatagagaccacttctccttaggctcattctcaatccactgagtgaaatttctgatggacgaccctgacctccttctcattgttggtgggtcatcatgtaatgcaccaagaggtatgggaggctcgtcaccttcaacttgtggtctgcgagatttctcatctgtttgcttcgttgtcaactcatccaacttgtcccacaactcattaaatttcttctcttggttctgtgcacagagcctcttaaagagctccataagatgcttgttcttgaattgcttgtagaaatttgcacccatgtgacgcatgcaccaccgactccgaacatcaggccacttagctggaagtcccttctcatcccaaccattctgcaagtagtcaatagcccgcaacatacccgcatgacgatcatgtataaggcaaactttgggcctcatacgcaccactgcaatgtgcactctctctaggaaccagtaccagctttcagtgttctcactctctacaaatgcaaaagccataggtagaacctggctgttcccatcacacccaattgctgtcaatatctgacctcggtatttacctgtcataaaagttccatctatgcatagaacaggtcgacaatgcacaaaagcattgatgcaagcacccaatgagaaaaaggctctttgcagcacactctttgttcgatcatcaaccgatgtaaatgtatgtaggtcatagtaagtattattattcctctgggcaatggtggctaacaaacgaggcaaattatcataagaagcttcaaatgtgccatacctcatctcaataatcttttgtttggctctccaggcctttgcatagcttatggtgtacttgaatttgttctcgatgtgcctaataattgattttagttcaaagccaatgttaccaacaacactgctgtacatctcacttgccacaaaagctgaagtgatgtttcggtgatacttctccaccccttgtaagtagcacttgtgcttggtcacaatgctaactttccaataatcattccatttacccttatatgcatggacacgccacggacaatcttccttcatgcacctcacttcatacacataatttgttgacttgaccaccctaaactctctctgcaaggaaactgcccaatgcttcaccgcctccttcatctcatccttatgagcataccttgcaccctcaattacctcgttctccttatactcccagggtacatgatcaccctctgatataacaagtccagagaagtcctcatttgcccaatcagtggccattacatcaccttcctcatcggatgatgcgtcgtcgtccgcttcctcattatccgaatcttccctctccatttcatcaacaattataccgactctctccccctcatccgccatgcccatggcctgctcctcccttggttgattttcctcattttgcatcgatggtccaacaacatcccctgcattgataggaccctctacatcttcggtttgcattgaaacatttatatctttctcttgtaccgacacaaatataacgaggggccatgaccgttcaaaagccatttccacataccgtctccaagcagcagtgctatccatcggcattagttcccaaaaataaccttctgttgcacgactcactacaactgatactgacattgtgtagatttcttggtctattctaaatcctctcaacaaccaactataaattgactgaaatgttctctccgcaggcctatcgatgcccttagatgtcattacaaaatctgacagatcaacaccatctggaccaaatctaatatttccttcaccgtgaactatctgaaatgtgaccttatttgacat

SEQ ID NO: 4458 - DNA, 618 bp, Oryza sativa
  Clone ID: PAT_MRT4530_1133C.1
ctcctcccccccccccccccccccccccccccccccccccctttcttttttttttttttttttttttttttttttttttttttctcggaaacattacccccagggaaaaaaagggggacaacaaaaagccaaaaaaaaaggaaaagcccccccccactaggaaaaaaaccaaagtcccaaacaaaaattccaaaacccaaaaaccacgatacccgggggctaaaaaaaaaaaaaaaacggggccccaaaatggccccggggtaccaccggggccccacagggagaaaaaaaaaaaaaaaagggcttttaacaaaaaaaaatcggcaaccctggggttcgaaggccccggaaaaaataatttgggggaaaaagccttttgggaagcaaaaaaccggcaaggaaaaaggggccaccaaatggggggacctggaaaaaaaacaaccccggaaataggattcaggggattggacaggggaaaaacaacaggaccttggggaaaacaacaaaacccctataggaaaaaaggctaacaacgcagttttataaaccaaaaaaaagggaccttttcccttttttcaaaaaaaaacataagccaaacaagatttttcaccctaaggg

SEQ ID NO: 4459 - DNA, 507 bp, Oryza sativa
  Clone ID: PAT_MRT4530_11340C.1
atggcatcattgtcaagtgctcatgatgtgcttccacaaatctttcttatgactgatggatcagttgatgatgaacataatatatgccaaactgtgaaaacggagctcatcagcagaggatctaaatctcctcggatttctacttttggactaggtttgtattgcaaccactatttcttgcgcatgctggcatcaataggcagggggcattatgatgctgcatttgagacagagatcttccttgagtcaggtgatggcgatcggtgcacaaagataaaaagaaaaatccggaagtttgaattaccgttgatacttcaatctagaagtttgaattaccattgatgtgtcgttcgtggtgtcaactagtacttgagcccgttttgtgttgagattgtagcactctacttctactgagatcgttttctcctccatagcggcattgttggtcgatccagttttgatgcggtcttcaattctcccgtctttcgctttgcttgattgcttcat

SEQ ID NO: 4460 - DNA, 4789 bp, Oryza sativa
  Clone ID: PAT_MRT4530_11341C.1
tcaacaggcagcgccgaaagttgatagtgataactcgagctgccgcttttcatgtgtgctgttgtggactgtgcgcgctactggatatggcactaccgtgaagcgccgaaagtgtgttgttgtgagcataagttgttcaagcaccatacgaatgaaaagaaccctgtccctcctaccctgcgccctaatgtgcccctgggagtacgtgagtcggtccgggggtacggcacggccaacccgtcctgcctgtacaggtgtgacctctggctgctcctgagtgtgcgcctctggagctcctccaagctgagaggagcctagtacgtcctggtggtctgcaccgtgcaagtcgtcgtcgtagaactggctagtaggaccagtcctaccggcgtgagacgaagaggccccagtaccgaagatcccggctgcaaatcctgcgtgtgggcgagggatcgacgctccgtgagaggaagagctggcgaacgcgcctgaagaggtggcgaacgcccctgcggagctcgcggaagcgccggtcgtgcctgcgaacgcgctcgaaggcatacgaggtccgtgcgaaaccggtgctgtaggtcgcactgctccgaagctaggggcgctcgaagacaaacgaggtcctgctccgacggtaggaccgcgaggccgtgggtgtaccggaccagctggaggtacgacgtccacggcgctgcgacaggagaagacgcgcatgaccgcacgcatcttctcctgcatccggtcgaaggtcgacctctgctcaacgtcagtcaagtgcaaacctctgttcaacctcacctggactgcggtgatatcggcactgatatcccgtgccgcatcagccgccacgaagtagtctcggtcacgagtgcgtgggatacgcgtccgtgacagcggcaacgtgcggctctggggcgtctggagtgaaggtcacacgcgcacgagtgcgaggaaggtaccagcgaaggtagtcacggtagttctcctccgtgtgtgggaagagctcgttgatcacctcctctgtagctaacacccagtcgtcaacgtactgctgtacacgtggagcccaaagtgcgcctgctagctgtccccgtcgagtcaacgctgcgatcacacgctgcggccagtgaggctcaacgaaaatgtcgaacaccatcggcaggatggtgagccagtaagcctggtcgcgtgtgcacaaggacgaaagtcctagcggtgctctcgcagcgacggcctcttctgtgtacggctcccagatgacgtcgctcggctggagacggtcaaactcgaacacgaagtccgggtaaccacgtctcacctggacgtgagcgtaacgacgcccacgtcgacaccagtaagtccccatcgtgggaccgtcctctggccactgcgcgctgcgaccaaccccgtagggtgcgctgtccaccactggtcgccctatggcaaacctctcggctgcccaaagctgaagcaacataggacagccagcgatgatcgctcccgcgtcagtcttcgtgcacgcctcacagagggcacggtacgtggctgctagcacggcagaaccccagctccactgcggcacgtcctgtggctgagcatccgcgatggaccgtgcgtagtggaccagccggaagtccacagcgtgcccgtgggtgctagtgaacatcacccacccgaacaaccacaacaggtacgcctcaagggagcgtcggaccgagtaatcatcagcgtcagggtgcagaaggtccgcagtgaactggagcaaccaagccttgctaggcccgactgtagagtacggaggaagggtggtggtcggtcctaggtgtggaaggcgcatcacctgctcgaagcgcgcagtgatatcctccttccacccaaaaacaccgtcgacgggaccaactggtgctcccgccagcggtagcccgagcaggtacgacacgtcctgcagtgtcggagccatctccccacagggaaggtggaacgtgtgcgtctcaggtctccagcggtctacaagagcggcaaggagtgaccggtctgcatcccaccgcttcgctgggtcacggtcgtccgccgccgcctcaacaagcctacaaagtggtagaaggcctgccgcacgcaaccaaggaacgtgacggaaggtgccgagctgtgcaccctcgactgctgacaggaacgagcggtggttcctgtcaatcccacggttcaacagcgccggtgtgtcgtacgccataccatcacttgcctgtccagatggactagcatctgcgccgcttggaacttctgcattcttcgggcatgtcttgtaagtatggccgcgcagatcacacttgctgcagcgtaaagtcctcccacctgcttctgactcatccatatcatttctgatgcgtctagtttggcgtcgaccctttttcaccctaaacttagatggatctggaatataaaaaacttgggcactcagcgttgtgtaagatcctgagatcccgaacccatatatctcctcactccatgtatgaaagattgcttctttcctgaaataatttgagacgtacacattgggagatatgccacaatcaccggcagcagcaagaacgtgtgagcaaggaaggtgatgaagcttcggcttcatacaactgcaggtacatccaccatccgccttcaagagacattcctgcacggcttgcttgcgatagataccacgcctgctcctatcaacacacattatttcataccgatgcacttgtgtgccttgagcaacaactctatgtctccgtgcctttttgattttatcttccatgtactttgtcactacgttgccaaacactatgttgttatcggccatggacggaccaattttcttgtatcgatccctaaagtaggcttgcgtgccgtgaaggatgaattcaacaatagcaaccaatggaagtacccgaactcctcgcattacccagttgtacacctctgccaaattggttgtcattatgccataccgagatccatcggtgtcgaacaatagagtccacttctccttaggctcattctcaatccactgagagaaatttctgatggccgaccctgacctccttctcattgttggtgggtcatcatgtaatgcaccaagaggtatgggaggctcgtcaccttcaacttgtggtctgcgagattgctcatctgtttgcttcgttgtcaactcatccaacttgtcccacaactcattaaatttcttctcttggttctgtgcacagagcctcttaaagagctccataagatgcttgttcttgaattgcttgtagaaatttgcacccatgtgacgcatgcaccaccgactccgaacatcaggccacttagctggaagtcccttctcatcccaaccgttctgcaagtagtcaatagcccgcaacatacccgcatgacgatcatgtataaggcaaacgttgggcctcatacgcaccactgcaatgtgcactctctctaggaaccagtaccagctttcagtgttctcactctctgtcataaaagttccatctatgcatagaacaggtcgacaatgcacaaaagcattgatgcaagcacccaatgagaaaaaggctctttgcagcacactctttgttctatcttcaaccgatgtaaatgtatgtaggtcatagtaagtattattattcctctgggcaatggtggctaacaaacgaggcaaattatcataagaagcttcaaatgtgccatacctcatctcaatgatcttttgtttggctctccaggcctttgcataggttatggtgtacttgaatttgttctcgatgtgcctaataattgattttggttcaaagccaatgttaccaacaacactgctgtacatctcacttgccacaaaagctgaagtgatgtttcggtgatacttctccaccccttgtaagtagcacttgtgctcggtcacaatgctaactttccaataatcattccatttacccttatatgcatggacacgccacggacaatcttccttcatgcacctcacttcatacacataatttgttgacttgaccaccctaaactctctctgcaatgaaactgcccaatgcttcaccgcctccttcatctcatccttatgagcataccttgcaccctcaattacctcgtactccttatactcccagggtacatgatcaccctctgatataacaagaccagagaagtcctcatttgcccaatcagtggccattacatcaccttcctcatcggatgatgcgtcgtcctccgcttgctcattatccgaatcttccctctccatttcatcaacaattataccgactctctccccctcatccgccatgcccatggcctgctcctcccttggttgattttcctcattttgcatcgatggtccaacaacatcccctgcattgctaggaccctccacatcttcggtttgcattgaaacatttgtatctttctcttgtaccgacacaaatataacgaggggccatgaccgttcaaaagccatttccacataccgtctccaagcagcagtgctgtccatcggcattagttcccaaaaataaccttctattgcacgactcactacaacagatactgacattgtgtagacttcttggtctattctaaatcctctcaacaaccaactataaattgactgaaatgttctctccgcaggcctatcgatgcccttagatgtcattacaaaatctgacagatcaacaccatctggaccaaatctaatatttccttcaccgtgaactatctgaaatgtgaccttacttgacat

SEQ ID NO: 4461 - DNA, 4917 bp, Oryza sativa
  Clone ID: PAT_MRT4530_11342C.1
tcaacgaaatttgcaggcggcccccttgccgccctccgcgagggcgattttgtactgtgcggggggccgcctgcaaatgggcggcgagggggggcatggaaatttgcaggcggcccccttgccgccctccgcgagggcgattttgcactgtgcgggggcccgcctgcaaatgggcggcgagggggcatggaattttgcaggcggcccccttgccgccctgggggagggcgattttgtactgtgctccctgtccctcctaccctgcgccctaatgtgcccctgggagtacgtgagtcggtccgggggtacggcacggccaacccgtcctgcctgtacaggtgtgacctctggctgctcctgagtgtgcgcctctggagctcctccaagctgagaggagcctagtacgtcctggtggtctgcaccgtgcaagtcatcgtcgtagaactggctagtaggaccagtcctaccggcgtgagacgaagaggccccagtaccgaagatcccggctgcaaatcctgcgtgtgggcgagggatcgacgctccgtgagaggaagagctggcgaacgcgcctgaagaggtggcgaacgcccctgcggagctcgcggaagcgccggtcgtgcctgcgaacgcgctcgaaggcatacgaggtccgtgcgaaaccggtgctgtaggtcgcactgctccgaagctaggggcgctcgaagacaaacgaggtcctgctccgacggtaggaccgcgaggccgtgggtgtaccggaccagctggaggtacgacgtccacggcgctgcgacaggagaagacgcgcatgaccgcacgcatcttctcctgcatccggtcgaaggtcgacctctgctcaacgtcagtcaagtgcaaacctctgttcaacctcacctggactgcggtgatatcggcactgatatcccgtgccgcatcagccgccacgaagtagtctcggtcacggtgcgtgggatacgcgtccgtgacagcggcaacgtgcggctctggggcgtctggagtgaaggtcacacgcgcacgagtgcgaggaaggtaccagcgaaggtagtcacggtagttctcctccgtgtgtgggaagagctcgttgatcacctcctctgtagctaacacccagtcgtcaacgtactgctgtacacgtggagcccaaagtgcgcctgctagctgtccccgtcgagtcaacgagtggtcggcaggggggacggtcggctgcacgttgccgggaaacacctgcctaagtccgaactgtctcatcacacgctgcggccagtgaggctcaacgaaaatgtcgaacaccatcggcaggatggtgagccagtaagcctggacgtgagcgtaacgacgcccacgtcgacaccagtaagtccccatcgtgggaccgtcctctggccactgcgcgctgcgaccaaccccgtagggtgcgctgtccaccactggtcgccctatggcaaacctctcggctgcccaaagctgaagcaacataggacagccagcgatgatcgctcccgcgtcagtcttcgtgcacgcctcacagagggcacggtacgtggctgctagcacggcagaaccccagctccactgcggcacgtcctgtggctgagcatccgcgatggaccgtgcgtagtggaccagccggaagtccacagcgtgcccgtgggtgctagtgaacatcacccacccgaacaaccacaacaggtacgcctcaagggagcgtcggaccgagtaatcatcagcgtcagggtgcagaaggtccgcagtgaactggagcaaccaagccttgctaggcccgactgtagagtacggaggaagggtggtggtcggtcctaggtgtggaaggcgcatcacctgctcgaagcgcgcagtgatatcctccttccacccaaaaacaccgtcgacgggaccaactggtgctcccgccagcggtagcccgagcaggtacgacacgtcctgcagtgtcggagccatctccccacagggaaggtggaacgtgtgcgtctcaggtctccagcggtctacaagagcggcaaggagtgaccggtctgcatcccaccgcttcgctgggtcacggtcgtccgccgccgcctcaacaagcctacaaagtggtagaaggcctgccgcacgcaaccaaggaacgtgacgggggtcgacacgcaaccactcgcgcgacgtgcgtggacggaaggtgccgagctgtgcaccctcgactgctgacaggaacgagcggtggttcctgtcaatcccacggttcaacagcgccggtgtgtcgtacgccataccatcacttgcctgtccagatggactagcatctgcgccgcttggaacttctgcattcttcgggcatgtcttgtaagtatggccgcgcagatcacacttgctgcagcgtaaagtcctcccacctgcttctgactcatccatatcatttctgatgcgtctagtttggcgtcgaccctttttcaccctaaacttagatggatctggaatataaaaaacttgggcactcagcgttgtgtaagatcctgagatcccgaacccatatatctcctcactccatgtatgaaagattgcttctttcctgaaataatttgagacgtacacattgggagatatgccacaatcaccggcagcagcaagaacgtgtgagcaaggaaggtgatgaagcttcggcttcatacaactgcaggtacatccaccatccgccttcaagacacattcctgcacggcttgcttgcgatagataccacgcctgctcctatcaacacacattatttcataccgatgcacttgtgtgccttgagcaacaactctatgtctccgtgcctttttgattttatcttccatgtactttgtcactacgttgccaaacactatgttgttatcggccatggacggaccaattttcttgtatcgatccctaaagtaggcttgcgtgccgtgaaggatgaattcaacaatagcaaccaatggaagtactcgaactcctcgcattacccagttgtacacctctgccaaattggttgtcattatgccataccgagatccatcggtgtcgaacaatagagcccacttctccttaggctcattctcaatccactgagagaaatttctgatggccgaccctgacctccttctcattgttggtgggtcatcatgtaatgcaccaagaggtatgggaggctcgtcaccttcaacttgtggtctgcgagattgctcatctgtttgcttcgttgtcaactcatccaacttgtcccacaactcattaaatttcttctcttggttctgtgcacagagcctcttaaagagctccataagatgcttgttcttgaattgcttgtagaaatttgcacccatgtgacgcatgcaccaccgactccgaacatcaggccacttagctggaagtcccttctcatcccaaccgttctgcaagtagtcaatagcccgcaacatacccgcatgacgatcatgtataaggcaaacgttgggcctcatacgcaccactgcaatgtgcactctctctaggaaccagtaccagctttcagtgttctcactctctacaaatgcaaaagccataggtagaacctggttgttcccatcacacccaattgctgtcaatatctgacctcggtatttacctgtcataaaagttccatctatgcatagaacaggtcgacaatgcacaaaagcattgatgcaagcacccaatgagaaaaaggctctttgcagcacactctttgttctatcttcaaccgatgtaaatgtatgtaggtcatagtaagtattattattcctctgggcaatggtggctaacaaacgaggcaaattatcataagaagcttcaaatgtgccatacctcatctcaatgatcttttgtttggctctccaggcctttgcatagcttatggtgtacttgaatttgttctcgatgtgcctaataattgattttggttcaaagccaatgttaccaacaacactgctgtacatctcacttgccacaaaagctgaagtgatgtttcggtgatacttctccaccccttgtaagtagcacttgtgctcggtcacaatgctaactttccaataatcattccatttacccttatatgcatggacacgccacggacaatcttccttcatgcacctcacttcatacacataatttgttgacttgaccaccctaaactctctctgcaatgaaactgcccaatgcttcaccgcctccttcatctcatccttatgagcataccttgcaccctcaattacctcgtactccttatactcccagggtacatgatcaccctctgatataacaagaccagagaagtcctcatttgcccaatcagtggccattacatcaccttcctcatcggatgatgcgtcgtcctccgcttgctcattatccgaatcttccctctccatttcatcaacaattataccgactctctccccctcatccgccatgcccatggcctgctcctcccttggttgattttcctcattttgcatcgatggtccaacaacatcccctgcattgctaggaccctccacatcttcggtttgcattgaaacatttgtatctttctctggtaccgacacaaatataacgaggggccatgaccgttcaaaagccatttccacataccgtctccaagcagcagtgctgtccatcggcattagttcccaaaaataaccttctattgcacgactcactacaacagatactgacattgtgtagacttcttggtctattctaaatcctctcaacaaccaactataaattgactgaaatgttctctccgcaggcctatcgatgcccttagatgtcattacaaaatctgacagatcaacaccatctggaccaaatctaatatttccttcaccgtgaactatctgaaatgtgaccttacttgacat

SEQ ID NO: 4462 - DNA, 926 bp, Oryza sativa
  Clone ID: PAT_MRT4530_11343C.1
tggaagatatacaggaagagactcctactcctagatagatatcgatagagataaaatcccccaccccacccaccttgcgctttctgctccgcccgcaatttcgccgtcgccgtcgtcgtcctcctccccggccgcttcccttcatccaggttcccccatggcggactccggcgctcgcaggcagcctagcttcaccaaggtcgaccagctccgccctgggacccatggccacaaccttctcctcaaggtcgtcgactccaagatggtccttcagaggggcggaggccctcagggcaggcacatgcggattgccgagtgcctcgtcggcgatgaaaccggcattattgtcttcaccgcaaggaacgaccaggtggatgtaatgaaggctggggctagtgttgacctgaggaatgccaagattgatatgttcaaggggtcgatgcggcttgcggtggacaagtgggggattgtgaaagctgctgaaagcccagctgatttcacagtgaaggaggataacaacatgtccttgatcgagtttgagctggtgacagtggtggagtgagagccttttttggtgtaggaggacggtatgtggtagaaccaattcatcttaaccaagcaataagtggaatcatggttgatgggtttttgtttatgtatttggagatccggaggttgagtagtgtcatctttaattaattaattatccgacaattgttgagaatagtctcctgtagtagtcctctgttggacctgttatgatgatgcatcatcgagttgcttattgccgtactatatatgtaaaaaactggtggtgttttgcatgggcaaaaaaaaaaagagtgctgtgcttactggcgatggcgatgataataatcaactgaagcagcaatggtgattgctgtgcactaaaaaaaaaaaaaaaa

SEQ ID NO: 4463 - DNA, 4922 bp, Oryza sativa
  Clone ID: PAT_MRT4530_11344C.1
atgtcaaataaggtcacatttcagatagttcacggtgaaggaaatattagatttggtccagatggtgttgatctgtcagattttgtaatgacatctaagggcatcgataggcctgcggagagaacatttcagtcaatttatagttggttgttgagaggatttagaatagaccaagaagtctacacaatgtcagtatcagttgtagtgagtcatgcaacagaaggttatttttgggaactaatgccgatggacagcactgctgcttggagacggtatgtggaaatggcttttgaacggtcatggcccctcgttatatttgtgtcggtacaagagaaagatataaatgtttcaatgcaaaccgaagatgtagagggtcctatcaatgcaggggatgttgttggaccatcgatgcaaaatgaggaaaatcaaccaagggaggagcaggccatgggcatggcggatgagggggagagagtcggtataattgttgatgaaatggagagggaagattcggataatgaggaagcggacgacgatgcatcatccgatgaggaaggtgatgtaatggccactgattgggcaaatgaggacttctctggacttgttatatcagagggtgatcatgtaccctgggagtataaggagaacgaggtaattgagggtgcaaggtatgcttataaggatgagatgaaggaggcggtgaagcattgggcagttttcttgcagagagagtttagggtggtgaagtcaacaaattatgtgtatgaagtgaggtgcatgaaggaagattgtccgtggcgtgtccatgcatataagggtaaatggaatgattattggaaagttagcattgtgaccgagcacaagtgctacttacaaggggtggagaagtatcaccgaaacatcacttcagcttttgtggcaagtgagatgtacagcagtgttgttggtaacattggctttgaaccaaaatcaattattaggcacatcgagaacaaattcaagtacaccataagctatgcaaaggcctggagagccaaacaaaagattattgagatgaggtatggcacatttgaagcttcttatgataatttgcctcgtttgttagccaccattgcccagaggaataataatacttactatgacctacatacatttacatcggttgatgatcgaacaaagagtgtgctgcaaagagcctttttctcattgggtgcttgcatcaatgcttttgtgcattgtcgacctgttctatgcatagatggaacttttatgacaggtaaataccgaggtcagatattgacagcaattgggtgtgatgggaacaaccaggttctacctatggcttttgcatttgtagagagtgagaacactgaaagctggtactggttcctagagagagtgcacattgcagtggtgcgtatgaggcccaacgtttgccttatacatgatcgtcatgcgggtatgttacgggctattgactacttgcagaacggttgggatgagaagggacttccagctaagtggcctgatgttcggagtcggtggtgcatgcgtcacatgggtgcaaatttctacaagcaattcaagaacaagcatcttatggagctctttaagaggctctgtgcacagaaccaagagaagaaatttaatgagttgtgggacaagttggatgagttgacaacgaagcaaacagatgagcaatctcgcagaccacaagttgaaggtgacgagcctcccatacctcttggtgcattacatgatgacacaccaacaatgagaaggaggtcaaggtcgtccatcagaaatttcactcagtggattgagaatgagcctaaggagaagtggtctctattgttcgacactgatggatctcggtatggcataatgacaaccaatttggcagaggtgtacaactgggtaatgcgaggagttcgggtacttccattggttgctattgttgaattcatccttcacggcacgcaagcgtactttagggatcgatacaagaaaattgatccgtccatggccgataacaatatagtgtttggcaacgtagtgacaaagtacatggaagataaaatcaaaaaggcacggagacatagagttgttgctcaaggcacacaagtgcatcggtatgaaataatgtgtgttgataggagcaggcgtggtatctatcgcaagcaagccgtgcaggaatgtgtcttaaaggcggatggtggatgtacctgcagttgtatgaagccgaagcttcatcaccttccttgctcacacgttcttgctgctgccggtgattgtggcatatctcccaatgtgtacgtctcaaattatttcaggaaagaagcaatctttcatacatggagtgaggagatatatgggttcgggatctcaggatcttacacaacgctgagtgcccaagttttttatattccagatccatctaagttaagggtgaaaaagggtcgacgccaaactagacgcatcagaaatgatatggatgagtcagaagcaggtgggaggactttacgctgcagcaagtgtgatctgcgcggccatacttacaagaaatgcccgaagaatgcagaagttccaagcggcgcagatgctagtccatctggacaggcaagtgatggtatggcgtacgacacaccggcgctgttgaaccgtgggattgacaggaaccaccgctcgttcctgtcagcagtcgagggtgcacagctcggcaccttccgtccacgcacgtcgcgcgagtggttgcgtgtccacccccgtcacgttccttggtacgcgttgcgtgcggcaggccttctaccactttgtaggcttgttgaggcggcggcggacgaccgtgacccagcgaagcggtgggatgcagaccggtcactccttgccgctctggacgtgtcgtacctgctcgggctaccgctggcgggagcaccagttggttccgtggacggtgttgttgggtggaaggaggatatcactgcgcgcttcgagcaggtgatgcgccttccacacctaggaccggccaacacccttcctccgtactctacagtcgggcctagcaaggcttggttgctccagttcactgcggaccttctgcaccctgacgctgatgattactcggtccgacgctcccttgaggcgtacctgttgtggttgttcgggtgggtgatgttcactagcacccacgggcacgctgtggacttccggctggtccactacgcacggtccatcgcggatgctcagccacaggacgtgccgcaatggagctggggttctgccgtgctagcagccacgtaccgtgccctctgtgaggcgtgcacgaagactgacgcgggagcgatcatcgctggctgccctatgttgcttcagctttgggcagccgagaggtttgccataggtcgaccagtggtggacagcgcaccctacggggttggtcgcagcgcgcagtggccagaggacggtcccacgatggggacttactggtgtcgacgtgggcgtcgttacgctcacgtccaggtgagacgaggttacccggacttcgtgttcgagtttgaccgtctccagccgagcgacgtcatctgggagccgtacacagaagaggccgtcgctgcgagagcatcgctaggactttcgtccttgtgcacacgcgaccggcttactggctcaccatcctgccgatggtgttcgacattttcgttgatcctcactgcccgcagcgtgtgatgagacagttcggacttaggcaggtgtttccgggcaacgtgcagccgaccgtcctccctgccgaccactcgttgactcgacggggacagctagcaggcgcactttgggctccacgtgtacagcagtacgttgacgactgggtgttagctacagaggaggtgatcaacgagctcttcccacacacggaggagaactaccgtgactaccttcgctggtaccttcctcgcactcgtgcgcgtgtgaccttcactccagacgccccagagccgcacgttgccgctgtcacggacgcgtatcccacgcaccgtgaccgagactacttcgtgggggctgatgccgcacgggatatcagtgccgatatcaccgcagtccaagtgaggttgaacagaggtttgcacttgactgacgttgagcagagggtgaccttcgaccggatgcaggagaagatgcgtgcggtcatgcgcgtcttctcctgtcgcagcgccgtggacgtcgtacctccagctggtccggtacaaccacggcctcgcgcgcctaccgtcggagcaggacctcgacctacggcacctgtttcgcacggtactgctcagcccagaggacctcgtttgccttcgagcgcccctagctttggagcagtgcgacctacagcaccggtttcgcacgcttttgcacgaatatgtcaccatgttttaactgcacgtttcctcatcgcaggacctcgtctgccttcgagcgcgttcgcaggcacgaccggcgcttccgcgagctccgcaagggcgttcgccacctcttcgggcgcgttcgccagctcttcctctcacggagcgtcgatccctcgcccacacggtactttactttttattaatactattaaatacatgtatgaaactgatggtccttgtccagcaggatttgcagccgggatcttcggtactggggcctcttcgtctcacgccggtaggactggtcctactagccagttctacgacgacgacttgcacggtgcacaccaccacgacgtactaggctcctctcagcttggaggagctccagaggcgcacactcaggagcagccagaggtcacacctgtacaggcaggacgggttggccgtgccgtacccccggaccgactcacgtactcccaggggcacattagggcgcagggtaggagggacaggggtaagagacctcgtcag

SEQ ID NO: 4464 - DNA, 1020 bp, Oryza sativa
  Clone ID: PAT_MRT4530_11345C.1
atggagaacatgagatctgagaactttaaccaaggtgtttcaatggagggcgtcaagcatgcgcccgagatggcaaacaccaacaggagggctctgcgggacatcaagaacatcatcggagacctcaccagcacatggcttaaacctgccgctaagaaccaagctggacaccgtcctatgacgaggaaatttgctgcaacactggcaaaccaaccctccagtgctcccctgatttacatgcagaaactcgaaatggcacccattggaagtgagaggcaaaaaaggacagcagattctgcatttcatggtccagcagatatggagtgcaccaagatcacatctgatgatttgccattgccaatgatgtctgagatggacgaagtgatgggttctgaactgaaagaaattgagatggaagacattgaggaggcagcacctgatattgacagctgtgatgcaaataactcccttgcagtagttgaatatgttgatgaaatttacagcttctacaggaggagtgaggtgcattacaagttagagctattggatgagaccctcttccttactgtgaatatcatagaccgattcttggctcgcgaaaatgtggtgcgaaagaagcttcagttggttggcgtgactgccatgctgctcgcctgcaagtatgaagaagtgagcgttcctgtagtggaggatcttatcctaatctgcgaccgcgcctacacaagaacagatattctcgaaatggagaggatgattgtaaacactcttcagtttgatatgtcagttccaactccatactgtttcatgagaaggttcctcaaggctgcacaatctgacaagaaggtaggacaaaaacacactggtgcatccatctttgtattgatatacagtagctttgctatggagtgctccaagatgatggttgagctccaccaaaaagcaggacatgggaagcttactggagttcatagaaagtacagcacatttaggttgcttccaattaaatctgttggaacttga

SEQ ID NO: 4465 - DNA, 449 bp, Oryza sativa
  unsure (1)..(449): unsure at all n locations
  Clone ID: PAT_MRT4530_11346C.1
tgcgctttctgctccgcccgcaatttcgccgtcgccgtcgtcgtcctcctccccggccgcttcccttcatccaggtatcgatcaccttagctctcccatcatccaatctcacactcatattcatgcagatcccgcccgcctctggatcagatcaggttcccccatggcggactccggcgctcgcaggcagcctagcttcaccaaggtcgaccagctccgccctgggacccatggccacaaccttctcctcaaggtcgtcgactccaagatggtccttcggaggggcggaggccctcagggcaggcacatgcggattgccgagtgcctcgtcggcgatgaaaccggcattattgtcttcaccgcaaggaacgaccaggtggatgtaatgaaggctggngctagtgttgacctgaggaatgccaagattgatatgttcaaggggtcgatgc

SEQ ID NO: 4466 - DNA, 4404 bp, Oryza sativa
  Clone ID: PAT_MRT4530_11347C.1
ctatcggccccttctaggtcggtcagaatgcattgcattctcgtggtccttcaatcgttgatactctacttgtgttgctgactctgttatcttctggccatgatatgatggagtgacattgtcgatccattgagtaaatccacccatccttggattgccgtgccattctaaagcctcagcagcaattcgacgttcatgctcatccttccaccttaggtagtccgatcttgtttcactacgtgggtaagcacgggttccatcgttttgtgggttctccatgtctacccactcgatgaagttgcacattggacgatatgtcgtgaagcgccgaaagtgtgttgtcgtgagcataagttgttctagcatcatatgaatgaaaagaaccctgtccctcctaccctgcgccctaatgtgcccctgggagtacgtgagtcggtccgggggtatggcacggccaacccgtcctgcctgtacaggtgtgacctctggctgctcctgagtgtgcgcctctggagctcctccaagctgagaggagcctagtacgtcgtggtggtgtgcaccgtgcaagtcgtcgtcgtagaactggctagtaggaccagtcctaccggcgtgagacgaagaggccccagtaccgaagatcccggctgcaaatcctgcgtgtgaaacaggtaccgtaggtcgaggtcctgttccgacgataggcgcgcgaggccgtggttgtaccggaccagctggaggtacgacgtccacggcgctgcgacaggagaagacgcgcatgaccgcacgcatcttctcctgcatccggtcgaaggtcaccctctgctcaacgtcagtcaagtgcaaacctctgttcaacctcacttggactgcggtgatatcggcactgatatcccgtgcagcatcagcccccacgaagtagtctcggtcacggtgcgtgggatacgcgtccgtcacagcggcaacgtgcggctctggggcgtctggagtgaaggtcacacgcgcacgagtgcgaggaaggtaccagtgaaggtagtcacggtagttctcctccgtgtgtgggaagagctcgttgatcacctcctctgtagctaacacccagtcgtcaacgtactgctgtacacgtggagccagtgcgcctgctagctgtccccgtcgagtcaacgagtggtcggcagggaggacggtcggctgcacgttgcccggaaacacctgcctaagtccgaactgtctcatcacacgctgcgggcagtgaggctcaacgaaaatgtcgaacaccatcggcaggatggtgagccagtaagcctggtcgcgtgtgcacaacgacgaaagtcctagcggtgctctcgcagcgacggcctcttctgtgtacggctcccagatgacgtcgctcggctggagacggtcaaactcgaacacgtagtccgggtaacctcgtctcacctggacgtgagcgtaacgacgcccacgtcgacaccagtaagtccccatcgtgggaccgtcctctggccactgcgcgctgcgaccaaccccgtagggtgcgctgtccaccactggtcgacctatggcaaacctctcggctgcccaaagctgaagcaacatagggcagccagcgatgatcgctcccgcgtcagtcttcgtgcacgcctcacagagggcacggtacgtggctgctagcacggcagaaccccagctgcactgcggcacgtcctgtggctgagcatccgcgatggaccgtgcgtagtggaccagccggaagtccacagcgtgcccgtgggtgctagtgaacatcacccacccgaacaaccacaacaggtacgcctcaagggagcgtcggaccgagttatcatcagcgtcagggtgcagaaggtccgcagtgaactggagcaaccaagccttgctaggcccgactgtagagtacggaggaagggtgttggccggtcctaggtgtggaaggcgcatcacctgctcgaagcgcgcagtgatatcctccttccacccaaaaacaccgtccacgggaccaactcgtgctcccgccagcggtagcccgagcaggtacgacacgtcctgcagtgtcggagccatctccccacagggaaggtggaacgtgtgcgtctcaggtctccagcagtctaccagagcggcaaggagtgaccggtctgcatcccaccgcttcgctgggtcacggtcgtccgccgccgcctcaacaagcctacaaagtggtagaaggcctgccgcacgcaaccaaggaacgtgacgggggtcgacacgcaaccactcgcgcgacgtgcgtggacggaaggtgccgagctgtgcaccctcgagtgctgacaggaacgagcggtggttcctgtcaatcccacggttcaacagcgccggtgtgtcgtacgccataccatcacttgcctgtccagatggactagcatctgcgccgcttggaacttctgcattcttcgggcatttcttgtaagtatggccgcgcagatcacacttgctgcagcgtaaagtcctcccacctgcttctgactcatccatatcatttctgatgcgtctagtttggcgtcgaccctttttcacccttaacttagatggatctggaatgtaaaaaacttgggcactcagcgttgtgtaagatcctgagatcccgaacccatatatctcctcactccatgtatgaaagattgcttctttccgagatccatcggtgtcgaacaatagagaccacttctccttaggctcattctcaatccactgagtgaaatttctgatggacgaccctgacctccttctcattgttggtgggtcatcatgtaatgcaccaagaggtatgggaggctcgtcaccttcaacttgtggtctgcgagattgctcatctgtttgcttcgttgtcaactcatccaacttgtcccacaactcattaaatttcttctcttggttctgtgcacagagcctcttaaagagctccacaaaatgcttgttcttgaattgcttgtagaaatttgcacccatgtgactcatgcaccaccgactccgaacatcaggccacttagctggaagtcccttctcatcccaaccgttctggttgttcccatcacacccaattgctgtcaatatctgacctcggtatttacctgtcataaaagttccatctatgcatagaacaggtcgacaatgcacaaaagcattgatgcaagcacccaatgagaaaaaggctctttgcagcacactctttgttcgatcatcaaccgatgtaaatgtatgtaggtcatagtaagtattattattcctctgggcaatggtggctaacaaacgaggcaaattatcataagaagcttcaaatgtgccatacctcatctcaataatcttttgtttggctctccaggcttttgcatagcttatggtgtacttgaatttgttctcgatgtgcctaataattgattttggttcaaagccaatgttaccaacaacactgctgtacatctcacttgccacaaaagctgaagtgatgtttcggtgatacttctccaccccttgtaagtagcacttgtgctcggtcacaatgctaactttccaataatcattccatttacccttatatgcatggacacgccacggacaatcttccttcatgcacctcacttcatacacataatttgttgacttgaccaccctaaactctctctgcaaggaaactgcccaatgcttcaccgcctccttcatctcatccttatgagcataccttgcaccgtcaattacctcgttctccttatactcccagggtacatgatcaccctctgatataacaagtccagagaagtcctcatttgcccaatcagtggccattacatcaccttcctcatcggatgatgcgtcgtcgtccgcttcctcattatccgaatcttccctctccatttcatcaacaattataccgactctctccccctcatccgccatgcccatggcctgctcctcccttggttgatttttctcattttgcatcgatggtccaacaacatcccctgcattgataggaccctttacatcttcggtttgcattgaaacatttatatctttctcttgtaccgacacaaatataacgaggggccatgaccgttcaaaagccatttccacataccgtctccaagcagcagtgctgtccatcggcattagttcccaaaaataaccttctgttgcacgactcactacaactgatactgacattgtgtagacttcttggtctattctaaatcctctcaacaaccaactataaattgactgaaatgttctctccgcaggcctatcgatacccttagatgtcattacaaaatctgacagatcaacaccatctggaccaaatctaatatttccttcaccgtgaactatctgaaatgtgaccttatttgacat

SEQ ID NO: 4467 - DNA, 885 bp, Oryza sativa
  Clone ID: PAT_MRT4530_11348C.1
atggcggaccggacgacgcgctcgacgccgccgccgcagtgggcggagctgccgacggactgcctcgtgcacgtgttccggcggctggaccttgacgagctggcgtccgccgcgccgctggtgtgccgcgggtggcgccgtgcggccgcggacccatcgctgtggcgggcgctcgacctgcgccgcgaccacctcgcccgcttcatgccgtggggcgcgctggcgggcgccctcgcgcgcctccacggcgtccaccgcttcaccctcgccggcttcctcaggctctgcgtcgcccgcgccgccggcaccgtcgccgacctcgccctcccgccgctactctcctcgtcggagctcgaccacgtcgccgccgagtgcccggcgctgcggcggctcgcactgcccgagctcccccccgccgacgacgcgcgcctcccgtcactcctcccgcggtggcgccgcctcacccacctggagctcgactccaagccgtcctccttcccggccgtcgccgcggcgctcgcgctgcactgccccgacctcgccgtcctcagggtcacctccggctccgtcaagcccgaggacgccgcggccatggcggcggcgtcgccgctgcgtggccgcctccggtcgctgtgcctggaccgctgctacctccccaggcaggagctgctcgccatcctcgccggctgcggcggcgcggcgccgctccgcgagttcacggcgaggttctgcgtcggcttcgacgacaaggacgaggaggtgctcgcgcgaggcgccgccatcgagcgcttcgacatcggagggtccagattgctcgacgagcccgacggcgacgcgaccaacggtgatgattactgcgactcctcctacgtcgatgtcatctga

SEQ ID NO: 4468 - DNA, 472 bp, Oryza sativa
  unsure (1)..(472): unsure at all n locations
  Clone ID: PAT_MRT4530_1134C.1
cggcggggaggagacggcggagacccacgtgtgcgccatctgcctcggcgagttcgcggacggcgagaaggtgcgcgtgctgccncggtgccggcacgggttccacgtccggtgcgtcgacgcctggctggtctcgcacggctcctgcccgacgtgccgccgccaggtgatcggcggcggcgggagcacgccgccgccggacagcgacaccatcgccgtggtcgtagcatgatgtgagagacaaaagatatactactccagtagtcttcgtagctagctgggctcctgcctggcctctttggcgccaatcccttctaaaaaatatctcgctgatcgatctgatctctccggatattttccggcgaacggctagtgactagtgactcatcagcttgttgtggcgaatgtattgacgggtgcccaattggcccaaattggtcactgtatatacacgttcaacatcgccgtcccg

SEQ ID NO: 4469 - DNA, 3318 bp, Oryza sativa
  Clone ID: PAT_MRT4530_11350C.1
ctactgacgaggcctcttacccctgtccctcctaccctgcgccctaatgtgcccgtgggagtacgtgagtcggtccgggggtacggcacggccaacccgtcctgcctgtacaggtgtgacctctggctgctcctgagtgtgcgcctctggagctcctccaagctgagaggagcctagtacgtcgtggcggtctgcaccgtgcaagtcgtcgtcgtagaactggctagtaggaccagtcctaccggcgtgagacgaagaggccccagtaccgaagatcccggctgcaaatcctgcgtgcgaaataggtgccgtaggtcgaggtcctgctccgacggtaggcgcgcgaggccgtggttgtaccggaccagctggaggtacgacgtccacggcgctgcgacaggagaagacgcgcatgaccgcacgcatcttctcctgcatccggtcgaaggtcaccctctgctcaacgtcagtcaagtgcaaacctctgttcaacctcacttggactgcggtgatatcggcactgatatcccgtgcggcatcagccgccacgaagtagtctcggtcacggtgcgtgggatacgcatccgtgacagcggcaacgtgcggctctggggcgtctggagtgaaggtcacacgcgcacgagtgcgaggaaggtaccaacgaaggtagtcacggtagttctcctccgtgtgtgggaagagctcgttgatcacctcctctgtagctaacacccagtcgtcaacgtactgctgtacacgtggagcccaaagtgcgcctgctagctgtccccgtcgagtcaacgagtggtcggcagggaggacggtcggctgcacgttgcccggaaacacctgcctaagtccgaactgtctcatcacacgctgcgggcagtgaggctcaacgaaaatgtcgaacaccatcggcaggatggtgagccagtaagcctggtcgcgtgtgcacaaggacgaaagtcctagcggtgctctcgcagcgacggcctcttctgtgtacggctcccagatgacgtcgctcggctggagacggtcaaactcgaacacgaagtccgggtaaccacgtctcacctggacgtgagcgtaacgacgctctcggctgcccaaagctgaagcaacatagggcagccagcgatagataccacgcctgctcctatcaacacacattatttcataccgatgcacttgtgtgccttgagcaacaactcgatgtctccgtgcctttttgattttatcttccatgtactttgtcactacgttgccaaacactatgttgtcatcggccatggacggaccaattttcttgtatcgatccctaaagtacgcttgcgtgccgtgaaggatgaattcaacaatagcaaccaatggaagtacccgaactcctcgcattacccagttgtacacctctgccaaattggttgtcattatgccataccgagatccatcggtgtcgaacaatagagaccacttctccttaggctcattctcaatccactgagtgaaatttctgatggacgaccctgacctccttctcattgttggtgggtcatcatgtaatgcaccaagaggtatgggaggctcgtcaccttcaactagtggtctgcgagattgctcatctgtttgcttcgttgtcaactcatccaacttgtcccacaactcattaaatttcttctcttggttctgtgcacagagcctcttaaagagctccataagatgcttgttcttcaattgcttgtagaaatttgcacccatgtgacgcatgcaccaccgactccgaacatcaggccacttagctggaagtcccttctcatcccaaccgttctgcaagtagtcaatagcccgcaacatacccgcatgacgatcatgtataaggcaaacgttgggcctcatacgcaccactgcaatgtgcactctctctaggaaccagtaccagctttcagtgttctcactctctacaaatgcaaaagccataggtagaacctggttgttcccatcacacccaattgctgtcaatatctgacctcggtatttacctgtcataaaagttccatctatgcatagaacaggtcgataatgcacaaaagcattgatgcaagcacccaatgagaaaaaggctctttgcagcacactctttgttcgatcatcaaccgatgtaaatgtatgtaggtcatagtacgtattattattcctctgggcaatggtggctaacaaacgaggcaaattatcataagaagcttcaaatgtgccatacctcatctcaatgatcttttgtttggctctccaggcctttgcatagcttatggtgtacttgaatttgttctcgatgtgcctaataattgattttggttcaaagccaatgttaccaacaacactgttgtacatctcacttgccacaaaagctgaagtgatgtttcggtgatacttctccaccccttgtaagtagcacttgtgctcggtcacaatgctaactttccaataatcattccatttacccttatatgcatggacacgccacggacaatcttccttcatgcacctcacttcatacacataatttgttgacttgaccaccctaaactctctctgcaaggaaactgcccaatgcttcaccgcctccttcatctcatccttatgagcatatcttgcaccctcaattacctcgttctccttatactcccagggtacatgatcaccctctgatataacaagtccagagaagtccttatttgcccaatcagtggccattacatcaccttcctcatcggatgatgcgtcgtcgtccacttcctcattatccgaatcttccctctccatttcatcaacaattataccgactctctccccctcatccgccatgcccatagcctgctcctcccttggttgattttcctcattttgcatcgatggtccaacaacatcccctgcattgataggaccctctacatcttcggtttgcattgaaacatttatatctttctcttgtaccgacacaaatataacgaggagccatgtccgttcaaaagccatttccacataccgtctccaagcatcagtgctgtccatcggcattagttcccaaaaataaccttctgttgcacgactcactacaactgacactgacattgtgtagacttcttggtctattctaaatcctcttaacaaccaactataaattgactgaaatgttctctccgcaggcctatcgatgcccttagatgtcattacaaaatctgacagatcaacaccatctggaccaaatctaatatttccttcaccgtgaactatctgaaatgtgaccttacttgacat

SEQ ID NO: 4470 - DNA, 3267 bp, Oryza sativa
  Clone ID: PAT_MRT4530_11351C.1
ctatcggccccttctaggtcggtcagaatgcattgcattctcgtggtccttcaatcgttgatactctacttgtgtttctgactctgttatcttctggccatgatatgatggagtgacattgtcgatccatcgagtaaatccacccatccttggattgccgtgccattctaaagcctcagcagcaattcgacgttcatgctcatccttccgccttaggtagtccgatcttgtttcactacgtgggtaagcacgggttccgtcgttttgtgggttctccatgtctacccactcgatgaagttgcacattggacgatatgtcgtgaagcgccgaaagtgtgttgtcgtgagcataagttgttctagcacgatatgaatgaaaagaaccctgtccctcctaccctgcgccctaatgtgcccctgggagtacgtgagtcggtccgggggtacggcacggccaacccgtcctgcctgtacaggtgtgacctctggctgctcctgagagtgtgcctctggagctcctccaagctgagagaagcctagtacgtcgtggtggtgtgcaccgtgcaagtcgtcgtcgtagaactggctagtaggaccagtcctaccggcgtgagacgaagaggccccagtatcgaagatcccggctgcaaatcctacgtgcgaaacaggtaccgtaggtcgaggtcctgctccgacggtaggcgcacgaggccgtggttgtaccggaccagctggaggtacgacgtccacggcgctgcgacaggagaagacgcgcatgaccgcacgcatcttctcctgcatccggtcgaaggtcaccctctgctcaacgtcagtcaagtgcaaacctctgttcaacctcacttggactgcggtgatatcggcactgatatcccgtgcggcatcagcccccacgaagtagtctcggtcacggtgcgtgggatacgcgtccgtcacagcggcaacgtgcggctctggggcgtctggagtgaaggtcacacgcgcatgagtgcgaggaaggtaccagcgaaggtagtcacggtagttctcctccgtgtgtgggaagagctcgttgatcacctcctctgtagctaacacccagtcgtcaacgtactgctgtacacgtggagcccaaagtgcgcctgctagctgtccccgtcgagtcaacgagtggtcggcagggaggacggtcggctgcacgttgcccggaaacacctgcctaagtccgaactgtctcatcacatgctgcgggcagtgaggctcaacgaaaatgtcgaacaccatcggcaggatggtgagccagtaagcctggtcgcgtgtgcacaacgacgaaagtcctagcggtgctctcgcagcgacggcctcttctgtgtacggctcccagatgacgtcgctcggctggagacggtcaaactcgaacacgaagtccgggtaacctcgtctcacctggacgtgagcgtaacgacgcccacgtcgacaccagtaagtccccatcgtgggaccgtcctctggccactgcgcgctgcgaccaaccccgtatggtgcgctgtccaccactggtcgacctatggcaaacctctcggctgtccaaagctgaagcaacatagggcagccagcgatgatcgctcccgcgtcagtcttcgtgcacgcctcacagagggcacggtacgtggctgctagcacggcagaaccccagctccactgcggcacgtcctgtggctgagcatccgcgatcgaccgtgcgtagtggaccagccggaagtccacagcgtgcccgtgggtgctagtgaacatcacccacccgaacaaccacaacaggtacgcctcaagggagcgtcggaccgagttatcatcagcgtcagggtgcagaaggtccgcagtgaactggagcaaccaagccttgctaggcccgactgtagagtacggaggaagggtgttggccggtcctaggtgtggaaggcgcatcacctgctcgaagcgcgcagtgatatcctccttccacccaaaaacaccgtccacgggaccaactggtgctcccgccagcggtagcccgagcaggtacgacacgtgctgcagtgtcggagctatctccccacagggaaggtggaacgtgtgcgtctcaggtctccagcggtctaccagagcggtaaggagtgaccggtctgcatcccaccgcttcgctgggtcacggtcgtccgccgccgcctcaacaagcctacaaagtggtagaaggcctgccgcacgcaaccaaggaacgtgacgggggtcgacacgcaaccactcgcgcgacgtgcgtggacggaaggtgccgagctgtgcaccctcgactgctgacaggaacgagcggtggttcctgtcaatcccacggttcaacagcgccggtgtgtcgtacgccataccatcacttgcctgtccagatggactagcatctgcgccgcttggaacttctgcattcttcgggcatttcttgtaagtatggccgcgcagatcacacttgctgcagcgtaaagtcctcccacctgcttctgactcatccatatcatttctgatgcgtctagtttggcgtcgaccctttttcacccttaacttagatgggtctggaatgtaaaaaacttgggcactcagcgttgtgtaagatcctgagatcccgaacccatatatctcctcactccatgtatgaaagattgcttctttcctgaaataatttgagacgtacacattggaagatatgccacaatcaccggcagcagcaagaacgtgtgagcaaggaaggtgatgaagcttcggcttcatacaactgcaggtacatccaccatccgccttcaagacacattcctgcacggcttgcttgcgatagataccacgcctgctcctatcaacacacattatttcataccgatgcacttgtgtgccttgagcaacaactctatgtctccgtgcctttttgattttatcttccatgtactttgtcactacgttgccaaacactatgttgttatcggccatggacggaccaattttcttgtatcgatccctaaagtacgcttgcgtgccgtgaaggatgaattcaacaatagcaaccaatggaagtacccgaactcctcgcattacccagttgtacacctctgccaaattggttgtcattatgccataccgagatccatcggtgtcgaacaatagagaccacttctccttaggctcattctcaatccactgtgtgaaatttctgatggacgaccctgacctccttctgctccacgcttggcccat

SEQ ID NO: 4471 - DNA, 1004 bp, Oryza sativa
  Clone ID: PAT_MRT4530_11352C.1
atcttaacttaagtggttttgaattccaaatgttgcccgacttttttggcaacatatattcacttcagtatttaaatctgtcaaaatgtttgaaacttgaggtattaccacaatcatttggccaacttgcatatctgaaaagcctaaacctttcatattgttctgatcttaaactgctggaatcctttgaatgccttacctctcttcggtttttgaatctctcgaactgctctaggcttgaatatttgccatcgtgctttgacaagcttaataatttagagtctctgaatttgtcacaatgtcttggacttaaagcactacctgaatcacttcaaaaccttaaaaatcttcagcttgatgtttctgggtgtcaggattgtatagtacaatccttttctctaagtaccagaagttcccagtcctgccaacggtcggagaaagctgagcaggtcagatcaagaaacagtgaaatttcagagatcacttatgaggaacctgctgagattgaacttttaaggaataatccaagtaaagatttggcctccatctcacacctaaatgaggatagaattgaggagcctgaagttgtcactgagtcaagtgcaactagaggtatggtacaacagattccaggaaaccagctctcatcgccttcatctcatctttcttcctttgcatcaagctcagcgccatttgcatcctcctcttgggacacctcaacaagtgagcatccagtgcctaatgaagaggcggcagctttgacagttcctcggtccaacgagaaatgcgacaacactcccatgccggtaaaagatggcctgatatctgaagatgatgcaccgagttcaggcagagttcagttcttgcatttgcacatcgtattactattacctggccttgtttggcacatctccagttccagctccacctctcctagagctggagctcagccaaacagtttcagctccaccgaaaatggggcggagctgggtggagcactctaa

SEQ ID NO: 4472 - DNA, 4981 bp, Oryza sativa
  Clone ID: PAT_MRT4530_11353C.1
gaactagtctcgagtttttttttttttttttttttttttttttaggggcacgataatgagtaagttccaattcccagttaacggaacaaaatttaatggctggacaagatccagcatgttcctcagtttttgattcagataagcaatactgggtagttttactgctaatcacaaattagaacatacaaaaaccggttaccaacaagggttacaatctcccacagaacagattccaggaatacaacattaccaataaaagattaagtcattccgttctgggttgtctgttgctgagggccttgacccagctgctgcgttgccggtgctggttgttgcaatgagctagcttgcgactgtgctggtggtgccagcataggttgataagctgggtactgtggtggctgctggtatggcatgcgaggtgggggcatgtaaccgccataaggtggatagtaggggggatactgaccaccatggtaatatggtggtggcggctcaggataactctgtcctgagctgcttgatgcctgaccttgcccagcctgctgtggacctggtttgccatcgccctcctgtgactcgaccaaggcacccatcctctggggatccatcgaagggtacagtgtccgctctgccgctggcggtgctggaatgttgaagtagtatgatgccgaagcaggttgctgctggccttccatcccaggaggttgaggctggtcaccactctgctgctgagatattacagccctagggagcattcctccatgtgcaacatgcccttgcctcccagcttcatcttcctccggttttggtgcttgaggcttgccccacatgagcttcagacgcacacccttgatgactaacttgttagcgagctcctctgcagctttctcagcaccttctcttgtagtgtaagtcacaaatgcacaagcacgctgcagaaccattcttatggtctcaatctcaccatgggcataaaattgatccctcaaatcctgctcagtgactcgactatcaaggccaccaatgtaaagtgtccttatactctcatcatctgggggtgtcagggatggcatctcaccagccttactcaaaagcttcaaagcaactggatcgttaactgtgaaggcattgacaggttctttcccattcctcttccaatccaagtagcacacctgagctccgtagtaacgatctttgatgttctgctgagataactctccagtttcaggcatctcatgtcgataagggcattcagcacctcttgtacattcaccacgcacatagaaactacagacatgggctcgattcctcttgtaatatggcgctgttctctggagtttcagaatggtgtcgttggcacgtgccttaccattggaagagtcataatcaattccagctctggccctgcgatcatgctcttctgcaaagtactcgcggttcacgtcactccttgggattgcatcgtttgaattagtagaaagtgctgtatccctgacctggaccggcagaccatattcaagatctagaaggcagacctggcagacatttttcagtttgcaacaagtctggcagatctctgtcttcttgtaccttgcatcccggccaggtcgccaacggaagacagtaaaaggacgtgcacatattttgcactctttatcgtattctgctcttaagtaggggttgtcgccgaggcaggactcgcagatgatggggaagtcggaacgctcccacccgtccgcctgcgcgtcccgcagcagccggtgggccatctccgcctccgccgcgccgccgaagccgccgccgtcctgcctgtacaggtgtgacctctggctgctcctgagtgtgcgcctctggagctcctccaagcggcgtgagacgaagaggccccagtaccgaagatcccggcgtgtgggcgagggatcgacgctccgtgagaggaagagctggcgaacgcgcctgaagaggtggcgaacgcccctgcggagctcgcggaagcgccggtcgtgcctgcgaacgcgctcgaaggcatacgaggtccggtgctgtaggtcgcactgctccgaagctaggggcgctcgaagacaaacgaggtcctgctccgacggtaggaccgcgaggccgtgggtgtaccggaccagctggaggtacgacgtccacggcgctctgttcaacctcacctggactgcggtgatatcggcactgatatcccgtgccgcatcagccgccacgaagtagtctcggtcacggtgcgtgggatacgcgtccgtgacagcggcaacgtgcggctctggggcgtctggagtgaaggtcacacgcgcacgagtgcgaggaaggtaccagcgaaggtagtcacggtagttctcctccgtgtgtgggaagagctcgttgatcacctcctctgtagctaacacccagtcgtcaacgtactgctgtacacgtggagcccaaagtgcgcctgctagctgtccccgtcgagtcaacgagtggtcggcaggggggacggtcggctgcacgttgccgggaaacacctgcctaagtccgaactgtctcatcacacgctgcggccagtgaggctcaacgaaaatgtcgaacaccatcggcaggatggtgagccagtaagcctggtcgcgtgtgcacaaggacgaaagtcctagtggtgctctcgcagcgacggcctcttctgtgtacggctcccagatgacgtcgctcggctggagacggtcaaactcgaacacgaagtccgggtaaccacgtctcacctggacgtgagcgtaacgacgcccacgtcgacaccagtaagtccccatcgtgggaccgtcctctggccactgcgcgctgcgaccaaccccgtagggtgcgctgtccaccactggtcgccctatggcaaacctctcggctgcccaaagctgaagcaacataggacagccagcgatgatcgctcccgcgtcagtcttcgtgcacgcctcacagagggcacggtacgtggctgctagcacggcagaaccccagctccactgcggcacgtcctgtggctgagcatccgcgatggaccgtgcgtagtggaccagccggaagtccacagcgtgcccgtgggtgctagtgaacatcacccacccgaacaaccacaacaggtacgcctcaagggagcgtcggaccgagtaatcatcagcgtcagggtgcagaaggtccgcctgctcgaagcgcgcagtgatatcctccttccacccaaaaacaccgtcgatgggaccaactggtgctcccgccagcggtagcccgagcaggtacgacacgtcctgcagtgtcggagccatctccccacagggaaggtggaacgtgtgcgtctcaggtctccagcggtctacaagagcggcaaggagtgaccggtctgcatcccaccgcttcgctgggtcacggtcgtccgccgccgcctcaacaagcgcgtaccaaggaacgtgacgggggtcgacacgcaaccactcgcgcgacgtgcgtggacggaaggtgccgagctgtgcaccctcgactgctgacaggaacgagcggtggttcctgtcaatcccacggttcaacagcgccggtgtgtcgtacgccataccatcacttgcctgtccagatggactagcatctgcgccgcttggaacttctgcattcttcgggcatgtcttgtaagtatggccgcgcagatcacacttgctgcagcgtaaagtcctcccaccggcagcagcaagaacgtgtgagcaaggaaggtgatgaagcttcggcttcatacaactgcaggtacatccaccatccgccttcaagacacattcctgcacggcttgcttgcgatagataccacgctttgtcactacgttgccaaacactatgttgttatcggccatggacggaccaattttcttgtatcgatccctaaagtaggcttgcgtgccgtgaaggatgaattcaacaatagcaaccaatggaagtacccgaactcctcgcattacccagttgtacacctctgccaaattggttgtcattatgccataccgagatccatcggtgtcgaacaatagagcccacttctccttaggctcattctcaatccactgagagaaatttctgatggccgaccctgacctccttctcattgttggtgggtcatcaagtaatgcaccaagaggtatgggaggctcgtcaccttcaacttgtggtctgcgagattgctcatctgtttgcttcgttgtcaactcatccaacttgtcccacaactcattaaatttcttctcttggttctgtgcacagagcctcttaaagagctccataagatgcttgttcttgaattgcttgtagaaatttgcacccatgtgacgcatgcaccaccgactccgaacatcaggccacttagctggaagtcccttctcatcccaaccgttctgcaagtagtcaatagcccgcaacatacccgcatgacgatcatgtataaggcaaacgttgggcctcatacgcaccactgcaatgtgcactctctctaggaaccagtaccagctttcagtgttctcactctctacaaatgcaaaagccataggtagaacctggttgttcccatcacacccaattgctgtcaatatcgcctccttcatctcatccttatgagcataccttgcaccctcaattacctcgtactccttatactcccagggtacatgatcaccctctaatataacaagaccagagaagtcctcatttgcccaatcagtggccattacatcaccttcctcatcggatgatgcgtcgtcctccgcttgctcattatccgaatcttccctctccatttcatcaacaattataccaactctctccccctcatccgccatgcccatggcctgctcctcccttggttgattttcctcattttgcatcgatggtccaacaacatcccctgcattgctaggaccctccacatcttcggtttgcattgaaacatttgtatctttct

SEQ ID NO: 4473 - DNA, 1347 bp, Oryza sativa
  Clone ID: PAT_MRT4530_11354C.1
ttagccacctcccctagccgcgccgctgccggccgccgtcgttgtcgcgtcgccggtgagctgcctcctctcccgccagtatggttcaccatcatgttttctcccgttgccgtgcacgccgccgccaccgctgtgcaccatcgccgccgctgccgagcgccactgccgctgctgtgcagctgtcgccgcgccgcccctgctgccgccgccgccgccgtcgcgattgccgtacctatccgttgcgtcactgccactgcccttctcctttgttgctccgctgaccatggtctgaccaccgtcttcatagcacagtccaacgctgcccaccctgtggtagattaaatcgaactgatttctttgaggtgggaagtaggaggcacagtcgagaacacgcttggcgggagcatgcactggtcttccctcccggtggatctccatcgcaccgcttcaatccccaccgtcaggtctcctctcccttgcaggctgtcgccgaagaccacgatcaagtgcagatgtgagcaatcgaagacgtggcagcctggatctgggcaaaggaccatggcagggagtcttggatttggagcacacctagggagggaggactggagaatggttcatgtgtaggaataagtcttgggctggttggtcctggtcttgtggtgtcttttcttgctttttagctttctaggacagcatctctactttcagtttggatgctctaggacagctaggacagcagtttgttgagatgctctaggacagtttgttaggatgctctaggacagcaccctcttgccctagcatggctgctacaagcagctataaatatgtacccaatcctctttgggaggatatggctttgtgctttgtgaatgaagaaaaccagaaaattgccccatctcgagtgccatcctcttctcaatgagagtaaccattgaaattctaacaaatcccacagcccgcggagtagctagggcgggagaagaagtgcgtcatgtcatgggcaaggtagctggaaaagatgccgtgcactgagtgtgtcataacatgtgggagcagcagccgattggtgtcgatgatagagcaccattccttggacacgcaccgggaggcggcaaggctccttgcaggaaggcagcggatcacttttatgaacacatcgtcagggagacagtccattgcacacccttaatttcctgtgtacaagcagcatttgttagaattttattttattttatttagtctggagagaaatagggcgtaaatttagattacaatccatgatgcatgcattatgtgtattctctcatacaggcatggtacaatacaaagcaaacggtacaatgc

SEQ ID NO: 4474 - DNA, 451 bp, Oryza sativa
  unsure (1)..(451): unsure at all n locations
  Clone ID: PAT_MRT4530_11355C.1
tttttggagaagagcctctgtgcttagcatatcaaagaattatgctgaatatcaaaacatatggcatgcaccaattatcaaagtttactatctttggtttattcatttctcttgatattcatttttatttagagcagttatgtataaatgtatggtacaaaatatgttctgtttcataaattattttctaatgcctgtttacaagctatatgacctcattctgccactgtaatttttctaggtggattgaattttccaagaaaagcgttgccaagagggtggctaatctacttaacggtgaacaaataggtgggaagaagaggtctccattttattatgacatttggaacataaaatatctcaagaaattcaaatgggatgatcttgntggtgaaatagctgagaagactcatatcaaggagcataaacttaacttggagatagcagctgc

SEQ ID NO: 4475 - DNA, 2788 bp, Oryza sativa
  Clone ID: PAT_MRT4530_11356C.1
cccacgcgtccgcccacgcgtccgcccacgcgtccgcaactgtgctcagtgagatccatatatggtccagcaactaccgctgcccatctctctgggctccaccctccctttctctctctagtcctctagagccgagggttgctgcgaggaaagcgtaggagagagggttgctggctgcagccccggcgagaagcgccattgttgtcgtcgttgggccaagaaccaagaaaccaagaagacaagaggaggaggaggggggaagaagacggaagagagagaggaagaggcactggataggtgcatcctttgcctctagccgctttctctttctccttcctggaggggggagagagagagaggagtgggagaggaaaggagagtagatgggcgagatggtcttggccgggtatggcatggacaaggcggtgaggagcagcgtcagcttcgagacgccgtgcggcaggctgctgcgcgagctcgagcaaatatggactgagattggggagcgcgaagaagataaagatcgcatgttcttagaacttgaaacagagtgcatgcgtgtgtaccgtcgaaaggttgatagtgccaatgctgagagatcccagctccgtcagtcattgatggccaaagaagcagagcttaaagttttagtggcttcaataggtgaaattaccccaaaatttaaggtggatgaaaagcaatcattgaaagagcaacttgccaaagtgacgcctctactggaagatctcaggtcaaagaaagaagaaagaataaaacaattctcacttgtccaatctcaaatcgagaagataaaagcacaaatttcggatcacaataatcagcatgacaatggtccggtcaatcattccaaggacaatcatgatttgtcaaccagaaggctttctgatcttcaagcggagcttcgcaatttacagaaagagaagtctgatcgccttcagaaggtcttcatatacgtcgatgaagtgcactgcctatgctctgtgcttgggatggattttgcaaagacagttaaagatgtgcatccaagtttacatggggccaactcagaaaattcaacgaatatcagtgatagcactcttgaaggtcttactgagaccatccttaagctcaaagcagaaaagaggactagagtttcgaagttgcaagaaatcgtcggaaagctccacaagttatggaatttgatggagtcaactgaacaagagaggagacatttcaccagagtagctgctgttcttggatctactgaggaagagatcacttcatctagtgtcctgtcgctggagacaattcaggagacagaagaggaagttgagagactaactaaacaaaaggcaagtagaatgaaggagcttgttcttaagaaaaggttagagctagaagatatctgcagtaatgcgcatatggagcctgatatgagcacagcacctgagaagataaccgcattgattgattctggtctagtggatccttgtgaacttctttccagcattgaaacacaaatagcaaaagcgagggaggagtccctaaccaggaaagatatcatggagaaagtagacagatggctatcagcttgtgatgaagaaacttggcttgaggaatataaccaagatagtagcaggtatagtgctggtaggggtgcccatataaatctcaagcgtgcagagaaggcaaggatacttgttcaaaaaataccatcaatgattgacaacttgatagctaaaacatttgcgtgggaggatgaaagaagtgtgccatttttatatgatggagcccgtcttgttgccattttggaggagcaaaaactcagaagggtacaaaaggaagaagacaagagacgacaccgggaccagaagaaactgcaaagcttattgcttaaggagaaagagttgattttcggctccaaacctagtccaaaaaagacaagcagctttaataggaggacgagcagccatcacccgaatggaaatggagctgggttcatgaccccggtgccccgtagagtttctgcaggcagtgccactcctgagcttctaactccacgctcatattctggacggtacaataattacttcaaagagaacaggaggctggctgctgcaccactgaacttctcaacggtttcgaaggaggatagtatgtcatcctttgcctccatcagcggctcagaacctgattctcctttggttttgcactgagatcccatcgttcgattggacattttcgagaatgtcacagttgatcttttgaggttctgataatcctgatttccaaatgctgcatttctggttagggatgagagacttctcagcaagaaggatggtagtgaagactatccacgacattgggccattgtgtgttaactggttgacattgctaatgagtgacgacaggttgtgacaggatttagataagatttgcctgtagatatatgacctaacatctgcggtgctgttgtacctaaattacgtcgattgatcagtgggttggttaggaagcatgcctaagttgtgcattatattcgttttcttggtattctttgagttttgtatttagtcattgttttgcatgtgaaaaggagttggtgttgatttgcaatccaaaggtgctgtgtaatttcatcctgcagactcaacctgaggcctttgatttgtgtgctgtactgctatggaaatcgtagttcatacttcattcaggaaggtaactcaaaggtcgcatttgttttactaaaaaaaaaaaaaaaaaaaaacctgcagcccggggatccact

SEQ ID NO: 4476 - DNA, 220 bp, Oryza sativa
  unsure (1)..(220): unsure at all n locations
  Clone ID: PAT_MRT4530_11357C.1
aaccaaaatccataacatccaaccattttttttaccaatcattaacagaaaaaattgggaacaagcataaaaagattgtgacggatgggcccgaaaatactcaaacttggaaacagggccctggccttaatgggaaggttaccagcccccgaagtataacgcctaacattnaaagcgcgnaacttgaaccccttaannnaagaccataccagggaaaaag

SEQ ID NO: 4477 - DNA, 4773 bp, Oryza sativa
  Clone ID: PAT_MRT4530_11358C.1
atggcggcggtggaggaggaagggaggtgggagccgacggcggcggcggcggaggaggaggagatgggggtggaggcggaggaagcgatggaagacggggaggtcgagggagaagttggtcagcagcagcaggaggaggaggggaatggagacgcgggaaagagcgaggagcacggcagcgcgggggggcgtatggtgtggaagaagaagcatcaccaccaccaccagccgcggacgcccgtggcggcggagagccgcgccacctggagggggggcaagggcagcgggaaggggagaggaggaggaggaggaggaggggggtttcaccactgcccttggaatctgcaaccggacaatctgaacagatttaacaaaccaggggtatatggtggtgctattatcatctgcaatcacatgactaagagggggttcttcgagaagaaactttttgggcttccaggctacgctgcaactttcataaagaagatcagagttggtatgcttctctttgtgtttgagcttggggaaagaaaactttatggggtatttgaagctacctccaatggagcactggacatccttccaaatgcatttacttctttgaggaagccccgaccagcccagagaaacattgataacggttattttatttttaccctgtggatgaaattcaggttctcttcagaagaatttggttctgttttaaatctggtgcacctgtttgcttcaaagaggattgaactgcagccataccagaaaccaaaatctagagttatatatgattacaagatctctctcgctcatcttggccgagagttcagtcctcgcactcataacaagaccttttctagccattcgtcttccacgttttgcaataacagattctcattgccacgcagttcttacttgtacaccaaacagaatgctaagcatgatgcttgcaaatatgaatctcctttgcactctccacttaagtctgtgatcttcaaagcaccagatgtcaaaggagaaagcttagagccaaatcctgattatataccacttgagctagatgattctaagtctgacagtgatgcagatccatcagatagtttggaaactgtaagcttctatccaacactagagggctgcatcagctatgaggatcaagatctcaaacctttcaatggaaaattcaatggcgatgatgggcatcattcacatgtgctgattcgagggctcaattctgaatgtgaaacagatcgaaacagtgttttttctcgcaatgtgaaagagaggcaatcaagcttggccaagggcggcaaggggtgcaaacgcaaggcaattgtcgagtttgatgagcaatcatccccaaggagaggttgtaccatgaaaagggtttcattcagtttctctggtgaagaaatttcagttacttctgagaaatcattgcacaggcctactgcatttgctgaactacctaacacaagggaatcatctgcggaagaaggaaagcaagaagtcggttgcgtggttcaaaaggctcggagcaagggggaagatgtttcagcaaagatcaagctgatgggcctatccttgcctgaagcacttagaactaatcgtgtccatagctgctccagcaatagtcaatcactggtgactcaaacagatctcggatgcgaaagaaaaggaagtccaattttgtgtgtatcagttgaattctcttgtccttgcaagttgcaagcgtgtattggtgtttgtttgaagaaagtgaaagttggtgcaactttattcttgtatgacaccgatcagcataaacttcatggggtgtttgaagcaacttcagatggatcaatgaacattattcccgatgcatatgtctcatcaggaaagcggtatccttgtcagatacgtttcaagaggatttggttttgcaagcctttaatggaaagtgaacttcatgatgcaatacagaataactttacgtcaaaaaacaagcttagatatggtttgtcacatcaacagataatggatttaaataaaacctggcctctacatcccattctattgattcacttagcttctgaattacctaagaatgtttctcttatgcagtccagttcaaacagcagttcgcatggttcattcaaaagcccctgtcaaacatgttcctcctccactcatggggaacgcgcagcaaccttgagtcacaaattagctgatcctatgccattaatgcacagaggactgaaaccatacacctctggtgcagttaagtccaaggacagctcaaggtttcccttgcacattggcgcaaatacggacattgtcactgtacccgttagccaagaagcaatggatgacaggtctagtgatgactatataccactaccacaggaggaaaatactttagagggaatcgatgatctatctgatttacttgaagatgagagctactcttcagaatctcaaggtaccattgactcagaagagcacggtactttccaccaagcttgtgctataaaggaagatgaatgctatccaccagtggtaaatttcaagctccgttctgatagtgaaggacgatcaagtgtgttttctcgactattggggaaacctagaactcttggtccaagaaagaagtccagtgccaaagcattcccatcaatgtcttccggtcaccttcctcagaggaaaaaacagtggaggaaaaagcagagcaagccatttccatgtgatagagatggagtattgggtacacatcaagctaataagctgagaagaattccagctttggattattcatttgtctgggatgatggtagtcgatccaccaattcctttggtagaaaaccaagcgatattcagacaagtttagagctttgtgaacatgggaacaaatgggatatgtgtactaaagaacatagcagaagcaatgagttcaaaaggctgtttgttcctgaagcaattagaaaattgatcaggccctatgacaaagaactgagtatacccccagtgtttcctggagttcatgatggcaatgaagtcaattccaaagaagaagtaaatgattcttctttggatttgaagcggcgtggtaaggatgaccaggatttcggtgatgagaatgataatgttgaagaagcaacatggaagaagaggcggctagcagatgcatccttctcccaagaggagtatctgagtggtggtgtgttggttcctaaaggcaccgaagatatggatatgctagcgatatctgatggaaactgtaaagacaagagtatctgtttgtcacctagagacacatgtgctgagatggctagagcttgtcttcaaaccaaggtagtcctgcaagatgaacaacagaagaacattcaagactgctgtgaagaagttgcaggtgttacatcattgattcttgaacattctgaaagtatggacttattgcccaagcgcaactgtaggaacatgaagacttgtctgaatattgaaacgaagagccaggtggcttctggtaatttggaaaccagaagttcccttgaagatacacagaagcaaagtgttaggagctgccatggagtgatcaacggtgataaaatattgctcatggaaaattttgaaaccatggatgtcttacccaatcatgatgaagattgtcttgctaagagtacttttgttaggaatgacagtaatcacctggaaactgaaatgccaatgcaggagaaacaatccccaagtgttcagaactgctgtgaagctcttcatggtgataacatgttgattcaggaaaaatctgagaacatgctctataagatcgatgcagactcagactgtggaaaaaagaagagtgtgtcatttgacaaagcttatagcaatgtagcgggttcttctctggagacccatgtgcccatgcaagaacccctccgaatagcttcaagctgctgtgaaatagttaatgctgatcaagtgtgtgctggagaagttggtaagaacagtttctctcttgatgaaaatggtggctatgttacctgcccctgtaatactacgtgggctctagaaaatgcaatggccatggacacagtggagtctattcatggtgatattggaaacaacagtaacaattcagcggcctgtagaagtatgggctctgattatatggaggaagtgcaccaacttgtgacaaactgttctgagatatctgcagcaattcctgaaagctctggaactcttaacaacttcgctaaatgctgtggagatagtgcaaacaagaatagcttattggatcaaacttcagaaaatgtgagcactgatcatcaggaagtcagtatgctccctcaggaccaacattaccacagttgttcaggtgatacttcgtctgctttggaatattctgatacaaatgcaggtgatggagatagtgagcacaggaattcgtttgatcagaaaggcggtgaaagtatgtacccagtgacaggagtcctgctgcaagcagagcaacaccagaaacttcaaggtgaacctgaatcatcatcttcccatgaaatctccaattcaggttccttcgtcgtctgcgctgaagatagccgaagcaagagtgggctgtcggctgatagaatggttactgatcttgagaccaattcggagtctaggacgggtttcttcaacacttcttccagtgagtgtggcgagaacttcagcgcctccgcttcgagcagcgaaaacgcgcagcagaagctcagcggatcggctgtctctgcagaggtggccagactccaacatgatcctggagaatag

SEQ ID NO: 4478 - DNA, 2400 bp, Oryza sativa
  Clone ID: PAT_MRT4530_11359C.1
atggccgccgccgccattgttgtcttgctcgtctgctcgctgccgtctctgctcgtctgctcgctgccgtctctgctcgtcggcgccgctgctgcgggcggcggggagaagcagtcgtacgtcgtgtatcttggagagcacgcccatggcgagcggctgggcgccgccgccgccgctgacgtcgacgtcgaggcgctcgcgcggcaggcggaggattcgcactgcgagctcctcgccggcgtcctcggagacaaggagaaggcgcgggaggccatcttctactcgtacacgcgccacatcaacggcttcgcggccaacctcgacgccgccgccgccgccaagatcgccgagaagccgggcgtcgtgtcggtgttcccgaacagaggccacaagctgcacacgacgcgttcgtggcaattcctcggcctcgccggcgtcggcggcgcccccaccggcgccgcctggaagaaggccaggttcggcgaggacaccatcatcggcaacctcgacaccggtgtgtggccagaatcagagagcttcagggatgatggattggggcctattccatcgtggtggagaggagaatgccagaaaggccaagatgatgcattctcttgcaacaggaagctgatcggtgcgcgcttcttcaacaaggggtacgcgtcggcggtgggcaacctcaacacctccctcttcgacacgccgcgcgacaccgacggccacggcacgcacacgctctccacggcgggcggcgcgccggtggccggcgccagcgtcttcggctacggcaacggcacggcgagcggcggctcgccgatggcgcgcgtggctgcgtaccgcgtctgctacacccccgtcaacggcagcgagtgcttcgacgccgacatcctcgccgcgttcgacgccgccatccacgacggcgtccacgtcctctccgtctccctcggcggcgacgcgggcgactacttcgccgacggcctcgccatcggctccttccacgccgtccgccacggcatcgccgttgtctgctccgccggcaactcgggccccgcccccggcaccgtctccaacgtcgcgccgtggctcttcaccgccgccgcgagcaccatggaccgcgagttccctgcctacgtcgtcttcaacgacaccaagctcaagggccagagcctctccgcctccgccctctcgccggcgtcgagctccttccccatgatcgactcctccctagctgcctctcccaaccggactcaaaacgaatcgcagctttgtttcctgggatcgcttgatccggagaaggtgaaggggaagatcgtggtgtgcttgagaggagtgaacccgagggtggagaagggcgaggcggtgctggaagccggcggcgccgggatggtgctcgccaacgacgtcaccaccggcaacgagatcatcgctgacgcccatgtcctccccgccacccacatcaagttcagcgacggccagatcctcttctcctacctcaagaacaccaagagtccggcggggacgataacgaggccggagacgaggctggggacgaagccggcgcctttcatggcggcgttctcgtcgcaggggccgaacacggtgacgccggggatcctgaagccggacatcacggcgcccggggtgagcgtggtggcggcgtggacgcgagccagcgcgccgacggacctcgccttcgacaagcgccgcgtcgccttcaactccgagtccgggacgtccatgtcgtgcccgcacgtcgccggcgtcgtcggcctgctccgcacgctgcgccccgactggagccccgcggcgatccgctccgcgctcatgaccaccgccgtcgaggtggacaacgagcgggacgccatcctcaactcctccttcgccgccgccaacccgttcggcttcggcgccggccacgtctccccggcccgcgccatgaacccgggcctcgtctacgacctcgccgccgtcgactacctcaacttcctctgctccctcagctacaacgccaccgtcatggccatgttcgccggcggcggcggcgcggcgccgttccggtgcccggcctcgccgcccaaggtgcaggacctcaactacccgtccatcaccgtcgtcaacctcacctcgtcggccaccgtccggcgcacggtgaagaacgtcggcaagccgggggtctacaaggcgtacgtgacctcgccggccggcgtgcgcgtcacggtgagcccggacacgctgccgttcttgctcaagggggagaagaagacgttccaggtgaggttcgaggtgacgaacgcgtcgctcgccatggattactccttcggcgcgctcgtctggaccaacggcaagcagttcgtcaggtcgcctctcgtggtgaagacgacgacgccgacgatggcatga

SEQ ID NO: 4479 - DNA, 1611 bp, Oryza sativa
  Clone ID: PAT_MRT4530_1135C.1
atggccgccgccgccgccgccgccaccgccaccgcctcctccggcctcatccgctgcgccacgggaggcgcgccggcgcacggccaccaccaggtgttcaggtgctccgccgccaagccgtcccctctcgcgctgcgccaccgcgcgggccgccccgcgccgctgcaggccttccccgaatacgaccgcgtcacgcctttcgactatgacggtgaggtggacggcggcgacggcgacgaccacccgcgcgaggagtgcggcgtgttcggcgtcgtcggggacccggacgccacgtcgctctgctacctcggcctgcagaagctgcagcaccgcggggaggagggggctggcatcgccgccgcgggggacgacggcacgatcaagctggagagggggctggggctcgtcggggacgtgttcggcgacccggcccgcctcggcaagctccccggccaggccgccatcggccacgtgaggtactccaccgccggcgccgccgcctccctgcgcaacgtgcagccgttcctcgccgggtacaggttcgggcagctcgccgtggcgcacaacggcaacctggtgaactaccaggcgctgcggaacaagctggaggcgcagggctccatctttagcacgtcgtcggacacggaggtgatcctgcacctcatcgccacctcgctctcgcgccctctgctcgcgcgcatctgcgacgcctgcgagcgcctcgccggggcctactcgctgctgttcctgacggcggacaagctcctggccgtgcgcgacccgttcggcttcaggcccctggtgatgggccgccgcgccaacggcgccatcgtgttcgcgtcggagacctgcgcgctcgacctcatcgacgccacgtacgagcgcgaggtggagccaggggaggtcgtcgtcgtcgaccgccgcgacatgtcggtgtcctccgcctgcctcgtcccgcaccgcccccgcaagtcgtgcgtcttcgagcacatctacttcgcgctcccaaactccgtggtgttcggccacgccgtccacgagcgccgcaacgcctacggccgcgcgctcgccgaggagtcccccgcccccaccgccgacgtcgtcatccccgttccggactcggggttctacgccgcgctgggattctcgcagacgtcggggctcgagttccagcaaggcctcatccggtggcactacagcggccgcagcttcatccagccgtcgcaggcgatccgcgacctcgccgtcaagctcaagctcgcgcccgtgcacggcgtcatcaggggcaagagcgtgatcgtgcgcctgctccgcgacgccggcgcgcgcgaggtgcacatgcggatcgccagcccgccggtcatcggctcctgcctctacggcatcgacacgcccagcgagggcgagctgatatcaaacaggatggacctcgagggagtccgcagggcgatcggctgcgactccctcgcgttcctctcgctcgacaagctccacaccatctatggcgacgaggcgcatgagctctgcgacgcctgcttctcgcggaattacccggtgctccccaccgtgccggagccggtgccggagttggtgtccgccttcgaagactga

SEQ ID NO: 4480 - DNA, 241 bp, Oryza sativa
  Clone ID: PAT_MRT4530_11360C.1
atcgggtaaatgctagaatttattcctttttttctcacctttacaaacctgcaaactcatttctgcaaagaaaaaaaatgaaaatatgttgcagagtattcctaatttcctactactcccaccgtccaaaaaaatgaatctagtactagatgtgacgtattctagtacaatgaatctatacagagatattccagattcgttttactataatgggtcatatccaaatatgtttagtttcgtt

SEQ ID NO: 4481 - DNA, 456 bp, Oryza sativa
  Clone ID: PAT_MRT4530_11361C.1
atggaggtcactagagaggtggtgctcctcgagctgaaatgctacgacgacaaggatgaaccggtcgtgtcggctgctggaggagaactgcggcatgctcgaggtggcaatgagcacgaccaagggatgttctcctgcgaggcggaggcgatcagggagtggttgcgcagcgggcacgtcacttcatcgatggctaacctaaagtttccctaccacaagttcatcctcaaccatcccctctgcgacaccatccacgagtgtcgcctccaccgcgccatgcgaaacaaagtggcccactactacctcaccttccccgttggccacccctctacaagtcgccggccgctctctacgccgcaggtcgctctcccgtcatcccttccacagtggccgcctctctccctatcaagcgccgctcgctaccctactatcggcctctgctcgaaagcttggtga

SEQ ID NO: 4482 - DNA, 1641 bp, Oryza sativa
  Clone ID: PAT_MRT4530_11362C.1
atgtcatcgacacctgcagctaatttctccaatgaagacgatgagcgaaaggctcctaccggcttccaccccagcctctggggcgatttcttcatcagttaccagccacctactgcacctaagcatgcttacatgaaagaaagggctgaagtgctaaaagaagaagttagaaaggtagtaaagggctcaaatgaagtaccagagatattggatcttgtgatcacgctgcaacgacttggattggatagttactacaaggccgagatagatgagcttctctgcactgtttacaacaccgactacaacgataaagatttacacctagtttctcttcgattttaccttctacggaagaacggctatgatgtgtcatctgacatatttcaacattttaaagacaaagaggggagttttgttgctgatgacacaagaagtcttttaagcttatataatgcggcatatatgaggactcatggtgaaaaagtacttgatgaagcagttgttttcactactaaccgcctaagatcagaattgaaacatttgaaatctccggtagccgatgaagtgtctcttgctcttgatacaccactattccggagggttagaataatagaaacacaaaactatattcctatttatgaaagcgcgactacacgaaatgaagccatattagaatttgcaaagttgaatgtcaatctccttcaacttatttattgtgaggagttaaaaactatcacacgatggtggaaagagcttaacgttgaatccaacttaagcttcattcgggatagaatagtggaaatgcatttttggatgacaggagcatgctcggagccccattattctcttttacgaattatacttacaaagatgacagcatttatcaccattctagatgatatatttgatacatatgctacaaccgaggagagcatgatgcttgccaaagcgatatatatgtgcaatgaatctgcaacagttctacttccaaaatacatgaaggatttctacttatattatttaaagacatttgattcatttgaagaggcactaggtccaaacaaaagttatcgagtgctttatttcaaagagctgttcaagatattaattaaaggatactctgaagagataaaatggcgtgatgatcattacattccaaaaacaatagaggaacacctggaactttccagaatgactgttggtgcctttcaactagcatgtgcttctttagttgggatgggtgattttataacagaggatactctcgattatcttttgacttatccaaaacttattaagtcttacacaacatgtgtacggctctcaaatgatattgcttcaacaaagcgtgaacaagcaggggaccactatgcttccacaattcagtgttacatgctgcagcatggtacaacaatacatgaagcatgcattgggataaaggagttgatagaagattcgtggaaggatatgatgaaagaataccttgcaccaacaaaccttcagccaaaaatcgtggcaagaacagttattgattttgcacgaactggggattatatatacaagcaagcagattcattcaccttttcacatacaatcaaggatatgatagcatcactttacgttgagccatatagcatttaa

SEQ ID NO: 4483 - DNA, 2139 bp, Oryza sativa
  Clone ID: PAT_MRT4530_11363C.1
atgtcgtcgccgccgccgccgccgccgagcaagccgaagcgccggcggctactgtctcttccggcggtctacccgtgcgaggacatcgcgccggcgccgctgctcgcctcgctgctctccctcgcggcggatgtcgccagccgtcgggcggccgacgtcgacgccttccccgttctccgctgcggcgtgcgcaaggccgtgcggctcgccgggatcctcctcgcgttcctcgaggaggttcaggatgcggcggcggcggcggcgttgccgtcgtctgcggtgcttgggctgacggagctgcacgtggcgatgcagaagctgcggttcctgctcgcggactgcgcgcggcgtggcgcgcggctgtgggtgctcgtgaacgccgggatggtggcgtcggagctcaggttggtgctcgggtcggtcgcggcggccatggacgcgcttccgaggagcgtcgcggaggcgtcggtggaggccggggagctcgcgcgggtggtgtcggagcaggcgtggcgcgcggcggtgcggcccgacggcgccgacgagcgcgcggcgcggagcgtgcggtcgatcctggatcagttcaaggacggcgtcgcgccggacgccgacgacgtgaggcgggtgctccgccgggtcagggtcgggagctggtcggattgctccgaggagatcgcgttcctggagagcgagatttgcgcgcggctggacgccggcgacgagaacagcaatgacgttctcgtcatgaacagcttaatgacgttcctggtgtactgccgcgtcgtgctgttcgaccacattgacgcgagcaagtcgcaaccggcggcggcggcagcgccggcgccggcgaggtgcccggaatggatcagaccggaagcgctgcagtgcccgatcactcttgacctcatgaccgatccggtgaccgtgtccaccggccagacatacgaccgggcgtcgatcacccggtggatgaaggccggttgccgcacgtgcccggtcaccggcgagaggctgagcaccgccgacctcgtccccaacaccgtgctccgcgggatcatcgagcggatgcttctcatcaatggcgtcaccctcccggagctgagcgccgccggcggcggtggccaccgccacggcgccgtcgcgaacacggccgtgccgttcggcccggccgccgcgggcgccgcgcgcctcgccgtcgcgcacatcgtggcgcagctctcgagggggtcgacggaggagcggaggaaggcgacgtcggaggcacggaagctgtcgaagcacagcgtgttctaccgggcttgcctcgtcgacgccaacgccgtgccgtggttgctgtgcctcctctcctccaccgacgccgccgtgcaggacaatgccgtggcgtcgctgctcaacctctcgaagcaccccgccggcaggacggccatcgtggaggtcggcggcgtcggcctcgtcgtcgacgtgatcaacgtcggcgccaaggccgaggcgcagcacaacgcggcggccgtcctcttctacctctcgtcgaacagcccggactccgccgaggagatcggccgcatcccggaggcgatcccgacgctggtccagctcatccgggacggcgcgtaccgcgggcggaagaacgccatggtcagcctgtacgggctgctccagagcgccgccaaccacggcagggccatcgccgcgggcgccgtgtcagcgctcgccgcgctgctgctctccgccgaccgcgacgacctcgccggggacagcgtcgcgctgctggcgaggatcgccgagcagccgtctggcgccgcggccgtcctctcgcagccggggctcgtcgcccgcctcgccgaggcgctcgccgcgtcgtcggcgtcgtcgtcccggtcggcgagagaccacagcgtgtcgctcctcgcctcgctgtgccggcacggcggcgccaaggtggtccccgtgctggggcggatgccggggctgatggcgtcgctctactcgctcgtcgccgacggcggcagcccgcagacgagcaagaaggcgcgggcgctgctcaacgagatccaccggcattacgaggtggcgccgccgccgccggcgtcgtcggcgtcgtcggacgccggcggtgaccgtgtcgttcgcgtgctatag

SEQ ID NO: 4484 - DNA, 1818 bp, Oryza sativa
  Clone ID: PAT_MRT4530_11364C.1
atgtcgtcgccacctgcagctttctccaatgaaggcgatgagcagccacagcgaagggctcctacaagcttccacccctctggggcaatttcttcctcagttaccagccacctactgcgcctaaggcaattactttcttattatatactctctccgtattttaatgtaactgattatttattatatgtatacatgcatgcttacatgaaagaacgggttcaagttgtgaaagaagaagttaggaaggtagtaaagggctcgagtgaagtaccagagatattggatcttgtgatcacgctgcaacggcttggattggatagttactacgagactgagataaacgaccttctctgcattgtttacaacaccgactacaacgataaagatttacacctagtttctcttcgattttatcttctacgaaagaacggctatgatgtgtcatctgatatgtttcaacattttaaagacaaagaggggagttttgttgctgatgatgtaagaagtcttttgagcttatataatgcggcatttctgaggactcatggtgaaaaagtacttgatgaagcaattgtttttacaactaaccgccttagatccgaattggaacatttgaaatctccggcagctgatgaagtgtctcttgctcttaatacacccctgttccggagggttagaatattagaaatacgaaactatattcctatttatgaaagtgctactacacgaaacgaatccatattagaatttgcaaagttgaatttcaatctccttcaacttatttattgtgaggagctaaaatctatcacaggatggtggaaagagcttaatgttgaatcaaacttaagcttcattcgggatagaatagtggaaatgcatttttggatgataggagcatgctcggagccccattattctctttcacgaattatacttacaaagatgatagcatttatcaccatactagatgatatatttgacacatatgctacaaccgaggagagcatgatgcttgccaaagcgatatatatgtgcaatgaaactgcaacagtgctacttccaaaatacatgaaggatttctacttatattatttaaagacatttgattcatttgaagaagcactatgtccaaacaaaagttatcgagtgtgttatctcaaagagttgaatatatctaactcaacgaacaatactgattgttttatcctaagaggaaattatggtaaccactttatttatgacattctaatgactcaatcatattttttgttcaagaggttagttcaagaattctctcaagagataaaatggcgtgatgatcattacattccaaaaacaatagaggaacacctggaactttcaagaaagactgttggtgcctttgaactagcatgtgcttcttttgttgggatgggcgaccttgtagcaaaggaaactcttgattgccttttgacttatccagaacttcttaagtctttcacaacatgtgtacggctctcaaatgatattgcttcaacaaagcgtgaacaagcaggggaccaccaccatgcttctacaattcagagttatatgctccaacatggtgcaacagcgcatgaagcatgcgttgggataaaggagttgatagaagactcatggaaggatatgatgaaagaataccttacaccaacagacctgcaaccaaaaatcgtggcaagaacggttattgattttgcgcgaacgggtgattatatgtacaagcaagttgattcattcactatttcacatacaatcaaggatatgatagcatcgctctatatggagccgtataacatttaa

SEQ ID NO: 4485 - DNA, 519 bp, Oryza sativa
  Clone ID: PAT_MRT4530_11365C.1
agaggaagctggaggcaggtagcgagcaaagaactgatgcttaagcaatctctccgccggccgaggagggacgcgacggcgacgcgccgctccattgcagcgcgcaccggaagaagcccgggtgcgtggtgggtgagcacgcgtactccctcctcctgctcgcgcctccgccaccgccgcgtgacgacgacacgacggtggccgtggcgttgcttggtggtgactgggtttgttcattcgtgtggtgttttgttggtgcgttggatgcagtcgcccccgaacccgtgaacgcaccggggaacctcctcctcaggctccatcctggcggcttgttgaggtagctcgtctcgtccctcaagcgagccagcagcagcagcacaaccattgccggcgtgacgcccgaacgcagcgccaagacacaaatattccgccactacgacgaagtcgaccacgacaacgcggcgtgcagcgtctgcttcgtggcactggcgccaatgcgccatggctgctgcctcctca

SEQ ID NO: 4486 - DNA, 129 bp, Oryza sativa
  Clone ID: PAT_MRT4530_11366C.1
caagtgttcgatgaaatgccgcacaacggaagcccggtgatactgctgcaacagggcagacagacagaggattctgctgcacagcagggagaagatgaacatgaagagattgggaggcacctagcttaa

SEQ ID NO: 4487 - DNA, 414 bp, Oryza sativa
  Clone ID: PAT_MRT4530_11367C.1
gggggggggggtttttttttttttttttttttttgggtgtttttttttttttagcttaagttgcgttccttcatgggtcccccacgcctgacaagcgctgaaggctccgaatccaaccaagggggaaccaaaacaaacaaaaaaaaaaaggggtttgcttgggggccacccccccccaatgctcgcccccttcgcctgggaaaacaagtattacatccccctggcaaaccaattcatccccccccccggccgatcgcggcccccgcacggacggggccaacgcggacccggggggcgacccggccctggcggacccgggcctgcacggggaccccccctcccttttgtgcgtcgtgttcgacgtgggcctatcctggggcttggccgtcgccctgccgcactggctcccccctc

SEQ ID NO: 4488 - DNA, 1302 bp, Oryza sativa
  Clone ID: PAT_MRT4530_11368C.1
atgggaccccctctgggcagtattgacaatatcgagttggcgggatttaagagcagaaacttcgacagatggtggggtgagtggaagttgcacttgtttcaacaatcagcttcgatgtacatgacagacctattccctgacatcatacccaagacaatcgactcttcccctccacgtcaaagcaacagtggtgtccaatatgccccaggtttgatcccaaatggaggtggaccatctccccccgtcatcggctaccatgcccccaagacttcaactcttcttcaaggcttaatcagagaaccaaccgatgtaagcaagaaaagaaaaactagatcatcggctatgggcactttggctctagttccaaagagaaaggtcaagtctaagaaaaccaagccgaccgatgacctgcttgccttggatccatccattgaacgagctctggatgaagaagacattgaagacgatgttgatcaggctgtagctgaaaagaagaaaactgctgtaaagaagaaatcaacaacaacaattgtcaagccagttccgccacctcctccccctccttctcctcctgtactgcaatcgtcgagtgaccggactccatcggctgtagggagtcatcatattggggaagaagaacaaccagctgctcctactatcccagttctagccgatcagatttcttttgacatcagagattatcttgatgaagcagaagaggatacttcaagcaaagcgctagcccccttatctgacgatgtgaagaaaacacttgaagatatctcttgtcggctagaggcctcttctttagatagcttagtggtcgactatggatcaattaggacacggctacatgaagttcaagctctgattctcgaagaactggccgctgtcctaactccagccgcttatctcgagcaaaaccagttcaagctggaaaaagccaatcaaagactagccgaacgccgtgagtgcaaggagattgaagccacaatccagctatctgagggtccgattaagtccaatattaatcggctcaaagctcgcaagatcgatctcttggcacagcttgaagaatgcaatgctgaactagatatggagcacaaaaggctagccgatctcccaaaatctgtcgaagagcagaaagcaaggcttaaatcggctatcaagaatgttgctgacctaaccaagtccctgaaggtcatttctggaaccgatgctcaagatgcccaagctattgaagaagtcaaacaaattaggcaaagggctattttggctatccaacggtacttgtctcaataa

SEQ ID NO: 4489 - DNA, 2644 bp, Oryza sativa
  Clone ID: PAT_MRT4530_11369C.1
aagatcaaggaaattgcaaatcctttttttgagacaaaggcaaaagctttgccttattacattgatacccaaggaagagtacacatccgagtaccaacccaacagataacaccttacgaacactccaaactcaaaccaggctacaaagcacctgaaacactggacaccaaatcagtaattgcaaatctaatatgtggttgggggccaaagtgaatgaatttttactaacactccaatcgagcagaattttaattattgtaaccataagtccaatcaagcaggaatttttcccaagggtcctctggtctcattatctgatggcaggtgatgtgtaatttggaccggataccgaaacaaaaatgtacaggagtttccaagaagaaagcaatctatcatattcacaaatttgagtgaattgagtcagtgtctagcatgtctaacactgtttcattataaatttataatatttacgagcttgaacaacctatattcatgtgccccccttgtccatctctgaaggtattgctgaagttttgcatattggacaccagttcttctgtctaagccattcatgaatgcaggacacatggtattgatgctcacactgcatcctaccaacttcttcgccctcaatgtattcctcctgacatatgctgcacttggcgtcatctagtacagctctgttcgcttcaagatctgaatttggtaacttatacacatttcgcttgagacacttcacaagctgctcatcagatagggcagtgctgacagaaccgattcgctcctctagtgctaatagttcctcataagacatgttgtcaatatccattctcatatctctgtgctggtcatgcaggccaaggccgctaagaaacaagttagtttctagcaccagcaattgctcataagtcaattcatcatcttgttcaatcctgtccaatgctagcaacacctcagcgatgccttccatgtttatacgcctgtagttctctctctccaccagcaaaccatgaaacatttgtggagggctttcgtcagggcggtaacttgatctgctccttgctgtctgattacttgagccttgacgactagatgagtatatctcatgtggtaattccatagaaaaaggcctcatcgatctccgtggggcagcttcacccaaggagaaatgagcccattctggttggcgatcccttgcaagagtttcacgaagagcaaacacgctatcctccctttcatttggcacccttactctggcatgctgagtagaaggtcgcctaatccttgaagaatctgcagactcctgaatacttctgctactagtccgtgtttgctgagaagctgattgttcagcagttctgactctaggaccagtgataccagaatacatggcaggtgaatggcctaaactagagtgtccatttaagccccttggtctagaagaactctctccgtcaaatgccctgtttctcataacctcagccctcttattatgaatagaattagctgaagaacagccagaaggcaaaacatcagatattgatgtgcagccaaggttttttagagtacgtctctgtaccccagggccagcagcatttgatgatttcacaccattggtagaatttcgaggtatagtggaccgattaacaaaagcagaagcagtttgaggtctaatctgacacaattcttctttacccttctgctgacgtgatttagatctcaaagcagcatttctgactacagaaccaattgcatgtgcagacacccctgaagaaacagaagaatctaatagttcaggatcaagttctgcaggctgatcttcagtagttgatgtggacaacaaatcttctggctcatcctgctgaccatatggatgcacatcctcctcaacaacagctttcttgctacactgcagacggttggcctcagttcttctgctactactttctgcattatctgcctctcctaaaaatgtccgtccttgtttttcctcgaaatattttctgacgggagcttttgaagagcttggacatgcagccttagtgcctgatgaacgaaatggctcacgtaaatatcttggcttctccttactgtcagcccacctggcattcattgggttgagttttgtcttgtttggcctctcctcattgccttgatcttttaaggagacactagagcctcttctaagaaaaccagttgttgatattgatctaccagaatcttccaccttacgaagcccggtctccgcacatggcgcgctgatcccccgcacgtgtccacccccacgaaggcagatccggccgttggcgccgcgtcgagattcgtgcgcggcgtgggactcgtccacgtcggcgccacgtgttaaacgccccccgccgccgtggaaggttcggcgcagctgccgctttctcacgccgcgggtttccatttctttttcttcctttcgccatgattgcttctcaaggacaacaatggaacaaccagctttagcatttggacccccagcttccttcactgccatgaaaagttttgtggaacagttgcaaccatttgacaaggtctgtctgagaacatgaggcccttctattgcccggctttctctcatcgtgttgccttgtatccccttctctctcccaaacgccat

SEQ ID NO: 4490 - DNA, 584 bp, Oryza sativa
  Clone ID: PAT_MRT4530_1136C.1
gggctgcaggcctgcacgcgaagatattttgacctatccctcgcttcatccatctgcaggctgcagcgcggccggccgtgcgcggtggtggatcgatggcggggacctccaacaacagcagcagcagcaagaggccgaggcgtacggcgccgccgcggcgggacaacccggcggagaggctcaccgacgacctcctcgtcgagatcctctcgcgcgtgccctacatgtcgcttgcccgctgcagccgcgtctgcaggcggtggcgccgcgtcatctcccaccccgaccaccgccgcctccttccgaggtatcacctacgcagcgccatcgccggcctcttctgcgtggagccctactggcggcctctcgccgaccctcgtcgtttctataccgtcccggcgccggagcccccgcctctcatcgacccttccttctccttcctgcccaagtgcgaacgcatcctcctcctggatagctgcaatggcctcatcctctgcttctgcagcaagctgaacaatccagatgtattcaactatgtggtgtgcaatcccgccaccaagaaatcgttcgtcctgccggacttt

SEQ ID NO: 4491 - DNA, 507 bp, Oryza sativa
  unsure (1)..(507): unsure at all n locations
  Clone ID: PAT_MRT4530_11370C.1
ttaaaaacaatcatatantanattacatataacctgaatagacatatgtacataaacaaaaacccaactagaacttggtatcaatatctttattaaagggtcactctacggaaatgaaagaacacatttttccatgaagggggggccattccacatatctggaagaatatttaactaccantncctctatantatccaaaaatctaacaaaataatcaacttgccatccatttaacctaaactgcacanttttataaacttactatnanttnatccaaacangttttgtttttttaaaaaaggttttattactatctcagaatccatcgaagcactacatgtgagtgcaatatatcctgacactttgttggataccggaaatataaggcatagctcaccttcactctggcaagctgaaattcacgccttcgcccttcgtatcctgcaagcaccactttcttgaggtaacggttgaagcattcaattggataatccatgttatcacac

SEQ ID NO: 4492 - DNA, 246 bp, Oryza sativa
  Clone ID: PAT_MRT4530_11371C.1
ttttagtttggcaagaggattagacaagtgttcggacgagtgactggatggagcgtgagcaaaaccgaggatattttcgttgtcaccgtccggaaatatctccgcacggtaacaacaggtagtaactcgatcaacctcgtcgtcgtcgtcgacggtaaatcagccgtgcgaatgcctcccgtgcgcgcgatgcgagcgatcgtgcttgctgctgcgtgcacggaatgcttggcacgcacacgcaac

SEQ ID NO: 4493 - DNA, 154 bp, Oryza sativa
  Clone ID: PAT_MRT4530_11372C.1
aataaagtcatgccattcatcgtgtgtgacaattgaacatcggggtgatacaatctgaattaaaaatgtcatgccaatttaaacataatttgcccctcctgtaaggataaattcctagtacattgtttgaaattattatcaaaaaaaaaaaaaa

SEQ ID NO: 4494 - DNA, 6665 bp, Oryza sativa
  Clone ID: PAT_MRT4530_11373C.1
atggcggctgtgggagtttcctttgtttctttgttgaatgccgtcgcatggcattgtcgcctgccatccgtctcatacctctgggagctagatgggaacgatgctctgccatccgatgagagtcccagcaaaaccgtaagcaagttcttttggatcgctacatctgatcagcctattgtttcccatgaaatggttgcacatcaggctgttagatttctgcaggccaagtatgggttcgcagtccacgactacaacctgcagactttgctttcataccgtcaaatagctgcctctgcagtcgatgcagctcttacggcctcgacgcaccttgctaggtttcgggcgcgctatggattcttgcaggctcctgtgttcagcaatgttagccctacagcccctaggctcaccactgtcctcccaggtctatcaggttctataccgagtgtgccgaaacctgctctcagcttgcctactatctcggatgtgggtgttgagtctcagaccgggtcgattggcagcacgtcgtgtcctgtgcatgactcacaacccgctcctagcagaaaaagaacactcttagatgtgccacggcatgccgctacagcaaatagagaacgacgccgtttgaagagagcaggaggtgactcgggtcatttgctgcagaaaattctggatggtccagtgcctactcttgatgatgtcctgcccttgcctaaggactatattgcatcattgaaagcgttgtgccctgagcgatcctactatggtggaccgtcgcatgaatgcccttattgtggtgctgccttttggtaccaagaaagggtcaaaagagatagcgctgttacacaaagaaggatagtgtacaacttatgttgcagggctggtaagatcagcctgcctgagctaaggtttccacctgctatgttagcgaaccttttgcgatttgatggcgatagacggtcaaggcgtttcctacgccaaattcgatcatacaactctctttttgcgtttacttccttaggagctgatgtagacaagtcgattaataatggaactgcaccatgtgttttcaaaatcaatggtattgttcaccaccggattggcagcctgctaccacagcagggtgccccgccaaagtttgctcaactctacatatacgatactgaaaatgaggtcagcaataggatgcgtgtattcgataaagagagctccactgatgaacctgacccatttattgttacagagttaggtgctatgcttgatgaacacaacgaccttgtcaaatccttccgctttgctaggaaacgtttaaaagatcatggcgatgaaaaaattgcgcttaggctccttgggtgcaactcaaaagatgaagtgcagtataacctaccaacaagtggtgaaatagcggggataattgttggcgattattcaaacgataaatacacatacgatgttgttgtccagtcctgtgatagtaggctaagacgagtatcagctttgcatccatcctatatggcgctgcaataccctttgcttttcccctatggggaacgagggttccacttaggtataaaatatactgatttcccgagcataactggaacatcacgacgctatgtgacaatgcttgagtactatcggtaccgcctacactatagactaaataaaccaaacccatatacgtgttgcggtcgtcttagtgattctatatgtgtagatatgtactcgactgttgagggctcgagactgaagttcattgctgacaatcaacctgatttgcgatcagaatgtgtgcagggaattgcggatgcaattgaccatggtcttgaatctggtgattctgtgggccagaaatatgtattgccttccagttttactggaggccgtcgttacatggtccaaaattaccaagatgcaatggctgtttgtcgtgtatttggttcccctgacctttttgttactttcacgtgcaattcaaaatggcaagagatatacgatgccctcctatttgaaccaggccaggtaccgagcgatcgttccgacatgattgtgcgagtatttaacatgaaagttaatgaattcatcactgatattagggagggaaaaacttttggcccagtccttgcagtgttatacacagtggagttccaaaaacgtggcctaccgcacattcactgccttgtgtggcttgcagcaaacaccactgatttcaatgctgctactgtcgatggtttcagttctgctgagattcccgacgtatttactgaccctttaggttatgctttggttgatgagtttatgatacatggtccttgcgaatggtttgaagctaataaaaaacattctaaggcacgacacctcacatactgtgatttcccgaaagaatggacctgggacaacagcgcacgctgctggcgtccattaacaccggttgaaaaaatcggtagaatgtactatatcagcccagttgctggagaactatactacctacggatgttgctgatgatagtaaagggtgtgatgtgctttgccgatataaggacctacgagggtgttgtttacccaacttttagacaagcatgcgaggcaagagggcttcttgagaacgataacgagtggcacttgctctttgatgaggctattgtgtctgcgtcctcctaccaactaaggcagctgtttgtaaccgtggtaatgttttgttctattggaaatgtgcgatctcttttcgataaatattggacatactttacagatgatatacaacaccgcgttagaaaaatgttgtcaaacccttcttatgttatcccccatgacaggcttctatctcttttgattaaagaattaaaatctgtttttgcaaatagcggcggtaatatagacgattacgacctgccacagtcaacagcacgcacagatgacgattctgggaataggatggtcagtgaagagttagctcttgatagtgttgctcttgctgcccatgctgattccatcataccgaaactaaactcggaccaaaaaagggtatttgacacaataatgtgccgtgttaatgaatcgaaacctggttttttcttcgtttatggtcatggtggaactggtaaaacatttttatgtaatgcactgatttctaaagtaaggtccgagaaaaaaattgtcctcgcagttgcttcatctggggttgcttctctcctcttgccaagaggacgcactgcccattctaggtttaaaatcccgattgatataaacgaaaatagtttatgcactatcaaaagagggaccatgcttgctgaacttattcaaaaaacatcactaatcatatgggatgaagctccaatgactcataggcggtgctttgaggctctagatcgaactttacgagacttgctttccgaacacgctccttccaacggtttggtgccctttggtggaaaggttgttgtcctaggtggcgattttaggcagatattaccagttgtaaggaaaggctcccgtgcttctataatcgatgcatctataacgaattctccgctttggagtcatgctgttcttctaaaacttactgtcaatatgaggctcctacagtgtaatcttggtgaacaacagcagcaggagctagaaaagtttgctcagaacgatgaatctgaagcaacctggattgacatccctgatgatttgttgataaaaacaactggtgataaaatacattctatagtaaacgaagtattcccaggttttgcatctaagtatacagacccttcttacctagcatcgtgtgctattgtatgcccgaataactcaactgttgacgacataaatgaccgaatggttgatatggtacctggtgaggtgaaggaataccttagttgcgacactatttcaaaatcgtctgagcacataccagattttgatcttctgtacccaaccgaattcttaaattcaattagcgccaacaatttcccagcacataaacttgcgctaaaaaagggtgtcacagtgatgttgctacgaaacctaaatcaatcaatgggtttatgcaatggaaccaggttgttagccctttctcttgggcaacgactcttagaatgtcagatcttgactggaacaaacattggagatagggtgttcataccaagaatagcgcttacaactacgagccctaaatggcctttcactcttcagaggaggcaattccctgtgcgtgtatgctatgcaatgacaatcaacaaaagccagggccaaacccttaaaagggttggcgtataccttaaaaaagctgtcttcacgcatggacagttgtatgttgcggtgtctagatcgacttcaagagacggccttaggattcttactgagggtgatgatgaggcatgtagttccaagactagaaatgtggtgtaccatgaggtgctgcaaacagtggatctgatgatgggacacaccctgctctctgatctctcccttggtgacgacaatgagcgcatttgtgttcgggtttcgcgattttgggctttctgtgaccaaaaggatgatgacaagattcttcactttggcttggtcctgattgatgagaaggggactagcattgctgctcagatttatcccccatgtgatgagatattcaggccaatcatcactgaaggcaaggtgtactacattaagtacttccgtgtgaggaagtgtaacaggcagtacaaaccagtcgacaactgcatgtccatctatttcacaaggtggactaaactagaggagcgtgtcgatccaccagctgagattcctttgtatacttattcactctcaccatttggcggtcttcgctcacgtgttggcaagaaagactcattcacagttccaatggttccatgcttaatagaatatatgttctctaggcgatgtctctttatcagcatccaagcaacctatagtcctatagagtggactgatctacctcctgcagcacctgcttatagcaatgctgagcccaagacgattatccaaattaaggatctgaatcctttcgaattcaagaaacatgaattcttggttactgttgtcatcaagaaaatagacatggagtactcttggtggtacactgcatgtgatatatgcaggagaacagcaaggccatatggaaacacatacaagtgccagaatgagtcatgccctcctcttgtgggagcatcacctaggttcaagcttagcgttgtggcaggtgatgacacagctgacgctaagttcgtgctctttggccgcctagcacagcgtcttattggtcgatcagtggagattctgttagagggcaacgctgccggcaaggaggccactcccaaggagaccacaaatttgccttgaggaaaaatttcacctggaaagttgctattaccgagaatacacgtcttcagcaatgtctcattccaagtgaatatgattgtcggaaacggcaacagccagaatcctgccacccacaatctccatctgcatctcaggcatcctccatggtaccttctctagctctatcaccaagtgtaacacatgaactctctgttggccagtccacagcagcatttgctccatccattggattcagtgatccgcctgccactccatcggctggattaaacagtccgttggttgttggagccaaggacaaaaatgatgatgttgaatgccagtccaagactccagttcaggtccttgacgaagaagatgaggatgatgacaatttgcccctttcccaaatgggtggtcattctgctactaagaaaaccacatccaagtcccacaacaaaagggcaaggccatctcctggcactggcacagctaagaagttgttcaaagaaagtggtgacgataccgctgatggcagatcaaggttcaacgctctttcctgggaaaaggagcagctgaggatggagtttggctatggtggtgagctcagcgtagcacaacctcggcggccttcttcctacggaacacagcgaccattggttgagacaaagttctcagggtgtggagagatatcgcagctgcttgctgatgtcatctatcagcagggtgttgttgtgaaagtccttggagctggtgatccaaacagcacaaggatatctgctatgacaactcgcctcgagtttgagcctttcaagatgaatcttcatagtgttacaaacccactgcgtcaaagggttatacttgcccttgaaggagtgccgccggaatcatggaataagcaggccataacagagctaatggacaacagttgcatggttgaagagttgtatggagagcaccatatacatgacctttctgttttcaagctagctgcctggaccaccgactgtgaccttatacccaaggcgattagatggaacattgagaccaaacagggagcacgagcatcagccaatgttagctggaaccacaacgcagctcactctctgattctggtacacatggaaaaactattcgactacaccgacgaagacagtggcagtgatagcgatggtgaacttcttagacaatatgagcagcaaaggccttgcctacctgttgtcaagacatttacctgggtatcctgtcaaattgacctagacaatggaccaattgaaggtggtccaccggcaatcctcccacgtcgtcttcctctcgaatttcgcaggcatggccgtcagtag

SEQ ID NO: 4495 - DNA, 4689 bp, Oryza sativa
  Clone ID: PAT_MRT4530_11374C.1
tcaacaggcagcgccgaaagttgatagtgataactcgagctgccgcttttcatgtgtgctgttgtggactgtgcgcgctactggatatggcactaccgtgaagcgccgaaagtgtgttgttgtgagcataagttgttcaagcaccatatgaatgaaaagaaccctgtccctcctaccctgcgccctaatgtgcccctgggagtacgtgagtcggtccgggggtatggcacggccaacccgtcctgcctgtacaggtgtgacctctggctgctcctgagtgtgcgcctttggagctcctccaagctgagaggagcctagtacgtcctggtggtctgcaccgtgcaagtcgtcgtcgtagaactggctagtaggaccagtcctaccggcgtgagacgaagaggccccagtaccgaagatcccggctgcatatcctgcgtgtgggcgagggatcgacgctccgtgagaggaagagctggcgaacgcgcccgaagaggtggcgaacgcccctgcggagctcgcggaagcgccggtcgtgcctgcgaacgcgctcgaaggcagacgaggtccgtgcgaaaccggtgctgtaggtcgcactgctccgaagctaggggcgctcgaaggcaaatgaggtcctgctccgacggtaggcgcgcgaggccgtgggtgtaccggaccagctggaggtacgacgtccacggcgctgcgacaggagaagacgcgcatgaccgcacgcatcttctcctgcatccgggcgaaggtcaccctctgcttaacgtcagtcaagtgcaaacctctgttcaacctcacctggactgcggtgatatcggcactgatatcccgtgcggcatcagccgccacgaagtagtctcggtcacggtgcgtgggatacgcgtctgtgacagcggcaacgtgcggctctggtgcgtctggagtgaaggtcacatgcgcacgagtgcgaggaaggtaccagcgaaggtagtcacggtagttctcctccgtgtgtgggaagagctcgttgatcacctcctctgtagctaacacccagtcgtcaacgtactgctgtacacgtggagcccaaagtgcgcctgctagctgtccccgtcgagtcaacgagtggtcggcagggaggacggtcggctgcacgttgcccggaaacacctgcctaagtccgaactgtctcatcacacgctgcgggcagtgaggctcaacgaaaatgtcgaacaccatcggcaggatggtgagccagtaagcctggtcgcgtgtgcacaaggacgaaagtcctagcggtgctctcgcagcgacggcctcttctgtgtacggctcccagatgacgtcgctcggctggagacggtcaaactcgaacacgaagtccgggtaaccacgtctcacctggacgtgagcgtaacgacgcccgtagggtgcgctgtccaccactggtcgccctatggcaaacctctcggctgcccaaagctgaagcaacatagggcagccagcgatgatcgctcccgcgtcagtcttcgtgcacgcctcacagagggcacggtacgtggctgctagcacggcagaaccccagctccactgcggcacgtcctgtggctgagcatccgcgatggaccgtgcgtagtggaccagccggaagtccacagcgtgcccgtgggttctagtgaacatcacccacccgaacaaccacaacaggtacgcctcaagggagcgtcggaccgagtaatcatcagcgtcaggttgcagacggtccgcagtgaactggagcaaccaagccttgctaggcccgactgtagagtacggaggaagggtgttggccggtcctaggtgtggaaggcgcatcacctgctcgaagcgcgcagtgatatcctccttccacccaaaaacaccgtccacgggaccaactggtgctcccgccagcggtagcccgagcaggtacgacacgtcctgcagtgtcggagccatctccccacagggaaggtggaacgtgtgcgtctcaggtctccagcggtctacaagagcggcaaggagtgaccggtctgcatcccaccgcttcgctgggtcacggtcgtccgccgccgcctcaacaagcctacaaagtggtagaaggcctgccgcacgcaaccaaggaacgtgatgggggtcgacacgcaaccactcgcgcgacgtgcgtggacggaaggtgccgagctgtgcaccctcgactgctgacaggaacgagcggtggttcctgtcaatcccacggttcaacagcgccggtgtgtcgtacgccataccatcacttgcctgtccagatggactagcatctgcgctgcttggaacttctgcattcttcgggcatttcttgtaagtatggccgcgcagatcacacttgctgcagcgtaaagtcctcccacctgcttcggcagcagcaagaacgtgtgagcaaggaaggtgatgaagcttcggcttcatacaactgcaggtacatccaccatccgccttcaagacacattcctgcacggcttgcttgcgatagataccacgcctgctcctatcaacaaacattatttcataccgatgcacttgtgtgccttgagcaacaactctatgtctccgtgcctttttgattttatcttccatgtactttgtcactacgttgccaaacactatgttgttatcggccatggacggaccaattttcttgtatcgatccctaaagtaggcttgcgtgccgtgaaggatgaattcaacaatagcaaccaatggaagtacccgaacacctcgcattacccagttgtacacctctgccaaattggttgtcattatgccataccgagatccatcggtgtcgaacaatagagaccacttctccttaggctcattctcaatccactgagtgaaatttctgatggacgaccctgacctccttctcattgttggtgggtcatcatgtaatgcaccaagaggtatgggaggctcgtcaccttcaacttgtggtctgcgagattgctcatctgtttgcttcgtagtcaactcatccaacttgtcccacaactcattaaatttcttctcttggttctgtgcacagagcctcttaaagagctccataagatgcttgttcttgaattgcttgtagaaatttgcacccatgtgacgcatgcaccaccgactccgaacatcaggccacttagctggaagtcccttctcatcccaaccgttctgcaagtagtcaatagcccgcaacatacccgcatgacgatcatgtataaggcaaacgttgggcctcatacgcaccactgcaatgtgcactctctctaggaaccagtaccagctttcagtgttctcactctctacaaatgcaaaagccataggtagaacctggttgttcccatcacacccaattgctgtcaatatctgacctcggtattcacttgtcataaaagttccatctatgcatagaacaggtcgacaatgcacaaaagcattgatgcaagcacccaatgagaaaaaggctctttgcagcacactctttgttcgatcatcaaccgatgtaaatgtatgtaggtcatagtaagtattattattcctctgggcaatggtggctaacaaacgaggcaaattatcataagaagcttcaaatgtgccatacctcatctcaatgatcttttgtttggctctccaggcctttgcatagcttatggtgtacttgaatttgttctcgatgtgcctaataattgattttggttcaaagccaatgttaccaacaacactgctgtacatctcacttgccacaaaagctgaagtgatgtttcggtgatacttctccaccccttgtaagtagcacttgtgctcggtcacaatgctaactttccaataatcattccatttacccttatatgcatggacacgccacggacaatcttccttcatgcacctcacttcatacacataatttgttgacttgaccaccctaaactctctctgcaaggaaactgcccaatgcttcaccgcctccttcatctcatccttatgagcataccttgcaccctcaattatctcgttctccttatactcccagggtacatgatcaccctctgatataacaagtccagagaagtcctcatttgcccaatcagtggccattacatcaccttcctcatcggatgatgcgtcgtcctccgcttgctcattatccgaatctttcctctccatttcatcaacaattataccgactctctccccctcatccgccatgcccatggcctgctcctcccttggttgattttcctcattttccatcgatggtccaacaacatccccttcattgctaggaccctccacatcttcggtttgcattgaaacatttgtatctttctcttgtaccgacacaaatataacgaggggccatgaccgttcaaaagccattttcacataccgtctccaagcagcagtgctgtccatcggcattagttcccaaaaataaccttctattgcacgactcactacaacagatactgacattgtgtagacttcttggtctattctaaatcctctcaacaaccaactataaattgactgaaatgttctctccgcaggcctatcgatgcccttagatgtcattacaaaatctgacagatcaacaccatctggaccaaatctaatatttccttcaccgtgaactatctgaaatgtgaccttacttgacat

SEQ ID NO: 4496 - DNA, 4989 bp, Oryza sativa
  Clone ID: PAT_MRT4530_11375C.1
atgtcaaataaggtcacatttcagatagttcacggtgaaggaaatattagatttggtccagatggtgttgatctgtcagattttgtaatgacatctaagggcatcgataggcctgcggagagaacatttcagtcaatttatagttggttgttgagaggatttagaatagaccaagaagtctacacaatgtcagtatctgttgtagtgagtcgtgcaatagaaggttatttttgggaactaatgccgatggacagcactgttgcttggagacggtatgtggaaatggcttttgaacggtcatggcccctcgttatatttgtgtcggtacaagagaaatatacaaatgtttcaatgcaaaccgaagatgtggagggtcctagcaatgcaggggatgttgttggaccatcgatgcaaaatgaggaaaatcaaccaagggaggagcaggccatgggcatggcggatgagggggagagagtcggtataattgttgatgaaatggagagggaagattcggataatgagcaagcggaggacgacgcatcatccaatgaggaaggtgatgtaatggccactgattgggcaaatgaggacttctctggacttgttatatcagagggtgatcatgtaccctgggagtataaggagaacgaggtaattaagggtgctaggtatgctcataaggatgagatgaaggaggcggtgaagcattgggcagtttccttgcagagagagtttagggtggtcaagtcaacaaattatgtgtatgaagtgaggtgcatgaaggaagattgtccgtggcgtgtccatgcataaaagggtaaatggaatgattattggaaagttagcattgtgaccgagcaccaatgctacttacaaggggtggagaagtatcaccgaaacatcacttcagcttttgtggcaagtgagatgtacagcagtgttgttggtaacattggctttgaaccaaaatcaattattaggcacatcgagaacaaattcaagtacaccataagctatgcaaaggcctggagagccaaacaaaagattattgagatgaggtatggcacatttgaagcttcttatgataatttgcctcgtctattagccaccattgcccagaggaataataatacttactatgacctacatacatttacatcggttgatgatcgaataaagagtgtgctgcaaagagcctttttctcattgggtgcttgcatcaatgcttttgtgcattgtcgacctgttctatgcatagatggaacttttttgacaggtaaataccgaggtcagatattgacagcaattgggtgtgatgggaacaaccaggttctacctatggcttttgcatttgtagagagtgggaacactgaaagctggtactggttcctagagagagtgcacattgcagtggtgcgtatgaggcccaacgtttgccttatacatgattgtcatgcgggtatgttgcgggctattgactacttgcagaacggttgggatgagaagggacttccagctaagtggcctaatgttcggagtcggtggtgcatgcgtcacatgggtgcaaatttctacaagcaattcaagaacaagcatcttatggagctctttaagaggctctgtgcacagaaccaagagaagaaatttaatgagttgtgggacaagttggatgagttgacaacgaagcaaacagacgagcaatctcgcagaccacaagttgaaggtgacgagcctcccatacctcttggtgcattacatgatgacccaccaacaatgagaaggaggtcagggtcgtccatcagaaatttcactcagtggattgagaatgagcctaaggagaagtggtctctattgttcgacaccgattgatctcggtatggcataatgacaaccaatttggcagatgtgtacaactgggtaatgcgaggagttcgggtacttccattggttgctattgttgaattcatccttcacggcacgcaagcctactttagggatcgatacaagaaaattggtccgtccatggccgatacaacatagtgtttggcaacgtagtgacaaagtacatggaagataaaatcaaaaaggcacggagacatagagttgttgctcaaggcacacaagtgcatcggtatgaaataatttgtgttgataggagcaggcgtggtatctatcgcaagcaagccatgcaggaatgtgtcttgaaggcggatggtggatgtacctgcagttgtatgaagccaaagcttcatcaacttccttgctcacacgttcttgctactgccggtgattgtggcatatctcccaatgtgtacgtctcaaattatttcaggaaagaagcaatctttcatacatggagtgaggagatatatgggttcgggatctcaggatcttacacaacgctgagtggcaaagttttttatattccagatccatctaagttaagggtgaaaaagggttgacgccaaactagacgcatcagaaatgatatggatgagtcagaagcaggtgggaggactttacgctgcagcaagtgtgatctgcgtggccatacttacaagaaatgcccgaagaatgcagaagttccaagcggcgcggatgctagtccatctggacaggcaagtgatggtatggcgtacgacacaccggcgctgttcaaccgtgggattgacaggagccactgctcgttcctgtcatcagtcgagggtgcacagctcggcaccttccgtccacgcacgtcgcgcgagtggttgcgtgtcgacccccgtcacattccttggttgcgtgcggcaggccttctaccaactttgtaggcttgttgaggcggcggcggacgaccgtgacccagcgaagcggtgggatgcagaccggtcactccttgccactctggtagaccgctggagacctgagacgcacacgttccaccttccctgtgggaagatggctccgacactgcaggacgtgtcgtacctgctcgggctaccactggcaggagccccagttggtcccgtggacggtgtttttgggtggaaggaggatatcaccgcgcgcttcgagcacgtgatgcgccttccacacctaggaccggccgacacccttccccctaactctaccgtcgggcctagcaaggcttggttgcttcagttcactacggaccttctgcaccctgacgctgatgattactcggtccgacgctcccttgaggcgtacctgttgtggttgttcgggtgggtgatgttcactagcacccacgggcacgctgtggactgccggctggtccactacgcacggtccatcgcggatgctcagccacaggacgtgccgcagtggagctagggttctgccgtgctagtagccatgtaccgtgccctctgtgaggcgtgcacgaagaccgacgcgggagcgatcttcgctggttgccctatgttgcttcagctttgggcagccgagaggtttgccataggtcgaccagtggtggacagcgcaccctacggggttggtcgcagcgcgcagtggccagaggacggtcccacgatggggacttactggtgtcgacgtgggcgtcgttacgctcacgtccaggtgagacgaggttacccggactttgtgtttgagtttgaccgtctccagccgagcgacgtcatctgggagccgtacacagaagaggccgtcgctgcgagagcaccgctaggactttcgtccttgtgcacatgcgaccaggcttactggctccccatcctgccgatggtgttcgacattttcgtcgagcctcactgcccgcagtgtgtgatgagacagttcggactgaggcaggtgtttccgggcaacgtgcagccgaccgtcctccctgccgaccactcgttgactcgacagggacagctagcaggcgcactttgggctccacgtgtacaacagtacgttgacgactgggtgttagctacagaggaggtgatcaacgagctcttcccacacacagaggagaactaccgtgactaccttcgccggtaccttcctcgcactcgtgcgtgtgtgaccttcactccagacgccccagagccgcacgttgccgctgtcacggacgcgtatcccatgcaccatgaccgagactacttcgtgggggccgatgccgcacgagatatcagtgccgatatcaccgcagtccaagtgaggttgaacagaggtttgcacttgactgacgttgagcagaggatgaccttcgaccggatgcaggagaagatgcgtgcggtcatgcgcgtcttctcctgtcgcagcgccgtggacattgtacctccagctggtccagtacaaccacggcctcgcgcacctaccgtcggagcaggacctcgtttgccttcgagcgcccctagcgtcggagcagtgcgacctacagcaccggtttcgcacggacctcgtctgccttcgagcgcgttcgcaggcacgactggcgcttccgcgagctctgcaggggcattcgccagcacttccggcgcgttcgccacctcttcgggcgcgttcgccagctcttcctctcacggagcgtcgatccctcgcccacatgcaggatttgcagccgggatcttgggtactggtgcctcttcgtctcacgccggtaggtctggtcctactagccatttctatgacgacgacttgcacggtgcgcaccaccacgacgtactaggctcctctcagcttggaggagctccagaggtgcacactcaggagcagccagaggtcacacctgtacaggcaggacgggttggccgtgccataccaccggaccgactcacgtactcccaggggcacgttagggcgcagggtaggagggacagggttcttttcattcatatggtgctagaacaacttatgctcacgacaacacactttcggcgcttcacggtagtgtcagatccagtagcgcgcacagtccagcacggcacacatgaaaagcggcagctcgagtagtcactatcaactttcggcgctgcctgc

SEQ ID NO: 4497 - DNA, 4311 bp, Oryza sativa
  Clone ID: PAT_MRT4530_11376C.1
tcaacaggcagcgtcgaaagttgatagtgataactcgagctgccgcttttcatgtgtgctgttgtggactgtgcgcgctactggatatggcactaccgtgaagcgccgaaagtgtgttgttgtgagcataagttgttcaagcaccatatgaatgaaaagaaccctgtccctcctaccctgcgccctaatgtgcccctgggagtacgtgagtcggtccgggggtacggcacggccaacccgtcctgcctgtacaggtgtgacctctggctgctcctgagtgtgcgcctctggagctcctccgagctgagaggagcctagtacgtcctggtggtctgcaccgtgcaagtcgtcgtcgtagaactggctagtaggaccagtcctaccggcgtgagacgaagaggccccagtaccgaagatcccggctgcatatcctgcgtgtgggcgagggaacgacgctccgtgagaggaagagctggcgaacgcgcccgaagaggtggcgaacggccctgcggagctagcggaagcgccggtcgtgcctgcgaacgcgctcgaaggcagacgaggtccagctggaggtacgacgtccacggcgctgcgacaggagaagacgcgcatgaccgcacgcatcttgtcctgcatccggtcgaaggtcgccctctgctcaacgtcagtcaagtgcaaacctctgttcaacctcacctggacagcggtgatatcggcactgatatcccgtgcggcatcagccgccacgaagtagtctcggtcacggtgcgtgggatacgcgtccgtgacagcggcaacgtgcggctctggggcgtctggagtgaaggtcacacgcgcacgagtgcgaggaaggtaccagcgaaggtagtcacggtagttctcctccgtgtgtgggaagagctcgttgatcacctcctctgtagctaacacccagtcgtcaacgtactgctgtacacgtggagcccaaagtgcgcctgctagctgtccccgtcgagtcaacgagtggtcggaaggggggacggtcgtctgcacgttgcccggaaacacctgcctaagtccgaactgtctcatcacacgctgcgggcagtgaggctcaacgaaaatgtcgaacaccatcggcaggatggtcagccagtaatcctggtcgcgtgtgcacaaggacgaaagtcctagcggtgctctcgcagcgacggcctcttctgtgtacggctcccagatgacgtcgctcggctggagacggtcaaactcgaacacgaagtccgggtaaccacgtctcaccccacgtcgacaccagtaagtccccatcgtgggaccgtcctctggccactgcgcgctgcgaccaaccccgtagggtgcgctgtccaccactggtcgccctatggcaaacctctcggctgcccaaagctgaagcaacatagggcagccagcgatgatcgctcccgcgtcagtcttcgtgcacgcctcacagagggcacggtacgtggctgctagcacggcagaaccccagctccactgcggcacgtcctgtggctgagcatccgcgatggaccgtgcgtagtggaccagccggaagtccacagcgtgcccgtgggtgctagtgaacatcacccacccgaacaaccacaacaggtacgcctcaagggagcgtcggaccgagtaatcatcagcttcagggtgcagaaggtccgcagtgaactggagcaaccaagccttgctaggcccgactgtagagtacggaggaagggtgctggtcggtcctaggtgtggaaggcgcatcacctgctcgaagcgcgcagtgatatcctccttccacccaaaaacaccgtccacgggaccaactggtgctcccgccagcggtagcccgagcaggtacgacacgtcctgcagtgtcggagccatctccccacagggaaggtggaacgtgtgcgtcttaggtctccagcggtctacaagagcggcaaggagtgaccggtctgcatcccaccgcttcgcagggtcacggtcgtccgccgccgcctcaacaagcctacaaagtggtagaaggcctgccgcacgcaaccaaggaacgtgacgggggtcgacacgcaaccactcgcgcgacgtgcgtggacggaaggtgccgagctgtgcaccctcgactgctgacaggaacgagcggtggttcctgtcaatcgcacggttcaacagcgccggtgtgtcgtacgccataccatcacttgcctgtccagatggactggcatctgcgccgcttggaacttctgcatttttcgggcattgcttgtaagtatggccgcgcagatcacacttgctgcagcgtaaagtcctcccacctgcttctgactcatccatatcatttctgatgcgtctagtttggcgtcgaccctttttcacccttaacttagatggatcaggaatataaaaaacttgggcactcagcgttgtgtaagatcctgagatcccgaacccatatatttcctcactccatgtatgaaagattgcttctttccgatgcacttgtgtgccttgagcaacaactctatgtctccgtgcctttttgattttatcttccatgtactttgtcactacgttgccaaacactatgttgttatcggccatggacggaccaattttcttgtatcgatccctaaagtaggcttgcgtgccgtgaaggatgaattcaacaatagcaaccaatggaagtacccgaactcctcgcattacccagttgtacacctctgccaaattggttgtcattatgccataccgagatccatcggtgtcgaacaatagagaccacttctccttaggctcattctcaatccactgactgaaatttctgatggacgaccctgacctccttctcattgttggtgggtcatcatgtaatgcaccaagaggtatgggaggctcgtcaccttcaacttgtggtctgcgagattgctcgtctgtttgcttcgttgtcaactcatccaacttgtcccacaactcattaaatttcttctcttggttctgtgcacagagcctcttaaagagctccataagatgcttgttcttgaattgcttgtagaaatttgcacccatgtgacgcatgcaccaccgactccgaacatcaggccacttagctggaagtcccttctcatcccaaccgttctgcaagtagtcaatagcccgcaacatacccgcatgacgatcatgtataaggcaaacgttgggcctcatacgcaccactgcaatgtgcactctctctaggaaccagtaccagctttcagtgttctcactctctacaaatgcaaaagccataggtagaacctggttgttcccatcacacccaattgctgtcaatatctgacctcggtatttaccaacaacactgctgtacatctcacttgccacaaaagctgaagtgatgtttcggtgatacttctccaccccttgtaagtagcacttgtgctcggtcacaatgctaactttccaataatcattccatttacccttatatgcatggacacgccacggacaatcttccttcatgcacctcacttcatacacataatttgttgacttgaccaccctaaactctctctgtaatgaaactgcccaatgcttcaccgcctccttcatctcatccttatgagcataccttgcaccctcaattacctcgttctccttatactcccagggtacatgatcaccctctgatatgacaagtccagagaagttctcatttgcccaatcagtggccattacatcaccttcctcatcggatgatgcgtcgtcctccgcttgctcattatccgaatcttccctctccatttcatcaacaattataccgactctctccccctcatccgccatgcccatggcctgctcctcccttggttgattttcctcattttccatcgatggtccaacaacatcccctgcattgctaggaccctccacatcttcggttcgcattgaaacatttgtatctttctcttgtaccgacacaaatataacgaggggccatgaccgttcaaaagccatttgcacataccgtctccaagcagcagtgctgtccatcggcattagttcccaaaaataaccttctattgcacgactcactacaacagatactgacattgtgtagacttcttggtctattctaaatcctctcaacaaccaactataaattgactgaaatgttctctccgcaggcctatcgatgcccttagatgtcattacaaaatctgacagatcaacaccatctggaccaaatctaatatttccttcaccgtgaactatctgaaatgtgaccttacttgacat

SEQ ID NO: 4498 - DNA, 5601 bp, Oryza sativa
  Clone ID: PAT_MRT4530_11377C.1
ctacctgtatagagggaccgcagtagctgatgaccctgccactttctctttgcaccagtttgctgtgaagatgtctctaagtttctgatctcccctaaatcctgttgctagaattacaatgtcactctttatgtgttcatttccatcttccaggatgattccatcattaaagaagctgaacctcttggatttcttgagaataatgctgccttcatcaaccttatcataaaacccctctggtagcattgcaatcaagcaagacgacatggcaaaggagaagctgtagtcaggaaccatcccatgcttttgtaaaggaatgctttgcttgaagtaagtttcaattacttttgagattgcccatctcttggcgacctctgcagcgatgtcaaatgcagattttccagagcctattatagtcaccttcttccctttgacaaattcagctgcattatccatgtaagagtaatctattgagtgcaagattttcccctcaatgttaccaattttcaagtccttcacggtgaggcgccacaccccatctttctgagcaccaaatgcctcaccattgccagaccagtgctcccactgcattatctctccctcggttgcaccaaggtattcaactccaagcacctggctattgaacctgatgcacttgaggagatcaaactcgctggcatatgacctcaggtactccatgaccttcctatggcttgggtacttctctgtcacagttgctggccatgccaggtctgagaacctgaatgccgtggttggtgcctggagccttgttgactccaaggtgtgtgcccagacgccaccgatggtgtcgtctgcttcgaacacgattgggttgaatcctttgtccagtgagtgcttgcatgctgctaggccgctcacaccggcgccgatgatgccaaccctcttcctgtccattttcttgctcctgcgccctaatgtgcccctgggagtacgtgagtcggtccgggggtacgacacggccaacccgtcctgcctgtacaggtgtgacctctggctgctcctgagtgtgcgcttctggagctcctccaagcggcgtgagacgaagaggccccagtaccgaagatcccggcgtgtgggcgagggatcgacgctccgtgagaggaagagctggcgaacgcgcccgaagaggtggcgaacacccctgcggagctcgtggaagcgccggtcgtgcctgcgaacgcgctcgaaggcagacgaggtccggtgccgtaggtcgcactgatccgaagctaggggcgctcgaaggcaaacgaggtccgtgtgaaataggtgccgtaggtcgaggtcctgctccgacggtaggcgcgcgaggccgtggttgtaccggaccagctggaggtacgacgtccacggcgctctgttcaacctcacttggactgcggtgatatcggcactgatatcccgtgcggcatcagcaaattggatgtaccgccacgaagccgccacgaagtagtctcggtcacggtgcgtgggatacgcgtccgtgacagcggcaacgtgcggctctggggcgtctggagtgaaggtcacacgcgcacgagtgcgaggaaggtaccaacgaaggtagtcacggtagttctcctccgtgtgtgggaagagctcgttgatcacctcctctgtagctaacacccagtcgtcaacgtactgctgtacacgtggagcccaaagtgcgcctgctagctgtccccgtcgagtcaacgagtggtcggcagggaggacggtcggctgcacgttgcccggaaacacctgcctaagtccgaactgtctcatcacacgctgcgggcagtgaggctcaacaaaaatgtcgaacaccatcggcaggatggtgagccagtaagcctggtcgcgtgtgcacaaggacgaaagtcctagcggtgctctcgcagcgacggcctcttctgtgtacggctcccagatgacgtcgctcggctggagacggtcaaactcgaacacgaagtccgggtaaccacgtctcacctggacgtgagcgtaatgacgcccacgtcgacaccagtaagtccccatcgtgggaccgtcctctggccactgcgcgctgcgaccaaccccatagggtgcgctgtccaccactggtcgacctatggcaaacctctcggctgcccaaagctgaagcaacatagggcagccagcgatgatcgctcccgcgtcagtcttcgtgcacgcctcacagagggcacggtacgtggctgctagcacggcagaaccccagctccactgcggcacgtcctgtggctgagcatccgcgatggaccgtgcgtagtggaccagccggaagtccacagcgtgcccgtgggtgctagtgaacatcacccacccgaacaaccacaacaggtacgcctcaagggagcgtcggaccgagtaatcatcagcgtcagggtgcagaaggtccgcagtgaactggagcaaccaagccttgctaggcccgactgtagagtacggaggaagggtggtggtcggtcctaggtgtggaaggcgcatcacctgctcgaagcgcgcagtgatatcctccttccacccaaaaaaaccgtccacgggaccaactgctgctcccgccagcggtagcccgagcaggtacgacacgtcctgcagtgtcggagccatctccccacagggaaggtggaacgtgtgcgtctcaggtctccagcggtctacaagagcggcaaggagtgaccggtctgcatcccaccgcttcgctgggtcacggtcgtccgccgccgcctcaacaagcctacaaagtggtagaaggcctgccgcacgcaaccaaggaacgtgacgtgggtcgacacgcaaccactcgcgcgacgtgcgtggacggaaggtgccgagctgtgcaccctcgactgctgacaggaacgagcggtggttcctgtcaatcccacggttcaacagcgccggtgtgtcgtacgccataccatcacttgcctgtccagatggactagcatctgcgccgcttggaacttctgcattcttcgggcatttcttgtaagtatggccgcgcagatcacacttgctgcagcgtaaagtcctcccacctgcttctgactcatccatatcatttctgatgcgtctagtttggcgtcgaccctttttcacccttaacttagatggatctggaatgtaaaaaacttgggcactcagcgttgtgtaagatcctgagatcccgaacccatatatctcctcactccatgtatgaaagattgcttctttcctgaaataatttgagacgtacacattgggagatatgccacaatcaccggcagcagcaagaacgtgtgagcaaggaaggtgatgaagcttcggcttcatacaactgcaggtacatctaccatccgccttcaagacacattcctgcacggcttgcttgcgatagataccacgcctgctcctatcaacacacattatttcataccgatgcacttgtgtgccttgagcaacaactcgatgtctccgtgcctttttgattttatcttccatgtactttgtcactacgttgccaaacactatgttgttatcggccatggacggaccaattttcttgtatcgatccctaaagtacgcttgcgtgccgtgaaggatgaattcaacaatagcaaccaatggaagtacccgaactcctcgcattacccagttgtacacctctgccaaattggttgtcattatgccataccgagatccatcggtgtcgaaccatagagaccacttctccttaggctcattctcaatccactgagtgaaatttctgatggacgaccctgacctccttctcattgttggtgggtcatcatgtaatgcaccaagaggtatgggaggctcgtcaccttcaactagtggtctgcgagattgctcatctgtttgcttcgttgtcaactcatccaacttgtcccacaactcattaaatttcttctcttggttctgtgcacagagcctcttaaagagctccataagatgcttgttcttgaattgcttgtagaaatttgcacccatgtgacgcatgcaccaccgactccgaacatcaggccacttagctggaagtcccttctcatcccaaccgttctgcaagtagtcaatagcccgcaacatacccgcatgacgatcatgtataaggcaaacgttgggcctcatacgcaccactgcaatgtgcactctctctaggaaccagtaccagctttcagtgttctcactctctacaaatgcaaaagccataggtagaacctggttgttcccatcacacccaattgctgtcaatatctgacctcggtatttacctgtcataaaagttccatctatgcatagaacaggtcgacaatgcacaaaagcattgatgcaagcacccaatgagaaaaaggctctttgcagcacactctttgttcgatcatcaaccgatgtaaatgtatgtaggtcatagtacgtattattattcctctgggcaatggtggctaacaaacgaggcaaattatcataagaagcttcaaatgtgccatacctcatctcaatgatcttttgtttggctctccaggcctttgcatagcttatggtgtacttgaatttgttctcgatgtgcctaataattgattttggttcaaagccaatgttaccaacaacactgctgtacatctcacttgccacaaaagctgaagtgatgtttcggtgatacttctccaccccttgtaagtagcacttgtgctcggtcacaatgctaactttccaataatcattccatttacccttatatgcatggacacgccacggacaatcttccttcatgcacctcacttcatacacataatttgttgacttgaccaccctaaactctctctgcaaggaaactgcccaatgcttcaccgcctccttcatctcatccttatgagcatatcttgcaccctcaattacctcgttctccttatactcccagggtacatgatcaccctctgatataacaagtccagagaagtcctcatttgcccaatcagtggccattacatcaccttcctcatcggatgatgcgtcgtcgtccacttcctcattatccgaatcttccctctccatttcatcaacaattataccgactctctccccctcatccgccatgcccatagcctgctcctcccttggttgattttcctcattttgcatcgatggtccaacaacatcccctgcattgataggaccctctacatcttcggtttgcattgaaacatttatatctttctcttgtaccgacacaaatataacgaggggccatgaccgttcaaaagccatttccacataccgtctccaagcatcagtgctgtccatcggcattagttcccaaaaataaccttctgttgcacgactcactacaactgacactgacattgtgtagacttcttggtctattctaaatcctctcaacaaccaactataaattgactgaaatgttctctccgcaggcctatcgatgcccttagatgtcattacaaaatctgacagatcaacaccatctggaccaaatctaatatttccttcaccgtgaactatctgaaatgtgaccttacttgacat

SEQ ID NO: 4499 - DNA, 4872 bp, Oryza sativa
  Clone ID: PAT_MRT4530_11378C.1
tcaacaggcagcgccgaaagttgatagtgataactcgagctgccgcttttcatgtgtgctgttgtggactgtgcgcgctactggatatggcactaccgtgaagcgccgaaagtgtgttgttgtgagcataagttgttcaagcaccatatgaatgaaaagaaccctgtccctcctaccctgcgccctaatgtgcccctgggagtacgtgagtcggtccgggggtacggcacggccaacccgtcctgcctgtacaggtgtgacctctggctgctcctgagtgtgcgcctctggagctcctccaagctgagaggagcctagtacgtcctggtggtctgcaccgtgcaagtcgtcgtcgtagaactggctagtaggaccagtcctaccggcgtgagacgaagaggccccagtaccgaagatcccggctacatatcctgcgtgtgggcgagggatcgacgctccgtgagaggaagagctggcgaacgcgcccgaagaggtggcgaacgcccctgcggagctcgcggaagcgccggtcgtgcctgcgaacgcgctcgaaggcagacgaggtccagctggaggtacgacgtccatggcgctgcgacaggagaagacgcgcatgaccgcacgcatcttctcctgcatccgggcgaaggtcaccctctgctcaacgtcagtcaagtgcaaacctctgttcaacctcacctggactgcggtgatatcggcactgatatcccgtgtggcatcagccgccacgaagtagtctcggtcacggtgcgtgggatacgcgtccgtgacagcggcaacgtgcggctctggggcgtctggagtgaaggtcacacgcgcacgagtgcgaggaaggtaccagcgaaggtagtcacggtagttcttctccgtgtatgggaagagctcgttgatcacctcctctgtagctaacacccagtcgtcaacgtactgctgtacacgtggagcccaaagtgcgcctgctagctgtccccgtcgagtcaacgagtggtcggcaggggggacggtcggctgcacgttgcccggaaacacctgcctaagtccgaactgtctcatcacacgctgcgggcagtgaggctcaacgaaaatgtcgaacaccatcggcaggatggtgagccagtaagcctggtcgcgtgtgcacaaggacgaaagtcctagcggtgctctcgcagcaacggcctcttctgtgtacggctcccagatgacgtcgctcggctggagacggtcaaactcgaacacgaagtccgggtaaccacgtctcacctggacgtgagcgtaacgacgcccacgtcgacaccagtaagtccccatcgtgggaccgtcctctggccactgcgcgctgcgaccaaccccgtagggtgcgctgtccaccactggtcgccctatggcaaacctctcggctgcccaaagctgaagcaacatagggcagccagcgatgatcgctcccgcgtcagtcttcgtgcacgcctcacagagggcacggtacgtggctgctagcacggcagaaccccagctccactgtggcacgtcctgtggctgagcatccgcgatggaccgtgcgtagtggaccagccggaagtccacagcgtgcccgtgggtgctagtgaacatcacccacccgaacaaccacaacaggtacgcctcaagggagcgtcggaccgagtaatcgtcagcgtcagggtgcagacggtccgcagtgaactggagcaaccaagccttgctaggcccgactgtagagtacggaggaagggtgttggccggtcctaggtgtggaaggcgcatcacctgctcgaagcgcgcagtgatatcctccttccacccaaaaacaccgtccacgggaccaactggtgctcccgccagcggtagcccgagcaggtacgacacgtcctgcagtgtcggagccatctccccacagggaaggtggaacgtgtgcgtctcaggtctccagcggtctacaagagcggcaaggagtgaccggtctgcatcccaccgcttcgctgggtcacggtcgtccgccgccgcctcaacaagcctacaaagtggtagaaggactgccgcacgcaaccaaggaacgtgacgggggtcgacacgcaaccactcgcgcgacgtgcgtggacggaaggtgccgagctgtgcaccctcgactgctgacaggaacgagcggtggttcctgtcaatcccacggttcaacagcgccggtgtgtcgtacgccataccatcacttgcctgtccagatggactagcatcagcgccgcttggaacttctgcattcttcgggcatttcttgtaagtatggccgcgcagatcacacttgctgcagcgtaaagtcctcccacctgcttctgactcatccatatcatttctgatgcgtctagtttggcgtcgaccctttttcacccttaacttagatggatctggaatataaaaaacttgggcactcagcgttgtgtaagatcctgagatcccgaacccatatatctcctcactccatgtatgaaagattgcttctttcctgaaataatttgagacgtacacattgggagatatgccacaatcaccggcagcagcaagaacgtgtgagcaaggaaggtgatgaagcttcggcttcatacaactgcaggtacatccaccatccgccttcaagacacattcctgcacggcttgcttgcgatagataccacgcctgctcctatcaacacacattatttcataccgatgcacttgtgtgccttgagcaacaactctatgtctccgtgcctttttgattttatcttccatgtactttgtcactacgttgccaaacactatgttgttatcggccatggacggaccaattttcttgtatcgatccctaaagtaggcttgcgtgccgtgaaggatgaattcaacaatagcaaccaatggaagtacccgaactcctcgcattacccagttgtacacctctgccaaattggttgtcattatgccataccgagatccatcggtgtcgaacaatagagaccacttctccttaggctcattctcaatccactgagtgaaatttctgatggacgaccctgacctccttctcattgttggtgggtcatcatgtaatgcaccaagaggtatgggaggctcgtcaccttcaacttgtggtctgcgagattgctcatctgtttgcttcgttgtcaactcatccaacttgtcccacaactcattaaatttcttctcttggttctgtgcacagagcctcttaaagagctccataagatgcttgttcttgaattgcttgtagaaatttgcacccatgtgacgcatgcaccaccgactccgaacatcaggccacttagctggaagtcccttctcatcccaaccgttctgcaagtagtcaatagcccgcaacatacccgcatgacgatcatgtataaggcaaacgttgggcctcatacgcaccactgcaatgtgcactctctctaggaaccagtaccagctttcagtgttctcactctctacaaatgcaaaagccataggtagaacctgattgttcccatcacacccaattgctgtcaatatctgacctcggtatttacctgtcataaaagttccatctatgcatagaacaggtcgacaatgcacaaaagcattgatgcaagcacccaatgagaaaaaggctctttgcagcacactctttgttcgatcatcaaccgatgtaaatgtatgtaggtcatagtaagtattattattcctctgggcaatggtggctaacaaacgaggcaaattatcataagaagcttcaaatgtgccatacctcatctcaatgatcttttgtttggctctccaggcctttgcatagcttatggtgtacttgaatttgttctcgatgtgcgtaataattgattttggttcaaagccaatgttaccaacaacactgctgtacatctcacttgccacaaaagctgaagtgatgtttcggtgatacttctcccacccctggtaagtagcacttgtgctcggtcccaatgctaaactttccaataatcattccattaacccttatatgcatggacacgccacggacaatcttccttcatgccactcactttatacacataaattggttgactggaccacccctaactctctctgcaaggaaactggcccaagctttcacgccctcctcatttcatccctaagaacataactttgcaccccccattaccttggttccccttaaactccccggggcaattaatcccccctttgaattaaaaagtcccaaagaatccctcttttgcccaataaggggccaattaaataaccttcctcatcggatgatgcgtcgtcctccgcttgctcattatccgaatcttccctctccatttcatcaacaattataccgactctctccccctcatccgccatgcccatggcctgctcctcccttggttgattttcctcattttccatcgatggtccaacaacatcccctgtattgctaggaccctccacatcttcggttcgcattgaaacatttgtatctttctcttgtaccgacacaaatataacgaggggccatgaccgttcaaaagccatttccacataccgtctccaagcagcagtgctgtccatcggcattagttcccaaaaataaccttctattgcacgactcactacaacagatactgacattgtgtagacttcttggtctattctaaatcctctcaacaaccaactataaattgactgaaatgttctctccgcaggcctatcgatgcccttagatgtcattacaaaatctgacagatcaacaccatctggaccaaatctaatatttccttcaccgtgaactatctgaaatgtgaccttacttgacat

SEQ ID NO: 4500 - DNA, 4482 bp, Oryza sativa
  Clone ID: PAT_MRT4530_11379C.1
tcagaatgcattgcattctcgtggtccttcaatcgttgatactctacttgtgtttctgactctgttatcttctggccatgatatgatggagtgacattgtcgatccatcgagtaaatccacccatccttggattgccccctgtccctcctaccctgcgccctaatgtgcccctgggagtacgtgagtcggtccgggggtacggcacggccaacccgtcctgcctgtacaggtgtgacctctggctgctcctgagtgtgcgcctctggagctcctccaagctgagaggagcctagtacgtcgtggtgatgtgcaccgtgcaagtcgtcgtcgtagaactggctagtaggaccagtcctaccggcgtgagacgaagaggccccagtaccgaagatcccggctgcaaatcctacttgtgggcgagggatcgacgctccgtgagaggaagagctggcgaacgcgcccgaagaggtggcgaacgcccctgcggagctcgcggaagcgccggtcgtgcctgcgaacgcgctcgaaggcagacgaggtccgtgcgaaacaggtgccgtaggtcgaggtcctgctccgacggtaggcgcgcgaggccgtggttgtaccggaccagctggaggtacgacgtccacggcgctgcgacaggagaagacgcgcatgaccgcacgcatcttctcctgcatccggtcgaaggtcaccctctgctcaacgtcagtcaagtgcaaacctctgttcaacctcacttggactgcggtgatatcggcactgatatcccgtgcggcatcagcccccacgaagtagtctcggtcacggtgcgtgggatacgcgtccgtgacagcggcaacgtgcggctctggggcgtctggagtgaaggtcacacgcgcacgagtgcgaggaaggtaccagcgaaggtagtcacggtagttctcctccgtgtgtgggaagagctcgttgatcacctcctctgtagctaacacccagtcgtcaacgtactgctgtacacgtggagcccaaagtgcgcctgctagctgtccccgtcgagtcaaccgaggtaaattatatggctgcctaagtccgaactgtctcatcacacgctgcgggcagtgaggctcaacgaaaatgtcgaacaccatcggcaggatggtgagccagtaagcctggtcgcgtgtgcacaaggacgaaagtcctagcggtgctctcgtagcgacggcctcttctgtgtacggctcccagatgacgtcgctcggctggagacggtcaaactcgaacacgaagtccgggtaacctcgtctcacctggacgtgagcgtaacgacggtggctgctagcacggcagaaccccagctccactgcggcacgtcctgtggctgagcatccgcgatggaccgtgcgtagtggaccagccggaagtccacagcgtggctcgaagcgcgcagtgatatcctccttccacccaacaacaccgtccacgggaccaactggtgctcccgccagcggtagcccgagcaggtacgacacgtcctgcagtgtcggagccatctccccacagggaaggtggaacgtgtgcgtctcaggtctccagcggtctacctgagcggcaaggagtgaccggtctgcatcccaccgcttcgctgggtcacggtcgtccgccgccgcctcaacaagcctacaaagtggtagaaggcctgccgcacgcaaccaaggaacgtgacgggggtcgacacgcaaccactcgcgcgacgtgcgtggacggaaggtgtcgagctgtgcaccctcgactgctgacaggaacgagcggtggttcctgtcaatcccacggttcaacagcgccggtgtgtcgtacgccataccatcacttgcctgtccagatggactagcatctgcgccgcttggaacttctgcattcttcgggcatttcttgtaagtatggccgcgcagatcacacttgctgcagcgtaaagtcctcccacctgcttctgactcatccatatcatttctgatgcgtctagtttggcgtcgaccctttttcacccttaacttagatggatctggaatataaaaaacttgggcactcagcgttgtgtaagattctgagatcccgaacccatatatctcctcactccatgtatgaaagattgcttctttcctgaaataatttgagacgtacacattgggagatatgccacaatcaccggcagcagcaagaacgtgtgagcaaggaaggtgatgaagcttcggcttcatacaactgcaggtacatccaccatccgccttcaagacacattcctgcacggcttgcttgcgatagataccacgcctgctcctatcaacacacattatttcataccgatgcacttgtgtgccttgagcaacaactctatgtcgccgtacctttttgattttatcttccatgtactttgttactacgttgccaaacactatgttgttatcggccatggacggaccaattttcttgtatcgatccctaaagtacgcttgcgtgccgtgaaggatgaattcaacaatagcaaccaatggaagtacccgaactcctcgcattacccagttgtacacctctgccaaattggttgtcattatgccataccgagatccatcggtgtcgaacaatagagaccacttctccttaggctcattctcaatccactgagtaaaatttctgatggccgaccctgacctccttctcattgttggtgggtcattatgtaatgcaccaagaggtatgggaggctcgtcaccttcaacttgtggtctgcgagattgctcatctgtttgcttcgttgtcaactcatccaacttgtcccacaactcattaaatttcttctcttggttctgtgcacagagcctcttaaagagctccataagatgcttgttcttgaattgcttgtagaaatttgcacccatgtgacgcatgcaccaccgactccgaacatcgggccacttagctggaagtcccttctcatcccaaccgttctgcaagtagtcaatagcccgcaacatacccgcatgacgaacatgtataaggcaaacgttgggcctcatacgcaccactgcaatgtgcactctctctaggaaccagtaccagctttcagtgttctcactctctacaaatgcaaaagccataggtagaacctggttgttcccatcacacccaattgctgtcaatatctgaccttggtatttacctgtcataaaagttccatctatgcatagaacaggtcgacaatgcacaaaagcattgatgcaagcacccaatgagaaaaaggctctttgcagcacactctttgttcgatcatcaaccgatgtaaatgtatgtaggtcatagtaagtattattattcctctgggcaatggtggctaacaaacgaggcaaattatcataagaagcttcaaatgtgccatacctcatctcaataatcttttgtttggctctccaggcctttgcatagcttatggtgtacttgaatttattctcgatgtgcctaataattgattttggttcaaagccaatgttaccaacaacactgctgtacatctcacttaccacaaaagctgaagtgatgtttcggtgatacttctccaccccttgtaagtagcacttgtgctcggtcacaatgctaactttccaataatcattccatttacccttatatgcatggacacgccacggacaatcttccttcatgcacctcacttcatacacataatttgttgacttgaccaccctaaactctctctgcaaggaaactgcccaatgcttcaccgcctccttcatctcatccttatgagcataccttgcaccctcaattacctcgttctccttatactcccagggtacatgatcaccctctgatataacaagtccagagaagtcctcatttgcccaatcagtggccattacatcaccttcctcatcggatgatgcgtcgtcgttcgcttcctcattatccgaatcttccctctccatttcatcaacaattataccgactctctccccctcatccgccatgcccatggcctgctcctcccttggttgatttttctcattttgcatcgatggtccaacaacatcccttgcattgataggaccctctacatcttcggtttgcattgaaacatttatatctttctcttgtaccgacacaaatataacgaggggccatgaccgttcaaaagccattttcacataccgtctccaagcagcagtgctgtccatcggcattagttcccaaaaataaccttctgttgcacgactcactacaactgatactgacattgtgtagacttcttggtctattctaaatcctctcaacaaccaactataaattgactgaaatgttttctccacaggcctatcgatacccttagatgtcattacaaaatctgacagatcaacaccatctggaccaaatctaatatttccttcaccgtgaactatctgaaatgtgaccttatttgacat

SEQ ID NO: 4501 - DNA, 1656 bp, Oryza sativa
  Clone ID: PAT_MRT4530_1137C.1
atggccgccgccgccgccgccgccaccgccaccgcctcctccggcctcatccgctgcgccacgggaggcgcgccggcgcacggccaccaccaggtgttcaggtgctccgccgccaagccgtcccctctcgcgctgcgccaccgcgcgggccgccccgcgccgctgcaggccttccccgaatacgaccgcgtcacgcctttcgactatgacggtgaggtggacggcggcgacggcgacgaccacccgcgcgaggagtgcggcgtgttcggcgtcgtcggggacccggacgccacgtcgctctgctacctcggcctgcagaagctgcagcaccgcggggaggagggggctggcatcgccgccgcgggggacgacggcacgatcaagctggagagggggctggggctcgtcggggacgtgttcggcgacccggcccgcctcggcaagctccccggccaggccgccatcggccacgtgaggtactccaccgccggcgccgccgcctccctgcgcaacgtgcagccgttcctcgccgggtacaggttcgggcagctcgccgtggcgcacaacggcaacctggtgaactaccaggcgctgcggaacaagctggaggcgcagggctccatctttagcacgtcgtcggacacggaggtgatcctgcacctcatcgccacctcgctctcgcgccctctgctcgcgcgcatctgcgacgcctgcgagcgcctcgccggggcctactcgctgctgttcctgacggcggacaagctcctggccgtgcgcgacccgttcggcttcaggcccctggtgatgggccgccgcgccaacggcgccatcgtgttcgcgtcggagacctgcgcgctcgacctcatcgacgccacgtacgagcgcgaggtggagccaggggaggtcgtcgtcgtcgaccgccgcgacatgtcggtgtcctccgcctgcctcgtcccgcaccgcccccgcaagtcgtgcgtcttcgagcacatctacttcgcgctcccaaactccgtggtgttcggccacgccgtccacgagcgccgcaacgcctacggccgcgcgctcgccgaggagtcccccgcccccaccgccgacgtcgtcatccccgttccggactcggggttctacgccgcgctgggattctcgcagacgtcggggctcgagttccagcaaggcctcatccggtggcactacagcggccgcagcttcatccagccgtcgcaggcgatccgcgacctcgccgtcaagctcaagctcgcgcccgtgcacggcgtcatcaggggcaagagcgtggtggtggtcgacgactcgctcgtccgcggcaccacctcgagcaagatcgtgcgcctgctccgcgacgccggcgcgcgcgaggtgcacatgcggatcgccagcccgccggtcatcggctcctgcctctacggcatcgacacgcccagcgagggcgagctgatatcaaacaggatggacctcgagggagtccgcagggcgatcggctgcgactccctcgcgttcctctcgctcgacaagctccacaccatctatggcgacgaggcgcatgagctctgcgacgcctgcttctcgcggaattacccggtgctccccaccgtgccggagccggtgccggagttggtgtccgccttcgaagactga

SEQ ID NO: 4502 - DNA, 1533 bp, Oryza sativa
  Clone ID: PAT_MRT4530_11380C.1
atggggagcccgccgccgccgcgccgccggtgctgcgcgatccagggtttcgtggtgttgttcctcgtctacgtgctcgcggtgcttgtgctcgccggcggcgagctcttccgcgacgaccacccgctcgacctccgcttcccctcctctcctggaattggatcctcctcctcctcctccgctcgattcctcctctcgcctcgctcgttgctgcttcgtctcggggagatcgcgagccgtcggggcaggtggtggcgaccggaatcggactctccgacgagcggcggacgaaaggacgggaacagttcgaccacggaggcgtgttcgcggcggtgcgccgcctccggcctgatggggatatcgctgcgcctcgccgagcagttctccgcggaggaggacggcggcggcggcggcggcaacctcgtcttctcgccgctgtccatctactccgcgctctccgtggtcaccgccggcgcgcggggcaccaccctgaccgagctgctcgccgccctcggcgcgccgtcccgcgacgcgctcgccaagaacgccgccgagatcgcgcgcgccctcgccggcggcacggcgacgggcgggccccgcgtcgcgcacgcgtgcggcctctggcacgagcggacgaggtcgctcaagctggcgttccgggacgccgccgccgcctccttcaacgccgcaacccgcgccgtcgacttcctcgccaacccggaagaagcgaggaaggagatcaacagctgggttgcggccgcgacggagaacctcatcgacacgatcctcccgccggggtcggtgagcacggacacgggtctcgtggtcaccagcgccatctacttcaacggcacatggcagacgccattccgaaagcaggacaccaagaaggacaagttccacctcctcgacggccacggcaccgtcgacgcggacttcatgcgcaccggcgaggaccagtacatcgcggcgcacgacgggttcaaggtgctcaagatgccgtacgcccacgaccacgcggcgccacaaccctcgccgcggtactactccatgtacatcctcctccccgacgagcgcgacggcctgtccagcctcgaggacaggatggcggcggccggtggcggcggcggcggcgagggcttcctcagcgagcacatgccggtgcgacgcgtcgaggtcggcgagttcaggatccccaggttcaagctctccttcagccgcagcgtcgtgcgcgcgctccggggtgtcggggtgaacgccgtgttcgatcgggccgagctgccggacatgatcgagggcgagccgctgcgcgtgtcggacgtcctgcacaaggccgtgatcgaggtgaacgaggagggcaccgaggcggcggcggccacggcagtgttaatggaaggtgcggcgcggtatgcgccgccgccgccgccaagggaggacttcgtcgccgaccatccgttcgccttctttgtggtggaggaatcgtcgggcgcggtactcttcgcggggcatgtcgttgacccgacgaaatcttag

SEQ ID NO: 4503 - DNA, 5183 bp, Oryza sativa
  Clone ID: PAT_MRT4530_11381C.1
taaggtaaaattgcatttgatcatatttggtttgctgccaaaatgtaaaattgtagtgaagaatgttgtacataatctcaattctagattacgtattaccaattaataggcttccattttcgtgtgtggtgtgctagtgggaaagaagatatgaagaggttgccttcagattgtcaattatatagcgtcgttttcactgcaatatatgtgaactcaatgagatacattattcattagatgtgacaagacgatcacgcgtgggcgtgattcactttatgtcaacaggcagcgccgaaagttgatagtgataacttgagctgccgcttttcatgtgtgctgttgtggactgtgcgcgctactggatctgacactaccgtgaagcgccgaaagtgtgttgtcgtgagcataagttgttctagcaccatatgaatgaaaagaaccctgtccctcctaccctgcgccctaatgtgcccgtgggagtacgtgagtcggtccgggggtacggcacggccaacccgtcctgcctgtacaggtgtgacctctggctgctcctgagtgtgcgcctctggagctcctccaagctgagaggagcctagtacgtcctggtggtctgcaccgtgcaagtcgtcgtcgtagaactggctagtaggaccagtcctaccggcgtgagacgaagaggccccagtaccgaagatcccggctgcaaatcctgcgtgtgggcgagggatcgacgctccgtgagaggaagagctggcgaacgcgcctgaagaggtggcgaacgcccctgcggagctcgcggaagcgccggtcgtgcctgcgaacgcgctcgaaggcatacgaggtccgtgcgaaaccggtgctgtaggtcgcactgctccgaagctaggggcgctcgaagacaaacgaggtcctgctccgacggtaggaccgcgaggccgtgggtgtaccggaccagctggaggtacgacgtccacggcgctgcgacaggagaagacgcgcatgaccgcacgcatcttctcctgcatccggtcgaaggtcgacctctgctcaacgtcagtcaagtgcaaacctctgttcaacctcacttggactgcggtgatatcggcactgatatcccgtgcggcatcagccgccacgaagtagtctcggtcacggtgcgtgggatacgcgtccgtgacagcggcaacgtgcggctctggggcgtctggagtgaaggtcacacgcgcacgagtgcgaggaaggtaccaacgaaggtagtcacggtagttctcctccgtgtgtgggaagagctcgttgatcacctcctctgtagctaacacccagtcgtcaacgtactgctgtacacgtggagcccaaagtgcgcctgctagctgtccccgtcgagtcaacgagtggtcggcaggggggacggtcggctgcacgttgccgggaaacacctgcctaagtccgaactgtctcatcacacgctgcgggcagtgaggctcaacgaaaatgtcgaacaccatcggcaggatggtgagccagtaagcctggtcgcgtgtgcacaaggacgaaagtcctagcggtgctctcgcagcgacggcctcttctgtgtacggctcccagatgacgtcgctcggctggagacggtcaaactcgaacacgaagtccgggtaaccacgtctcacctggacgtgagcgtaacgacgcccacgtcgacaccagtaagtccccatcgtgggaccgtcctctggccactgcgcgctgcgaccaaccccatagggtgcgctgtccaccactggtcgacctatggcaaacctctcggctgcccaaagctgaagcaacatagggcagccagcgatgatcgctcccgcgtcagtcttcgtgcacgcctcacagagggcacggtacgtggctgctagcacggcagaaccccagctccactgcggcacgtcctgtggctgagcatccgcgatggaccgtgcgtagtggaccagccggaagtccacagcgtgcccgtgggtgctagtgaacatcacccacccgaacaaccacaacaggtacgcctcaagggagcgtcggaccgagtaatcatcagcgtcagggtgtagaaggtccgcagtgaactggagcaaccaagccttgctaggcccgactgtagagtacggaggaagggtggtggtcggtccgtcgacgggaccaactggtgctcccgccagcggtagcccgagcaggtacgacacgtcctgcagtgtcggagccatctccccacagggaaggtggaacgtgtgcgtctcaggtctccagcggtctacaagagcggcaaggagtgaccggtctgcatcccaccgcttcgctgggtcacggtcgtccgccgccgcctcaacaagcctacaaagtggtagaaggcctgccgcacgcaaccaaggaacgtgacgggggtcgacacgcaaccactcgcgcgacgtgcgtggacggaaggtgccgagctgtgcaccctcgactgctgacaggaacgagcggtggttcctgtcaatcccacggttcaacagcgccggtgtgtcgtacgccataccatcacttgcctgtccagatggactagcatctgcgccgcttggaacttctgcattcttcgggcatttcttgtaagtatggccgcgcagatcacacttgctgcagcgtaaagtcctcccacctgcttctgactcatccatatcatttctgatgcgtctagtttggcgtcgaccctttttcaccctaaacttagatggatctggaatataaaaaacttgggcactcagcgttgtgtaagatcctgagatcccgaacccatatatctcctcactccatgtatgaaagattgcttctttcctgaaataatttgagacgtacacattgggagatatgccacaatcaccggcagcagcaagaacgtgtgagcaaggaaggtgatgaagcttcggcttcatacaactgcaggtacatccaccatccgccttcaagacacattcctgcacggcttgcttgcgatagataccacgcctgctcctatcaacacacattatttcataccgatgcacttgtgtgccttgagcaacaactctatgtctccgtgcctttttgattttatcttccatgtactttgtcactacgttgccaaacactatgttgttatcggccatggacggaccaattttcttgtatcgatccctaaagtaggcttgcgtgccgtgaaggatgaattcaacaatagcaaccaatggaagtacccggactcctcgcattacccagttgtacacttctgccaaattggttgtcattatgccataccgagatccatcggtgtcgaacaatagagcccacttctccttaggctcattctcaatccactgagagaaatttttgatggccgaccctgacctccttctcattgttggtgggtcatcatgtaatgcaccaagaggtatgggaggctcgtcaccttcaacttgtggtctgcgagattgctcatctgtttgcttcgttgtcaactcatccaacttgtcccacaactcattaaatttcttctcttggttctgtgcacagagcctcttaaagagctccataagatgcttgttcttgaattgcttgtagaaatttgcacccatgtgacgcatgcaccaccgactccgaacatcaggccacttagctggaagtcccttctcatcccaaccgttctgcaagtagtcaatagcccgcaacatacccgcatgacgatcatgtataaggcaaacgttgggcctcatacgcaccactgcaatgtgcactctctctaggaaccagtaccagctttcagtgttctcactctctacaaatgcaaaagccataggtagaacctggttgttcccattacacccaattgctgtcaatatctgacctcggtatttacctgtcataaaagttccatctatgcatagaacaggtcgacaatgcacaaaagcattgatgcaagcacccaatgagaaaaaggctctttgcagcacactctttgttctatcttcaaccgatgtaaatgtatgtaggtcatagtaagtattattattcctctgggcaatggtggctaacaaacgaggcaaattatcataagaagcttcaaatgtgccatacctcatctcaatgatcttttgtttggctctccaggcctttgcatagcttatggtgtacttgaatttgttctcgatgtgcctaataattgattttggttcaaagccaatgttaccaacaacactgctgtacatctcacttgccacaaaagctgaagtgatgtttcggtgatacttctccaccccttgtaagtagcacttgtgctcggtcacaatgctaactttccaataatcattccatttacccttatatgcatggacacgccacggacaatcttccttcatgcacctcacttcatacacataatttgttgacttgaccaccctaaactctctctgcaatgaaactgcccaatgcttcaccgcctccttcatctcatccttatgagcataccttgcaccctcaattacctcgtactccttatactcccagggtacatgatcaccctctgatataacaagaccagagaagtcctcatttgcccaatcagtggccattacatcaccttcctcatcggatgatgcgtcgtcctccgcttgctcattatccgaatcttccctctccatttcatcaacaattataccgactctctccccctcatccgccatgcccatggcctgctcctcccttggttgattttcctcattttgcatcgatggtccaacaacatcccctgcattgctaggaccctccacatcttcggtttgcattgaaacatttgtatctttctcttgtaccgacacaaatataacgaggggccatgaccgttcaaaagccatttccacataccgtctccaagcagcagtgctgtccatcggcattagttcccaaaaataaccttctattgcacgactcactacaacagatactgacattgtgtagacttcttggtctattctaaatcctctcaacaaccaactataaattgactgaaatgttctctccgcaggcctatcgatgcccttagatgtcattacaaaatctgacagatcaacaccatctggaccaaatctaatatttccttcaccgtgaactatctgaaatgtgaccttacttgacat

SEQ ID NO: 4504 - DNA, 4794 bp, Oryza sativa
  Clone ID: PAT_MRT4530_11382C.1
atgtcaagtaaggtcacatttcagatagttcacgatgaaggaaatattagatttggtccagatggtgttgatctgtcagattttgtaatgacatctaagggcatcgataggcctgcggagagaacatttcagtcaatttatagttggttgttgagaggatttagaatagaccaagaagtctacacaatgtcagtatcagttgtagtgagtcgtgcaacagaaggttatttttgggaactaatgccgatggacagcactgctgcttggagacggtatgtggaaatggcttttgaacggtcatggcccctcgttatatttgtgtcggtacaagagaaagatataaatgtttcaatgcaaaccgaagatgtagagggtcctatcaatgcaggggatgttgttggaccatcgatgcaaaatgaggaaaatcaaccaagggaggagcaggccatgggcatggcggatgagggggagagagtcggtataattgttgatgaaatggatagggaagattcggataatgaggaagcggacgacgacgcatcatccgatgaggaaggtgatgtaatggccactgattgggcaaatgaggacttctctggacttgttatatcagagggtgatcatgtaccctgggagtataaggagaacgaggtaattgagggtgcaaggtatgctcataaggatgagatgaaggaggcggtgaagcattgggcagtttccttgcagagagagtttagggtggtcaagtcaacaaattatgtgtatgaagtgaggtgcatgaaggaagattgtccgtggcgtgtccatgcatataagggtaaatggaatgattattggaaagttagcattgtgaccgagcacaagtgctacttacaaggggtggagaagtatcaccgaaacatcacttcagcttttgtggcaagtgagatgtacagcagtgttgttggtaacattggctttgaaccaaaatcaattattaggcacatcgagaacaaattcaagtacaccataagctatgcaaaggcctggagagccaaacaaaagattattgagatgaggtatggcacatttgaagcttcttatgataatttgcctcgtttgttagccaccattgcccagaggaataataatacttactatgacctacatacatttacatctgttgatgatcgaacaaagagtgtgctgcaaagagcctttttctcattgggtgcttgcatcaatgcttttgtgcattgtcgacctgttctatgcatagatggaacttttatgacaggtaaataccgaggtcagatattgacagcaattgggtgtgatgggaacaaccaggttctacctatggcttttgcatttgtagagagtgagaacactgaaagctggtactggttcctagagagagtgcacattgcagtggtgcgtatgaggcccaatgtttgccttatacatgatcgtcatgcgggtatgttgcgggctattgactacttgcagaacggttgggatgagaagggacttccagctaaatggcctgatgttcggagtcggtggtgcatgcgtcacatgggtgcaaatttctacaagcaattcaagaacaagcatcttatggagctctttaagaggctctgtgcacagaaccaagggaagaaatttaatgagttgtgggacaagttggatgagttgacaacgaagcaaacagatgatcaatctcgcagaccacaagttgaaggtgacgagcctcccatacctcttggtgcattacatgatgacccaccaacaatgagaaggaggtcagggtcgtccatcaaaaatttcactcagtggattaagaatgagcctaaggagaagtggtctctattgttcgacaccgatggatctcggtatggcataatgacaaccaatttggcagaggtgtacaactgggtaatgcgaggagttcgggtacttccattggttgctattgttgaattcatccttcacggcacgcaagcgtactttagggatcgatacaagaaaattggtccgtccatggccgataacaacatagtgtttggcaacgtagtgacaaagtacatggaagataaaatcaaaaaggcacggagacatagagttgttgctcaaggcacacaagtgcatcggtatgaaataatgtgtgttgataggagcaggcgtggtatctatcgcaagcaagccatgcaggaatgtgtcttgaaggcggatggtggatgtgcctgcagttgtatgaagccgaagcttcatcaccttccttgctcacacgttcttgctgctgccggtgattgtggcatatctcccaatgtttacgtctcaaattatttcaggaaagaagcaatatttcatacatggagtgaggagatatatgggttcgggatctcaggatcttacacaacgctgagtgcccaagttttttatgttccagatccatctaagttaagggtgaaaaagggtcgacgccaaactagacgcatcagaaatgatatggatgagtcagaagcaggtgggaggactttacgctgcagcaagtgtgatctgcgcggccatacttacaagaaatgcccgaagaatgcagaagttccaagcggcgcagatgctagtccatctggacattcaagtgatggtatggcgtacgacacaccggcgctgttgaaccgtgggattgacaggaaccaccgctcgttcctgtcagcagtcgagggtgcacagctcggcaccttccgtccacgcacgtcgcgcgagtggttgcgtgtcgacccccgtcacgttccttggttgcgtgcggcaggccttctaccactttgtaggcttgttgaggcggcggcggacgaccgtgacccagcgaagcggtgggatgcagaccggtcactcctcgccgctctggtagaccgctggagacctgagacgcacacgttccaccttccctgtggggagatggctccgacactgcaggacgtgtcgtacctgctcgggctaccgctggcgggagcaccagttggtcccgtggacggtgtttttgggtggaaggaggatatcactgcgcgcttcgagcaggtgatgcgccttccacacctaggaccggccaacacccttcctccgtactctacagtcgggcctagcaaggcttggttgctccagttcactgcggaccttctgcaccctgacgctgatgattactcggtccgacgctcccttgaggcgtacctgttatggttgttcgggtgggtgatgttcactagcacccacgggcacgctgtggacttccggctggtccactacgcacggtccatcgcggatgctcagccacaggacgtgccgcagtggagctggggttctgccgtgctagcagccacgtaccgtgccctctgtgaggcgtgcacgaagactgacgcgggagcgatcatcgctggctgccctatgttgcttcagctttgggcagccgagaggtttgccataggtcgaccagtggtggacagcgcaccctacggggttggtcgcagcgcgcagtggccagaggacggccccacgatggggacttactggtgtcgacgtgggcgtcgttatgctcacgtccaggtgagacgaggttacccggacttcgtgttcgagtttgaccgtctccagccgagcgacgtcatctgggagccctacacagaagaggctgtcgctgcgagagcaccgctaggactttcgtccttgtgcacacgcgaccaggcttactggctcaccatcctgccgatggtgttcgacattttcgttgagcctcactgcccgcagcgtgtgatgagacagttcggacttaggcaggtgtttccgggcaacgtgcagccgaccgtcctccctgccgaccactcgttgactcgacggggacagctagcaggcgcactttgggctccacgtgtacagcagtacgttgacgactgggtgttagctacagaggaggtgatcaacgagctcttcccacacacggaggagaactaccgtgactaccttcgctggtaccttcctcgcactcgtgcgcgtgtgaccttcactctagacgccccagagccgcacgttgccgctgtcacggacgcgtatcccacgcaccgtgaccgagactacttcgtggcggccgatgccgcacgggatatcagtgccgatatcaccgcagtccaagtgaggttgaacagaggtttgcacttgactgacgttgagcagagggtgaccttcgaccggatgcagcagaagatgcgtgcggtcatgcgcgtcttctcctgtcgcagcgccgtggacgtcgtacctccagctggtccggtacaaccacggcctcgcgcgcctaccgtcggagcaggacctcgacctacggcacctgtttcgcacggacctcgtctgccttcgagcgcgttcgcaggcacgaccggcgcttccgcgagctccgcaggggcgttcgccacctcttcgggcgcgttcgccagctcttcctctcacggagcgtcgatccctcgcctacacgcaggatttgcagccgggatcttcggtactggggtctcttcgtctcacgccggtaggactggtcctactagccagttctacgacgacgacttgcacggtgcacaccaccacgacgtactaggctcctctcagcttggaggagctccagaggcgcacactcaggagcagccagaggtcacacctgtacaggcaggacgggttggccgtgccgtacccccggaccgactcacgtactcccaggggcacattagggcgcagggtaggagggataggggtaagaggcctcgtcagtag

SEQ ID NO: 4505 - DNA, 4716 bp, Oryza sativa
  Clone ID: PAT_MRT4530_11383C.1
atgtcaaataaggtcacatttcagctagttcacggtgaaggaaatattagatttggtccagatggtgttgatctgtcagattttgtaatgacatctaagggcatcgataggcctgcggagagaacatttcagtcaatttatagttggttgttgagaggatttagaatagaccaagaagtctacacaatgtcagtatcagttgtagtgagtcgtgcaacagaaggttatttttgggaactaatgccgatggacagcactgctgcttggagacggtatgtggaaatggcttttgaacggtcatggctcctcgttatatttgtgtcggtacaagagaaagatataaatgtttcaatgcaaaccgaagatgtagagggtcctatcaatgcaggggatgttgttggaccatcgatgcaaaatgaggaaaatcaaccaagggaggagcaggccatgggcatggcggatgagggggagagagtcggtataattgttgatgaaatggagagggaagattcggataatgaggaagcggacgacgacgcatcatccgatgaggaagagggtgatcatgtaccctgggagtataaggagaacgagataattgacggtgcaaggtatgctcataagtatgagatgaaggaggcggtgaagcattgggcagtttccttgcagagagagtttagggtggtcaagtcaacaaattatgtgtatgaagtgaggtgcatgaaggaagattgtccgtggcgtgtccatgcatataagggtaaatggaatgattattggaaagttagcattgtgaccgagcacaagtgctacttacaaggggtggagaagtatcaccgaaacatcacttcagcttttgtggcaagtgagatgtacagcagtgttgttggtaacattggctttgaaccaaaatcaattattaggcacatcgagaacaaattcaagtacaccataagctatgcaaaggcctggagagccaaacaaaagattattgagatgaggtatggcacatttgaagcttcttatgataatttgcctcgtttgttagccaccattgcccagaggaataataatacttactatgacctacatacatttacatcggttgatgatcgaacaaagagtgtgatgcaaagagcctttttctcattgggtgcttgcatcaatgcttttgtgcattgtcgacctgttctatgcatagatggaacttttatgacagagagtgagaacactgaaagctggtactggttcctagagagagtgcacattgcagtggtgcgtatgaggcccaacgtttgccttatacatgatcgtcatgcgcgtatgttgcgggctattgactacttgcagaacggttgggatgagaagggacttccagctaagtggcctgatgttcggagtcggtggtgcatgcgtcacatgggtgcaaatttctacaagcaattcaagaacaagcatcttatggagctctttaagaggctctgtgtacagaaccaagagaagaaatttaatgagttgtgggacaagttggatgagttgacaacgaagcaaacagatgagcaatctcgcagaccacaagttgaaggtgacgagcctcccatagctcttggtgcattacatgatgacccaccaacaatgagaaggaggtcagggtcgtccatcagaaatttcactcagtggattgagaatgagcctaaggagaagtggtctctattgttcgacaccgatggatctcggtatggcataatgacaaccaatttggcagaggtgtacaactgggtaatgcgaggagttcgggtacttccattggttgctattgttgaattcatccttcacggcacgcaagcgtactttagggatcgatacaagaaaattggtccgtccatggccgataacaacatagtgtttggcaacgtagtgacaaagtacatggaagataaattcaaaaaggcacggagacatagagttattgctcaaggcacacaagtgcatcggtatgaaataatgtgtgttgataggagcgggcgtggtatctatcgcaagcaagccgtgcaggaatgtgtcttaaaggcggatggtggatgtacctgcagttgtatgaagccgaagcttcatcaccttccttgctcacacgttcttgctgctgctggtgattgtggcatatctcccaatgtgtacgtctcaaattatttcaggaaagaagcaatctttcatacatggagtgaggagatatatgggttcgggatcttaggatcttacacaacgctgagtgcccaagttttttatattccagatccatctaagttaagggtgaaaaagggtcgacgccaaactagacgcatcagaaatgatatggatgagtcagaagcaggtgggaggactttacgctgcagcaagtgtgatctgcgcggccatacttacaagaaatgcccgaagaatgcagaagttccaagcggcgcagatgctagtccatctggacaggcaagtgatggtatggcgtacgacacatcggcgctgttaaaccgtgggattgacaggaaccaccgctcgttcctgtcagcagtcgagggtgcacagctcggcaccttccgtccacgcacgtcgcgcgagtggttgcgtgtcgacccccgtcacgttccttggttgcgtgcgacaggccttctaccactttgtaggcttgttgaggcggcggcggacgaccgtgacccagcgaagcggtgggatgcagaccggtcactccttgccgctctggtagaccgctggagacctgaaacacacacgttccaccttccctgtggggagatggctccgacactgcaggacgtgtcgtacctgctcgggctaccgctggcgggagcaccagttggtcccgtggacggtgtttttgggtggaaggaggatatcactgcgcgcttcgagcaggtgatgcgccttccacacctaggaccggccaacacccttcctccgtactctacagtcgggcctagcaaggcttggttgctccagttcactgcgtaccttctgcaccctgacgctgatgataactcggtgagacgaggttacccggacttcgtgttcgagtttgaccgtctccagccgagcgacgtcatctgggagccgtacacagaagaggccgtcgctgcgagagcaccgctaggactttcgtcgttgtgcacacgcgaccaggcttactggctcaccatcctgccgatggtgttcgacattttcgttgagcctcactgcccgcagcgtgtgatgagacagttcggacttaggcaggtgtttccgggcaacgtgcagccgaccgtcctccctgccgaccactcgttgactcgacggggacagctagcaggcgcactttgggctccacgtgtacagcagtacgttgacgactgggtgttagctacagaggaggtgatcaacgagctcttcccacacacggaggagaactaccgtgactaccttcgctggtaccttcctcgcactcgtgcgcgtgtgaccttcactccagacgccccagagccgcacgttgccgctgtgacggacgcgtatcccacgcaccgtgaccgagactacttcgtgggggctgatgccgcacgggatatcagtgccgatatcaccgcagtccaagtgaggttgaacagaggtttgcacttgactgacgttgagcagagggtgaccttcgaccggatgcaggagaagatgcgtgcggtcatgcgcgtcttctcttgtcgcagcgccgtggacgtcgtacctccagctggtccggtacaaccacggcctcgcgcgcctaccgtcggagcaggacctcgacctacggtacctgtttcgcacgcaggatttgcagccgggatcttcggtactggggcctcttcgtctcacgccggtaggactggtcctactagccagttctacgacgacgacttgcacggtgcacaccaccacgacgtactaggctcctctcagcttggaggagctccagaggcgcacactcaggagcagccagaggtcacacctgtacaggcaggacgggttggccgtgccgtacccccggaccgactcacgtactcccaggggcacattagggcgcagggtaggagggacagggttcttttcattcatatggtgctagaacaacttatgttcacgacaacacactttcggcgcttcacggtagtgcaacctcttcatatcttctttcccactagcacacaacacacgaaaatggaagcgccattccttgagcgtctcaactggcgaagcgatccttttgctggttggtttccaccatggtgtgaccgtcctttgtgcgattgtggggatggatgcatactcaagtcttccctcatgatacaaactcggggcaggagattcttccaatgcgcgaactttgatcagacatatcgtccaatgtgcaacttcatcgagtgggtagacatggagaacccacaaaacgacggaacccgtgcttacccacgtagtgaaacaagatcggactacctaaggcggaaggatgagcatgaacgtcgaattgctgctgaggctttagaatggcacggcaatccaaggatgggtggatttactcgatggatcgacaatgtcactctatcatatcatggccagaagataacagagtcagaaacacaagtagagtatcaacgattgaaggaccacgagaatacaatgcattctgaccgacctagaaggggtcgatag

SEQ ID NO: 4506 - DNA, 4725 bp, Oryza sativa
  Clone ID: PAT_MRT4530_11384C.1
ctactgacgaggcctcttacccctgtccctcctaccctgcgccctaatgtgcccctgggagtacgtgagtcggtccgggggtacggcacggccaacccgtcctgcctgtacaggtgtgacctctggctgctcctgagtgtgcgcctctggagctcctccaagctgagaggagcctagtacgtcgtggtggtgtgcaccgtgcaagtcgtcgtcgtagaactggctagtaggaccagtcctaccggcgtgagacgaagaggccccagtaccgaagatcccggctgcaaatcctgcgtgtgggcgagggatcgacgctccgtgagaggaagagctggcgaacgcgcccgaagaggtggcgaacgcccctgcggagctcgcggaagcgccggtcgtgcctgcgaacgcgctcgaaggcagacgaggtccgtgcgaaacaggtgccgtaggtcgaggtcctgctccgacggtaggcgcgtgaggccgtggttgtaccggaccagctggaggtacgacgtccacggcgctgcgacaggagaagacgcgcatgaccgcacgcatcttctcctgcatccggtcgaaggtcaccctctgctcaacgtcagtcaagtgcaaacctctgttcaacctcacttggactgcggtgatatcggcactgatatcccgtgcggcatcagcccccacgaagtagtctcggtcatggtgcgtgggatacgcgtccgtgacagcggcaacgtgcggctctggggcgtctggagtgaaggtcacacgcgcacgagtgcgaggaaggtaccagcgaaggtagtcacggtagttctcctccgtgtgtgggaagagctcgttgatcacctcctctgtagctaacacccagtcgtcaacgtactgctgtacacgtggagcccaaagtgcgcctgctagatgtccccgtcgagtcaacgagtggtcggcagggaggacggtcggctgcacgttgcccggaaacacctgcctaagtccgaactgtctcatcacacgctgcgggcagtgaggctcaacgaaaatgtcgaacaccatcagcaggatggtgagccagtaagcctggtcgcgtgtgcacaaggacgaaagtcctagcggtgctctcgcagcgacggcctcttctgtgtacggctcccagatgacgtcgctcggctggagacggtcaaactcgaacacgaagtccgggtaacctcgtctcacctggacgtgagcgtaacgacgcccacgtcgacaccagtaagtccccatcgtgggaccgtcctctggccactgcgcgctgcgaccaaccccgtagggtgcgctgtccaccactggtcgacctatggcaaacctctcggctgcccaaagctcaagcaacatagggcagccagcgataatcgctcccgcgtcagtcttcgtgcacgcctcacagagggcacggtacgtggctgctagcacggcagaaccccagctccactgcggcacgtcctgtggctgagcatccgcgatggaccgtgcgtagtggaccagccggaagtccacagcgtgcccgtgggtgctagtgaacatcacccacccgaacaaccacaacaggtacgcagtgaactggagcaaccaagccttgctaggcccgactgtagagtacggaggaagggtgttggccggtcctaggtgtggaaggcgcatcacctgctcgaagcgcgcagtgatatcctccttccacccaacaacaccgtccacgggaccaactcgtgctcccgccagcggtagcccgagcaggtacgacacgtcctgcagtgtcggagccatctccccacagggaaggtggaacgtgtgcgtctcaggtctccagcggtctaccagagcgacaaggagtgaccggtctgcatcccaccgcttcgctgggtcacggtcgtccgccgccgcctcaacaagcctacaaagtggtagaaggcctgccgcacgcaaccaaggaatgtgacgggggtcgacacgcaaccactcgcgcgacgtgcgtggacggaaggtgccgagctgtgcaccctcgactgctgacaggaacgagcggtggttcctgtcaatcccacggttcaacagcgccggtgtgtcgtacaccataccatcacttgcctgtccagatagactagcatctgcgccgcttggaacttctgcattcttcgggcatttcttgtaagtatggccgcgcagatcacacttgctgcagcgtaaagtcctcccacctgcttctgactcatccatatcatttctgatgcgtctagtttggcgtcgaccctttttcacccttaacttagatggatctggaatataaaaaacttgggcactcagcgttgtgtaagatcctaagatcccgaacccatatatctcctcactccatgtatgaaagattgcttctttcctgaaataatttgagacgtacacattgggagatatgccacaatcaccggcagcagcaagaacgtgtgagcaaggaaggtgatgaagcttcggcttcatacaactgcaggtacatccaccatccgccttcaagacacattcctgcacggcttgcttgcgatagataccacgcctgctcctatcaacacacattatttcataccgatgcacttgtgtgccttgagcaacaactctatgtctccgtgcctttttgattttatcttccatgtactttgtcactacgttgccaaacactatgttgttatcggccatggacggaccaattttcttgtacgcttgcgtgccgtgaaggatgaattcaacaatagcaaccaatggaagtacccgaactcctcgcattacccagttgtacacctctgccaaattggttgtcattatgccataccgagatccatcggtgtcgaacaatagagacaacttctccttaggctcattctcaatccactgagtgaaatttctgatggccgaccctgacctccttctcattgttggtgggtcatcatgtaatgcaccaagaggtatgggaggctcgtcaccttcaacttgtggtctgcaagattgctcctctgtttgcttcgttgtcaactcatccaacttgtcccacaactcattaaatttcttctcttggttctgtgcacagagcctcttaaagagctccataagatgcttgttcttgaattgcttgtagaaatttgcacccatgtgacgcatgcaccaccgactccgaacatcaggccacttagctggaagtcccttctcatcccaaccgttctgcaagtagtcaatagcccgcaacatacccgtatgacgatcatgtataaggcaaacgttgggcctcatacgcaccactgcaatgtgcactctctctaggaaccagtaccagctttcagtgttctcactctctacaaatgcaaaagccataggtagaacctggttgttcccatcacacccaattgctgtcaatatctgacctcggtatttacctgtcataaaagttccatctatgcatagaacaggtcgacaatgcacaaaagcattgatgcaagcacccaatgagaaaaaggctctttgcagcacactctttgttcgatcatcaaccgatgtaaatgtatgtaggtcatagtaagtattattattcctctgggcaatggtggctaacaaacgaggcaaattatcataagaagcttcaaatgtgccatacctcatctcaataatcttttgtttggctctccaggcctttgcatagcttatggtgtacttgaatttgttctcgatgtgcctaataattgattttggttcaaagccaatgttaccaacaacactgctgtacatctcacttgccacaaaagctgaagtgatgtttcggtgatacttctccaccccttgtaagtagcacttgtgctcggtcacaatgctaactttccaataatcattccatttacccttatatgcatggacacgccacggacaatcttccttcatgcacctcacttcatacacataatttgttgacttgaccaccctaaactctctctgcaaggaaactgcccaatgcttcaccgcctccttcatctcatccttatgagcataccttgcaccctcaattacctcgttctccttatactcccagggtacatgatcaccctctgatataacaagtccagagaagtcctcatttgcccaatcagtggccattacatcaccttcctcatcggatgatgcgtcgtcgtccgcttcctcattatccgaatcttccctctccatttcatcaacaattataccgactctctccccctcatccgccatgcccatggcctgctcctcccttggttgattttcctcattttgcatcgatggtccaacaacatcccttgcattgataggaccctctacatcttcggtttgcattgaaacatttatatctttctcttgtaccgacacaaatataacgaggggccatgaccgttcaaaagccatttccacataccgtctccaagcagcagtgctgtccatcggcattagttcccaaaaataaccttctgttgcacgactcactacaactgatactgacattgtgtagacttcttggtctattctaaatcctctcaacaaccaactataaattgactgaaatgttttctccgcaggcctatcgatacccttagatgtcattacaaaatctgacagatcaacaccatctggaccaaatctaatatttccttcaccgtgaactatctgaaatgtgaccttatttgacat

SEQ ID NO: 4507 - DNA, 402 bp, Oryza sativa
  unsure (1)..(402): unsure at all n locations
  Clone ID: PAT_MRT4530_11385C.1
ntttttttttttttttttttttttttttttttgggtttttgttttttttttttttttttttttttttttttttttttttttttaaggaataaaattcattttggaccctttttataaaaatttttagccggagcttccattttttttattaaaatatgcctcacccaaaaaaatttttttgtagcaaattcccctttttcattaaattaaaaaaagattaggtgaaaaaaaaacaaaaaccgagcccggccggtaaaattaaaaaacctttaaaaaactgggaacccacaaaaaaaggggggagacatttttttattcaagattaacaatttaaccaggcttttttttaccattaccgctttattgccaccaaaattctttaaacccgggggctttttggcc

SEQ ID NO: 4508 - DNA, 6341 bp, Oryza sativa
  Clone ID: PAT_MRT4530_11386C.1
ctaaatatcaacatttgttagttgcatacccctagaataatcattatagccattgaattgaaatccagtaattccactttagcaacaactgagcttttctacattttaaacaggaacaatatagagcgaagagaacaacgtgggcattggattttgccgattgaatcatgagcacatttgcataatcagaaaccgaacggtgcaccatttcagtaacattggcacatggaaaacccaaattgcagcatgcaattggaatttgcacaggaacagcagcacaacgcaggggacgcatgccatttgccaccctgacacccaaatttatctgggtaactagatcgctcctcaagccagtgcaacccatcataatcctcatgaaaacatgcaacttaacaagtgctgaccactctggtgatcttcaaattctccgatccccataaacagtcaatgtaaacgctaagaagcgatagtagtttcagcttggttgcccagatccagaacttgtccacaacagtttcgcttggttgcccagttcagaagttcagtgaataatcccaaattttactctgatttgtatgacgcatgcatccagaaagggcagcaaccttgttgtagtcaggaccatttttcagctcaaactgcttgcctaataatggatggccttctatcaagaagaaagctttaagtgatacagggagaccattcctcggcagtgccctaagttgagtgcatcgaccaattacaagaatctttagtgaataaaaggtgctcatatcaggcagcgatatgagagcagagcattctataaccttcatctttctaagggaaacaagttcattcaaatcttctagtgatgctagcccatcacaggattcaattctcaattcctccaaagctgtgtggcaaccagattgatatagtcgtgtcacttgggggcaacttcgtaaaagtaaaatttggagggatggcatgttatccatgtctggtacagattccaaattatcacaattttccaatctcaactctttgagggagacaagggattgtgatccctcgagtgacatcagccaataacatttgtatatgtttaattgtctgagcatcctcaactggtgcatgcttaatgataattgagatggcattccaactgtatcacaaggtccaaggtctagtgtgtcgaggcatacgaggttgttcagcaacttggataaagaacttgctcgcaactgacactttattagttcaagacgttgaagtgatgtaggaagcacagtaaccccatcctcatcccacaatgtgctaattatggggtatgtattctcccaagatgatcctaaaccaaatattgtgagctctttgagttgcttcatattattgaaggctaccttaggaatgtctctcaaatgatctacgtagatcttcagcttttcaacaaactctaggtgatgaacacgcaagacatagaagaagcttgacaacaggcagcaaaatgatcttgtgagttcaaagttgtccataaaaaccttgaagtggatttgttccttatcaagtatagcaatatgtctgagggtacgcacataggtcgggtattctcttaaccttgggcatccagaaaatgagagatctctgagagcaggaaacaactggtcgttctctacaatactccattctagtttgggcaagcgttccagcagcagtctctccaatgaggggaatcctttacggcccaagaactcctgatctagtatttttaattcatccattctccgaacttcaagagctttaagcaatggtagatcccctaaaggtggaagtacctcccattttttacaatcacgtaagcaaatcaattgcaaactgctcagccaaccagaattcaaccaggtgggagaagtagcacctggatatccacttatagttagctcgacaagattagggtgcggctttagcacattaagcacatcacaaccattgctagtgtgaccatcatggtcacccgatccccattctagctccagctttcttatgtgcttctttagctcaagattggccttagcagcttcctcttttgttttcacattctccagcaatctaattgcaagctctccacgaagttcattcagatccttcagcccaacaatactttgccccttcttgccaacatgaaattctcctgaaccttcaacacatggaagttgatgcatgcctgttagcatgagagcatatgacttatccagcacccgcacccccttcagcttggcaagtataccatgagtgaggctgagttttgagcaaaaccaagacttgttaaaaatcggactgccatgttcaatcctatggcattcgcccccagaaacatgaagtgccagatcattcaatacatcatgcataatatagtaaatttggtctccacatcggaacacttggaaaaatgagcgctgtagcaaatcattgaaatagcctctgccaatatcctccagactagtattgatatttctgtctgaatgaacaaaaccctgagctgccacatatggatcagccttaatggctagagctgagccttttaggttttcaacaatttggtcctcaattatcttcaactctgggtaatcttctggattcctgtttccaaatgcacatttccggaagagcattctgctgtcatcttttccaaggccccatatcttcagatcaaaaatctcagtaatccgctcatcattgtaaatagcttgtgctagtgtagtcttgccgatgcccccaacaccaacaatagaatgcaccactgtattaaataatagttcatcaatctcattcttccgtccaaaaattgtatcttcacgcaaaagagatcctgtggctcttgctggagcatactcaggagactgactgaagctagagacctcccctgccataacttgagcaaacatctctgcggaagctctaactctgcccagtgtttttataacttcttgtaattttgatctgagcttatcaatgctaactaaacgcttgccaatagagagaacagatgagaacatgcctaggtcttcaatcttttctttgatcagatagtcaaactcatccaagacatcatcagcttcacagactgcatctttcatttggtgcaatgacatcacttgactactgtcttttctacttcgtctttccgctgcgccaaccaccaacaaaatctgtaccaaagtggactccaaattcttgagatcagacatcatctcagacttccaggtgaactggcttgatatataggactgcaccacagaaaccattttacgaatgataggtgaaacaatccatcctacagaactcattgctgaaaactcagccatgtaatcagaaattccctgatcagtattatggcataaattcttttttcccttccagaacaagaaaccataaagaagctgtagcgatacgtaagatatttttactggttcagagcaaatctcccctatgtaaacatagaagaccataccgtagttacgaccaggattcaggagatcaacctgatcagtgatcactgtattttgcaaggggggaccatcatctttttgctgatcctcatactgaaagctactaataacatggcagcaaaataaacaggctacaactacacggacaagcctagtataacttctgtaaatgatataaatgacttcttgaccatatcctatcgattcaccagcaaacaaacatgacggcaacatggcatacttctcccactcaacaccatgttgccattcaaactgctcctctagcaatggatggcatccattcaaatacaaaaatttaagggtcagaggaagaccatcttccggtaaagaaacaatttcagggcatttgtgtatgatcatgactctgagggagaagaagtcaaacatctcaggcaaagccactaacttcaggcaatttctgatctccagtttggaaaggaaagaaaggtttctcaagctcctcagtgataccagtttgttgcagtgctctataagaacctctgtcaaggttgttaggtgtccatcctcttgtagttcattcaattcggggcaatcttgtatgatcaagttcttgaggacaggaaaatatctgaagtccaacaacgatgttatgttggggcaaccaacaattttcatttctgttaaactcgcaaacgcacggtgtaaatcagcataccagcagataaatggtccttggtgggatggaagattggggcctagatctctaagcccatcattcaccatgtctgctccgtcaaagctaatttctgcaatttccacagattcctggtgacatacgtgaaaaatacccgaaaggctagttaagctaacctccttttgagtaatacatgtgtccaggcgatgatcagtatgctgtgtgtaaacgatggtggatgggagcacttccatttttacaggtggaggaaagactggtggcagttctttcagctttggacacctactgatgagtacatcgtgaagaacaggaaaagcataatcgattgaagaccaatctgccaattctggcaattctgtcaattctagtgttttcagggagggaaagccagcatctccatagaaagatgtgccgatgcactctaatgatttcattccatcaatatgaagttccctgagagatggtaactgacaggcacgaagaaggtcaactctttcagccagtatagacagatgttgaacttctggaaaaatctcttgaggttcattggcttctactctgtaacacttaccattggacacgtggacagcaagatcattcatgaggtcatgcataacataatgcactgtacctccatatcgaagtgcctggaaaaatgatcttgataacaactcatcaaaataacttttcccagtgcttgtcaagcttccataggtgcgtccacgatcctgaataaattcatgagctatccacatgttaaccaacatgtcaggctcgaaataataaccttttgggaacaaaccacagaacgaaaagcattgctgaaggtgctctggcaagcattcatagcttaggcgtaaaattgtcataatatctttctcattcgatagaccactttttagaactcgattccattcttcatagttgaagtttgaactaagatgcccaccaacagcctttatagctaatgccgatccattcaatttttgcacaatgtgttcacctatagacttcaattcgagatgttcatttggatctctagtgctaaatgcacatcttctgaaaagttcccagctatctttactctctagaccactcaaacagaatggagtggcacatcctaatgtatttgcaacaatacccattcgagttgtaactaaaatcttgattactttcgccccatgccataaaggagcaaacaattctctccatctatcagcatttatgggtaccccaaccttttcatcataccaaacatcatccaatacaagtagaaacttcttcatggttattttgttcttgagttcttcttgcagcatgctaaaattaaaattcgttaggtcaatgcttttatcaatagttgttaggatttctttggtgattctgaccttatcaaagacatgtgatacacatacccatgccctcatatcaaaattatcctcgattcttttatcattgtaaataagttgagctaaagtagtttttccaattccgccattgccgactatagtaattacctctaatgatgttgaccttgctcctttgcttctagattcaggtttgtcagattgttccagcaattggtgcactagttcttcccgttccttctgacgaccaactacaaactcaccaattgaaatcgagctggagatacgccattgaaggggctcaggtaacatgtgtgaactaaagttttctactcccatcaccctgacgagcatatgggcacattcctttactgtactcaagcttttgagcatctttcccaatttggaccgaaacttgtcatggccaaccaaacgcttggcaatagagatagaactggagcctaagcttcttagctttctcttttgagcattcgctttcagaaacatgtaatcaaattcatccatgatgtcctcggcatcgtagacagcatctttcagctggcggagtaaagcttgctgattgcaatcaagtgttctccgcctttctgcagtgcctactaccaagagaatttcagttaaaatagtctccagctttttaaggtcatccaccaaattggactgccacttgtactgagttgatatatatgattggaccttctcaaacataagcttgatgacaggagatactacccatccaactccagtggctagtggtaaagtggccat

SEQ ID NO: 4509 - DNA, 1212 bp, Oryza sativa
  Clone ID: PAT_MRT4530_11387C.1
atgtcgacttccgccagcccgtctgccgcgccatcagccgaatacacagagcatctttccaatctgattgcaattcccagtctgtcacatgagcatcagtatttccttggtccgatcggcgactccgaccccattgagttcattagcgccgaaaccaataggataccctttagattggccaacccaaatctagaatcttctcctcctcgcaaaagcaatagcggcaaggacatagaatatgctccaggccttttaccaaatggaggtggtctagctccccctgtcatcggctatcatgcccccaggacctcaagtctactccaagggcaaataagagaaccagccgatgccggcaggaagaggaaaactaaggcatcgggtgttgatccatcggctctggctccaaagaagaagaccaagaagaagaaatccaagccagccgatgacttgcctaccttagatccatccatcgaacaagccctggatgaagaggaaatcgaggaagatgtcaaccaagtggcagccgaactgagtgacttaggagaaaaaacaccatcggcttcacccaaacagactcctccaactcctgctactccagctaacttttcaaggcctcctcctccaccttcgcctcctgcgcggccgatgccaagtgatcgtactccatcggctgcaggcagccacaacattgaagaggaagaacaaccagtggctcctgtcatcccagtcttagctgatctgttttcctttgacatcaaggattaccttgatgaaacagaagaagacaccaccagtaaagccatagcccctttgtcttatgatgtgagacggactcttgaagatatctctcatcggctaaaggcatcatcattggataacttggtggtcgactgtgggtcaatcaggactaggcttcaagaaattcaatctttgatcccagatgaactagccgatgcccttactccagcggtttatctcgaacaacaccaattcaagcgggagaaggccaagcaaagattagccgaacggggggagcgcaaggacattgaagtcaccatccaaattaattggcaactcgtgcacgaagaggagtccaaactcgatcaactgtctgaaggtccgatcaaatccaacatagatcagctcgaagctcaaaagattgagctcttggcacaacttgaagaaggcaacgccgagctggatttggagtag

SEQ ID NO: 4510 - DNA, 282 bp, Oryza sativa
  Clone ID: PAT_MRT4530_11388C.1
atggcggcggtggcgggactggccgccccgggaatggagagatgtagagagtatgatgtaccggacacaaacttcattttttccacagaaattcagcagtatggaggaattggaggcgagacgttcagtggttgtggcgagttcgtgacaggtggtgaaggaagttatgggtctcgcaaccgctgccttccccggcaacggcgatgtggggtccaccaagaagcctcaacggtggcgctggagcttttctccggcgatcatcgtgatgaccagaaggaataa

SEQ ID NO: 4511 - DNA, 1728 bp, Oryza sativa
  Clone ID: PAT_MRT4530_11389C.1
atggccgaccacatcgttgtgcgctacgccgggcttgtcgatcggcatccagcacgagttgtcaagccgccgtgcaccagcagggacacccactaccgggacgccatccgcatcaccggccgacaaggccctggccagaacacccagggcgctggtgttggtcactcccaggagtggagagagctagcaccgaaagtgccgagaaccctcgtgctcatcggcgccgccgagctgaaaagcctggcatacattgatcaaagccgccatcagcaagttcggaagttccagaagcatgtcgagttgctgcacgagcatctttccaatctggttgcaattcccagtctatctcatgagcatcagtatttccttggtccgatcggctattccgaccccactgagttcattagcaccgaaaccaacaggataccctttagattggccaacccaaatctaggtcactggaaaaatactttcaaatcttggccttcccttgagaaaagttctcctgagaaaagctggcccgtatggtacaagcgtgtatcggctagcaagcaggttcattgggacgaactaggaatcagccaagcccttgctcttactttagtaaattcagctaaggatgaacccctgatggcttctgcaacatacttctggtccaacaccctcaatgcctttatatttaaccaagggccgatgacccctactctgctagatatgttaaacaatgcatcggttaagataaccagtggatcagtagtcggtgctggtggcccttggtggttgttgcaaacatggcttaaccttgttgccatgaaggctgtgaatcggtcatctttgacatatgctgaatttccaaggctagaaccgattacaaatgatgatggagaagaactcacccaccgccgatgcatgtcatatggagaggctgcatccacaccagccgattctggatccaagttatcggctgagctactgagggactggttcttcagtttctatgatggttttcagaaagatgcccgagtttggtttgcatatgaagactcaatgagctttgaactgccatcagacttcatatttgaagaaatcaattctaaaaaatatgataagtctagagaagtcttctcggctgctatcagtccatgtattcttcctgttggcatccatcaagggagaaacatacaagtatcttatgagttctaccatcccatgagctcggctaggcagtttgggatgggacagctgccaatcggcttctattttgccgataaaattcaatgcagaggcaaaatctcatcaacattgatgatggatcgactgctcaacatcccaggaccccctttgggcagcatcgataatgtagaactagcaaggttcaggagcacgaactttgacaaatggtggggtgaatggaagcagcacttgttccaccaatcggcttccatgtacatgacagatctattcccagatgttatccctcagacaatagaatcctctcctcatcgcaaaagcaatagcggcaaagacatagaatatgctccaggccttctactaaatggaggtggtctagctccccctgtcatcggctgttatgcccccaggacctcaagcctactccaagggcaaataagagaaccagccgatgccggtaggaagaggaagaccaaggcaacccgttgttcccagatgttgctctactacgtacccggacagggaggacttaagtga

SEQ ID NO: 4512 - DNA, 1020 bp, Oryza sativa
  Clone ID: PAT_MRT4530_1138C.1
atggggagcagaggtggaagtggcggcgatggcgcagaaagccatggctatgccgcggacatccactccatcagggaggcgcaggctcgcatcgcaccatacgtgcacaagacgcccgttctgtcatcaacatcgatcgatgccatagtggggaagcagctgttcttcaagtgcgagtgcttccagaaggcaggggcgttcaagatccgaggcgcttccaattcgatatttgcgcttgatgatgatgaggcatccaagggcgttgtgacgcatagcagtgggaaccatgctgctgcagtggctcttgctgcaaagctacgcggaatacctgcttacattgtcattccaagaaatgcaccggcatgtaaggttgacaatgttaagcggtacggtggccatattatctggagtgatgtctccattgaatcaagagaatctgttgctaaaagagttcaggaggaaactggtgctattcttgttcacccattcaataataaaaacactatcagtggtcaaggtacagtgtctctcgaacttttggaggaagtccctgaaattgacacaataattgttccaatcagtggtggtggtttaatttctggtgtggcactggctgccaaggccataaacccttcaatacgtattctggcagcagaaccaaagggtgctgatgattctgcccagtccaaggctgctggaaagatcataacattgccttcaaccaacaccattgctgatggacttcgagcttttcttggtgacctgacatggccggtggtgcgcgacttggtggatgatatcattgttgtggatgacaatgccattgtggacgccatgaaaatgtgctacgagatgctgaaggtggctgttgagccgagtggagcaataggcctcgcagccgccctctctgacgagtttaagcaaagctctgcttggcatgagagcagtaagatagggatcattgtttctggaggcaatgttgacctcggtgtcctctgggagtctctctataaacgttga

SEQ ID NO: 4513 - DNA, 764 bp, Oryza sativa
  Clone ID: PAT_MRT4530_11390C.1
cgggcgcgccggcgccgtcgtcgtcgccgtcgccgtcggccaccgccgccctcatcttcatcccagcctcgacgccagccatggcgggcaagatcaagacggtggtggtgctggtccaggagaaccgctccttcgaccacatgctggggtggatgaagtcgttgaacccggagatcgacggcgtgacgggcgccgagttcaaccgcgccaccgccggcgacccctcctccccggcgatccacttcggcgacggctccgggtacgtggaccccgacccgggccactcgttccaggccatctacgagcaggtgtacggcgacgcctacacgtgggggaccacctcgcatgagcgggttcgcgcaggaggcggagaaggagcgcgccggcatgtcgagcacggtgatgaacgggttccggccggagaaggtgccggtgtaccgggagctggtgcgggagttcgccgtgtgcgaccggtggttcgcgtcggtgccgacgtcgacgcagccgaaccggatgttcgtccactcggcgacgtcgcacggcctcgtcagcaacgacggcaagcagctccgcgccggcctgccgcagcgcaccatcttcgacgccctccacgacgccggccactccttcggcgtctactaccagttccctccctccgtgctcttctacagagaagaacataagatggtatggagtacgtacctacacgaacgtccatacaaatagggtggggcccagtttagaggtagattggttgttttttt

SEQ ID NO: 4514 - DNA, 156 bp, Oryza sativa
  Clone ID: PAT_MRT4530_11391C.1
atgggccactcactgcaccacgggctggtaacggtggtggctggcttcggcgggtggacgaatggcagcggcgacctggaggccggcttggctccttgtcgagtatccttctccttcctccacctctccattcccccagcttctagaaccttctag

SEQ ID NO: 4515 - DNA, 857 bp, Oryza sativa
  Clone ID: PAT_MRT4530_11392C.1
cggacgcgtgggttttcaggatagagcaaagaatgaagaaatggcatacatcatctgctacaatagttctgaactaattaatcgtccctaaaaaaaatcatgaattagtagggggttatgagtgacgagtctttcatctgaccgagcaagcaacggcatgagcccacgacctgagatgcgccctcatggccgggccgtcgctcgtgcgcggcatcggcaaaggcgagcaccgcgccggcgcggcggcggcggcggcggcggcgacgcgcatctgccggcactgctcctgccacatgtccatgcgctcctcctcgaccacccggcctcttgcagccgcagccgctctcctcccgcctgccaccggcgccaccgccttcctaacgcctccgggatcttcatggccgcaatcgccgtccttctcgtggatctcaggagaatcccgctcctcgggctgcaactctccgggcccaggaggagggcacttcgtcttctccttgacaggcggcgggaggaggaagacgctggagaagaaccagagggagtcaatgctggcgaagaactcctcatcctcctcctcctgcccttccatatgttggggattcttggctgaaattctctgggattcggcgaggggggggggggaggaggaggaggaggggagaaacggttggagaccgaggagggatttgtgctgggagttcggcgcttcggccgcgttggtttgaactggagtctttcgagtgtaaccaacggcttggaggggagaattttcagaatttgccatcgaatacgcacggtttttaggatatgccatctaattcgcactactttcagaatacgccattgcctgcagcccg

SEQ ID NO: 4516 - DNA, 501 bp, Oryza sativa
  Clone ID: PAT_MRT4530_11393C.1
tatagtcccggtttcctaacgggactacaatctaggactaaagatagctatctttagtcccgggcgaaataaccgggagtaaagatctatctttagtcccagttgataacatcaaccgggactaaagagagggatctttagtcccggttggtgttaccaaccaggactaaagagaggatagggacaatcccggatggtccttttttttgttacttttttattttcttccgaatcggatggcatgcacatcccaaatcaaaccacaaatcccaaataaagtaacatctcaaatccacatcacaaatcccaaatccacatcacaaatcttaaaattacttatacacacaaatctaaaacatcacaaatcctaaaaaatttacgcacaaatcaaatacatcacagattatacatctcaaatccatacaatgaatcacaaaattacatctaagtgaatcacaaaatatcaaaaaaaaaagagatggtcgtctgcgccgcacgcct

SEQ ID NO: 4517 - DNA, 975 bp, Oryza sativa
  Clone ID: PAT_MRT4530_11394C.1
atggtctcctccgccctcccccgcggtgagccggtgacccacatctgcgtcgacctcgctgaccccgccgccgtctccgcggccctggcgcccctcaccgacatcacccacgtcttctacgtcgcctgggccccgcatttcttcgaggaggaccagaaccgcgaggccaactcccgcatgctccgcaacgtcctctccgccgtcgtccccaactgcccggcgctcgtccacgtctccctccagaccggcagcaagcactacatcggaccacccgagtccatcggcaagttcaccatcgagacgcccttctccgaggacatgccccgcctggacaactgccccaacctgtactacgatcaggaggacgccctcttcgacgccgtgtcccgctcccgccgccgcggcgccgccgtcatcagctggtccgtccaccgcccctccctcgtgttcggcttctccccgcagagcgccatgaacgtggtgtgcaccctctgcgtgtacgcggccatctgccgcaaggagggaggcaggaagctccggtggccggggtcgctcggcgcgtgggaagggttcagcaacgcgtccgacgcggacctcgtcgcggagcagcacatctgggcggccgtcgacccggcggcgaggaacgaggcgtacaactgcagcaacggcgacgtctacaagtggaagcagctgtggacggtgctcgccggcaggttcgggatggagtggtcggggtacgagggggaggagagcagggaggggctggtggcggcggcggagctcgaccaggtggcaaactggtggttcgtggacgcgctgttcatggataagtgggagttcctggacaccatgaacaagagcaaggagcacggcttcctaggcttccgcaacacggtcaagtccttcgggacgtggatcgacaagctgaggctctacaagattgttccttcgtgccgcatcgtatcatctctctga

SEQ ID NO: 4518 - DNA, 301 bp, Oryza sativa
  Clone ID: PAT_MRT4530_11395C.1
gcgctcacgcgtccggatgcgaatcctgatggtggggctcgacacctccggaaggaccaccatactatacaagctaaagcttggaaagatcaaactcaccattccaacaactgggtctaaagttgaagctgtggagtgcaacaacattagatcaactgtctgggaagggtgggtcaaaacacgaacagacctttatgtaggcattacttagagaacacacaggagcttatctgtgaagctgataacaatcacacagacacgcttaatgaagctagatatgatgctgcacaggatgctgaat

SEQ ID NO: 4519 - DNA, 276 bp, Oryza sativa
  unsure (1)..(276): unsure at all n locations
  Clone ID: PAT_MRT4530_11396C.1
gggggantaaaaattaagtgagctttctacatgaaaatgcaacgggtccgttactatttatgtacattcccgcatttcttcggatgaaaacataaaactgggggtactgatcagcaaatctacatgcataaactacatgggaggaaacgcgatgggtcttaacagggaggcattccagtattgtaccagccgaagcccctaagagcttgaagagaccacaccgattagacagagtggagcacgatatgtcgacggcgccaaagaaaaaaaagatgc

SEQ ID NO: 4520 - DNA, 1629 bp, Oryza sativa
  Clone ID: PAT_MRT4530_11397C.1
atggggcggcaggtgcgcaagcacgagggctcgcacggcaaggtggacgcgccgccgccgaagaagccgaggagcaccgagcggccattggcaccgctcgccgccgccacgacgaccgccaagccaaggcgtgacgtggtgagacccgcggcgaggaaatcctcggcttcgagcgatcgcggccccgtcgcccccggcagcgacctcgagacggaagggcagctggggcacaagcacgagtgctcgcacaacaagttggatgtggggctgctgcccaaaactccaaaggactctgaccgtctgggaactcctcttttcgtgtctggtaatcctggcctccatggttcatgcggctgtggccctggcagcgaccttgactctgatgattcagatggtcttggctgcttgacccctgacagcacgaaagctacgcttcagcaggatgattatgggaaaggggagtactctccgggtgtggttctatctaagactgtagctgatgtacaggacctgcctgttgaagatttgagggataatgaagtgatcactgtggatagtgaaggccctggcaagcctctccagtcaattccccttgttcaagacaaggatgcaatacaacttgcgagaacttttgtcaatgagaaagtcaaagagctaatggaaggtgtctcagagccaggagtcctgcagagtcgtttgtctaaaatcacctcattccttgttcaggccacctctatagctgccggcctccatgatgaagtccctctacaaatacgtggacaaactgctgctttggtgacccaaatctcagggcttgagcagcaggtggaggagctgtccaagaagctgtgtagcactgaggatgagcttgaggtgaccaatgcaatgttgaaagagacccaggctgccatgctagaggcacaatcagaccgagcgaccgccattactgccatgaacagccttgccatgcgcatgggagcttcattcgctaggctgggcacaatactggaccccccacccaatgcggctgactctctggagaagagcattaagcagatgacagccctcgtgtctctcctcggccctgtgtctcacagccatagcttgagtctagccaggagcagcctgacggttgggattgcggcattgctgtgtcgagaaaggggcattgagggcctgcgcgagccgtcgggtatggatacccgtcagtttgtccgctcgcaggggcctgagttccactccctgatctctcaagttgtcgactccatggagcagcggttggccaagatggttgaaggcagtggatggagagattctggagctaccaaagagccaggaaaaccagcagacactcagctcactgactgccagtatagtatgtacagagctctggcagtctggatcctgcaatgccttctactcccccaaggcggcttccactcgtgccgatatctgcaagttcttgctggggagctgcataggaaggacgccccctcccaccccacggccgtcatcgacccctgccggccccatcccctctgcatcgccattagctctgccatcgaccaggagatggacctcctcttcaccgcttctccgccgtccttttgccagggccaccgacactag

SEQ ID NO: 4521 - DNA, 294 bp, Oryza sativa
  unsure (1)..(294): unsure at all n locations
  Clone ID: PAT_MRT4530_11398C.1
atgggggcaacaaaagaggaagaccgacgaaacaggcgcaacgggggggaaaaccggaagcagcgtaaagaaaagaagcaaacaagcggaaaaagcgcggcgcaggaagcaggaaacgaaagggaagaaggaagagacagggagaaaancccaactcccagttcattttatgagagagctccacccaactccactcccagttttggtggagctgaaactatttggctgagctccagctccagaaggggtgaagctggagctggagctctgaaattgaaagaggagtccatataa

SEQ ID NO: 4522 - DNA, 570 bp, Oryza sativa
  Clone ID: PAT_MRT4530_11399C.1
atgggccggtcggcccgagaaggcggcccaaggcacgcgcggggagagggagggggagggggaaccggtgggccaggtccaccttgcatggtcccgagtgggacccgcttgttggcggctcggctcaccgtggcaccgacgtggcgtctacgtggctgccacgcgggccggcgggaggaagacgacaacgtcggccggaacggacggcggacggcggcggcgagcggcggggagatctacggcgatgcaggcgaaggtgagcacaccgggaggttgcacgggacgaggggagacgagctaatggctcggattcgccggagaaagctcgacggcagcagattgcggcggcggcaaccggcggcgagaaaagagggaaacggcgacgacgcgactagggttcgattcctccggactagagcatctacgcggtcaccggagtccattcctcgcatcggattgagcggagctacaacgagggaggccggcgatgagaggcggctaccgagcacgggcggcggtggcggcgagcacacagcgagcggcggcagccgtcggggcggcgccagctag

SEQ ID NO: 4523 - DNA, 676 bp, Oryza sativa
  Clone ID: PAT_MRT4530_1139C.1
gaggtgacgaccggaaaaatacgaatatttatattaagttatagatatagatttgacccaaatccgtacagtcccatgccgagctggtccgtaagcccaattgcaattaatgggctcacgtccgtcgagtagggagcaagcaacaaatccaatccaaaacttagggataaaacaaatttcccaacatgatacaaatgcatatgagaacagcaaagaatgatgaatgatatacacaatgcgaaatcgatcctcagcgcagtaccaccgacccaaattacaaacgaacgcgagctgaaaaagaatataaaaatcccactaattaattacaccgagaatgagagatccaccactagactatcaaaagggaggaggaggagatccaagaaggagaaggaacaccatggcgacgaagagatctctgcataagctcagaagagcttgtaggcggaggaggcgtcgagagggtggatgaggtaggtgagcaccagcgccacgatcatcagcaggtatgcgatcccttgatccaccgacgtcccgtcgctggtgggagacggcgcgggcgcctgtgcagccgcggcgatggcgaaagagaggatggcgacgacgatggcggcgaacgggatcctcgccatggcgaacgaatctgagatgatttttgcagatgctgatatttccc

SEQ ID NO: 4524 - DNA, 945 bp, Oryza sativa
  Clone ID: PAT_MRT4530_113C.1
ggtataccaattactacataaagggtaaggatggttgcccatgcccattgcccgtggacgccttatacccacggacgtgcccgttttccccccaccacaatacccctcgccctctcctgcagtttttcttcttctcctccggcgaacaaaagaggcggcgctgctcggggatggaggaggagcggccgtgtcgcagcgccagactcgacgacgagccagagaagcgcggacgacgcgagccggcgcaggtagtacgacctggcccccgcgctctccccgcaccgccccgtctccccgcgcctcctcggcacgctcctctcccgcctccccgacgcgtgccgcggcgtcgcgctgctcgacctcctcgcgccagacctccccacctccgcgctcctcatcctgtacaacctcctgctctgctccacgtgccgcgccgggatgctccgcctcgcctccggcctcctcctggatatgcgggacagaggggtcgccgccaacgcgttctcgtactccacgctcctcgcggcgctcacccgcgcgggccacctcgaccacgcactcacctttctgccactcatggaggacgacgccgtggctcccgacctcgtgctcttctccaacctcatccacctcgccctccgggagggcgacgcgcccaagggcgctcgcgctcttctcccgtcttcggggcgcggggtggccgccggattcagccccaccctcagggcctaccacggccgccatcggccgggtactggcaggtccgaccttgcttctgggacacccaacggggtcctccttccaggactggcctttggacgggggcgtcgcccgacccgggaggcttaatcccccaggcgccaggcctgtgtcacccccgacgggggacccctaccacacctgttctccgcttgtaccggtcaccccgcgcctgtctgtggaggg

SEQ ID NO: 4525 - DNA, 5278 bp, Oryza sativa
  Clone ID: PAT_MRT4530_11400C.1
atgatttctaatctgaatcctatggacatcgaaaatatcctcatgaatcgttttcgccatgacaactatatttattgctcagggcaatacaaggaggtgcggattcactttgtggatccacaatatcaaaggcggtagccacctagcagcgatctctacaaccacactttggatactcataccatttaggtaaatctaatggattgttcctacagtctaagcttgcaatttgtacccgatgttcgtactctatccaagcctaaatgaagatgaaatcatcatcgacaatgttaggacacacgaagcatctttgtcctcaagttcgttgccttacataccttattacctgacaacggtcaccacaacgacactccggacgctcacgccacatggggagtcctaggggatttacgtgccattctaaagcctcagcagcaattcgacgttcatgctcatccttccaccttaggtagtccgatcttgtttcactacgtgggtaagcacgggttccgtcgttttgtgggttctccatgtctacccactcgatgaagttgcacattggacgatatgtcgtgaagcgccgaaagtgtgttgtcatgagcataagttgttctagcaccatatgaacgaaaagaaccctgtccctcctaccctgcgccctaatgtgcccctgggagtacgtgagtcggtccgggggtacggcacggccaacccgtcctgcctgtacaggtgtgacctctggctgctcctgagtgtgcgcctctggagctcctccaagctgagaggagcctagtacgtcgtggtggtgtgcaccgtgcaagttgtcgtcgtagaactggctagtaggaccagtcctaccggcgtgagacgaagaggccccagtaccgaagatcccggctgcaaatcctgcgtgcgaaacaggtaccgtaggtcgaggtcctgctccgacggtaggcgcgcgaggccgtggttgtaccggaccagctggaggtacgacgtccacggcgctgcgacaggagaagatgcgcatgaccgcacgcatcttctcctgcatccggtcgaaggtcatcctctgctcaacgtcagtcaagtgcaaacctctgttcaacctcacttggactgcggtgatatcggcactgatatcccgtgcagcatcagcccccacgaagtagtctcggtcacggtgcgtgggatacgcgtccgtcacagcggcaacgtgcggctctggggcgtctggagtgaaggtcacacgcgcacgagtgcgaggaaggtaccagcgaaggtagtcacggtagttctcctccgtgtgtgggaagagctcgttgatcgcctcctctgtagctaacacccagtcgtcaacgtactgctgtacacgtggagcccaaagtgcgcctgctagctgtccccgtcgagtcaacgagtggtcgacatggaggacggtcggctgcacgttgcccggaaacacctgcctaagtccgaactgtctcatcacacgctgcgggcagtgaggctcaacgaaaatgtcgaacaccatcggcaggatggtgagccagtaagcctggtcgcgtgtgcacaacgacgaaagtcctagcggtgctctcgcagcgacggcctcttctgtgtacggctcccaaatgacgtcgctcggctggagacggtcaaactcgaacacgaagtccgggtaacctcgtctcacctggacgtgagcgtaacgacgcccacgtcgacaccagtaagtccccatcgtgggaccgtcctctggccactgcgcgctgcgaccaaccccgtagggtgcgctgtccaccactggtcgacctatggcaaacctctcggctgcccaaagctgaagcaacatagggcagccagcgatgatcgctcccgcgtcagtcttcgtgcacgcctcacagagggcacggtacgtggctgctagcacggcagaaccccagctccactgcggcacgtcctgtggctgagcatccgcgatggaccgtgcgtagtggaccagccggaagtccacagcgtgcccgtgggtgctagtgaacatcacccacccgaacaaccacaacaggtacgcctcaagggagcgtcggaccgagttatcattagcgtcagggtgcagaaggtccgcagtgaactggagcaaccaagccttgctaggcccgactgtagagcacggaggaagggtgttggccggtcctaggtgtggaaggcgcatcacctgctcgaagcgcgcagtgatatcctccttccacccaaaaacaccgtccacgggaccaactggtgctcccgccagcggtagcccgagcaggtacgacacgtcctgcagtgtcggagccatctccccacagggaaggtggaacgtgtgcgtctcaggtctccagcggtctaccagagcggcaaggagtgaccggtctgcatcccaccgcttcgctgggtcacggttgtccgccgccgcctcaacaagcctacaaagtggtagaaggcctgccgcacgcaaccaaggaacgtgacgggggtcgacacgcaaccactcgcgcgacgtgcgtggacggaaggtgccgagctgtgcaccctcgactgctgacaggaacgagcggtggttcctgtcaatcccacggttcaacagcgccggtgtgtcgtacgccataccatcacttgcctgtccagatggactagcatctgcgccgcttggaacttctgcattcttcgggcatttcttgtaagtatggccgcgcagatcacacttgctgcagcgtaaagtcctcccacctgcttctgactcatcaatatcatttctgatgcgtctagtttggcgtcgaccctttttcacccttaacttagatggatctggaatgtaaaaaacttgggcactcagcgttgtgtaagatcctgagatcccgaacccatatatctcctcactccatgtatgaaagattgcttctttcctgaaataatttgagacgtacacattgggagatatgccacaatcaccggcagcagcaagaacgtgtgagcaaggaaggtgatgaagcttcggcttcatacaactgcaggtacatccaccatccgccttcaagacacattcctgcacggcttgcttgcgatagataccacgcctgctcctatcaacacacattatttcataccgatgcacttgtgtgccttgagcaacaactctatgtctccgtgcctttttgattttatcttccatgtactttgtcactacgttgccaaacactatgttgttatcggccatggacggaccaattttcttgtatcgatcactaaagtacgcttgcgtgccgtgaaggatgaattcaacaatagcaaccaatggaagtatccgaactcctcgcattacccagttgtacacctctgccaaattggttgtcattatgccataccaagatccatcggtgtcgaacaatagagaccacttctccttaggctcattctcaatccactgagtgaaatttctgatggacgaccctgacctccttctcattgttggtgggtcatcatgtaatgcaccaagaggtatgggaggctcgtcaccttcaacttgtggtctgcgagattgctcatctgtttgcttcgttgtcaactcatccaacttgtcccacaactcattaaatttcttctcttggttctgtgcacagagcctcttaaagagctccataagatgcttgttcttgaattgcttgtagaaatttgcacccatgtgacgcatgcaccaccgactccgaacatcaggccacttagctggaagtcccttctcatcccaaccgttctgcaagtagtcaatagcccgcaacatacccgcatgacgatcatgtataaggcaaacgttgggcctcatacgcaccactgcaatgtgcactctctctaggaaccagtaccagctttcagtgttctcactctctataaatgcaaaagccataggtacaacctggttgttcccatcacacccaattgctgtcaatatctgacctcggtatttacctgtcataaaagttccatctatgcatagaacaggtcgacaatgcacaaaagcattgatgcaagcacccaatgagaaaaaggctctttgcagcacactctttgttcgatcatcaaccgatgtaaatgtatgtaggtcatagtaagtattattattcctctgggcaatggtggctaacaaacgaggcaaattatcataagaagcttcaaatgtgccatacctcatctcaataatcttttgtttggctctccaggcctttgcatagcttatggtgtacttgaatttgttctcgatgtgcctaataattgattttggttcaaagccaatgttaccaacaacactgctgtacatctcacttgccacaaaagctgaagtgatgtttcggtgatacttctccaccccttgtaagtagcacttgtgctcggtcacaatactaactttccaataatcattccatttacccttatatgcatggacacgccacggacaatcttccttcatgcatctcacttcatacacataatttgttgacttgaccaccctaaactctctctgcaaggaaactgcccaatgcttcaccgcctccttcatctcatccttatgagcataccttgcaccgtcaattacctcgttctccttatactcccagggtacatgatcaccctctgatataacaagtccagagaagtcctcatttgcccaatcagtggccattacatcaccttcctcatcggatgatgcgtcgtcgtccgcttcctcattatccgaatcttccctctccatttcatcaacaattataccgactctctccccctcatccgccatgcccatggcctgcttctcccttggttgattttcctcattttgcatcgatggtccaacaacatcccctgcattgataggaccctctacatcttcggtttgcattgaaacatttatatctttctcttgtaccgacacaaatataacgaggggccatgaccgttcaaaagccatttccacataccgtctccaagcagcagtgctgtccatcggcattagttcccaaaaataaccttctgttgcacgactcactacaactgatactgacattgtgtagacttcttggtctattctaaatcctctcaacaaccaactataaattgactgaaatgttctctccgcaggcctatcgatgcccttagatgtcattacaaaatctgacagatcaacaccatctggaccaaatctaatatttccttcaccgtgaactatctgaaatgtgaccttatttgacat

SEQ ID NO: 4526 - DNA, 5329 bp, Oryza sativa
  Clone ID: PAT_MRT4530_11401C.1
ctagtcagcaacggggtagtggctgtcctgcacggggacgatgtcacccggaggcggcgaaggcggccgagttggagctataagcccccagtcgacgacaaagtggctgtcccggcggcggcgtaggtttcggctcggaggtgcaagcccccagtcggcgacgaggtaaccatcccggtgacggtgtaggcggctggcctggaggtgcgtgcccctagtcggtgacgaagtagccgtcctggtggtggcgtaggcagccggcctagaggtgcaagcccccaactggtgacgaagtggtggccgagtaagatggccctctagagcacatctccttcggcggtacggcgcgaggtcccgagtacggatacccaaacctaggcctcgctcctcggataaatcctccatggtgacgggcatgatgttgctgggatataacacattgtgcttgaccatgatatcgatgttgtcgttacctattggagtaagcaaaaattgtgttggcaacttttttgtcacgcggccaatcatgatgacaataatgctttgcggtgatatggagtcaccagccaccttgatcacaaacctataaagagcattcacactctcacggtgaggacagacggctttcagtgcgaaccgcccgattgagatgatggtatcccttctagtggaacggaacggacgcaacctgcgccctaatgtgcccgtgggagtacgtgagtcggtccgggggtacggcacggccaacccgtcctgcctgtacaggtgtgacctctggctgctcctgagtgtgtgcctctggagctcctccaagctgagaggagcctagtacgtcgtggtggtctgcaccgtgcaagtcgtcgtcgtagaactggctagtaggaccagtcctaccggcgtgagacgaagaggccccagtaccgaagatcccggctgcaaatcctgcgtgtgggcgagggatcgacgctccgtgagaggaagagctggcgaacgcgcccgaagaggtggcgaacgcccctgcggagctcgtggaagcgccggtcgtgcctgcgaacgcgcttgaaggcagacgaggtccggaccagctggaggtacgacgtccacggcgctgcgacaggagaagacgcgcatgaccggacgcatcttctcctctgttcaacctcacttggactgcggtgatatcggcactgatatcccgtgcggcatcagccgccacgaagtagtctcggtcacggtgcgtgggatacgcgtccgtgacagcggcaacgtgcggctctggggcgtctggagtgaaggtcacacgcgcacgagtgcgaggaaggtaccagcgaaggtagtcacggtagttctcctccgtgtgtgggaagagctcgttgatcacctcctctgtagctaacacccagtcatcaacgtactgctgtacacgtggagcccaaagtgcgcctgctagctgtccccgtcgagtcaacgagtggtcggcagggaggacggtcggctgcacgttgcccggaaacacctgcctaagtccgaactgtctcatcacacgctgcgggcagtgaggctcaacgaaaatgtcgaacaccatcggcaggatggtgagccagtaagcctggtcgcgtgtgcacaaggacgaaagtcctagcggtgctctcgcagcgacggcctcttctgtgtacggctcccagatgacgtcgctcggctggagacggtcaaactcgaacacgaagtccgggtaaccacgtctcacctggacgtgagcgtaacgacgcccacgtcgacaccagtaagtccccatcgtgggaccgtcctctggccactgcgcgctgcgaccaaccccgtagggtgcgctgtccaccactggtcgacctatggcaaacctctcggctgcccaaagctgaagcaacatagggcagccagcgatgatcgctcccgcgtcaatcttcgtgcacgcctcacagagggcacggtacgtggctgctagcacggcagaaccccagctccactgcggcacgtcctgtggctgagcatccgcgatggaccgtgcgtagtggaccagccggaagtccacagcgtgcccgtgggtgctagtgaacatcacccacccgaacaaccacaacaggtacgcctcaagggagcgtcggaccgagtaatcatcagcgtcagggtgcagaaggtccgcagtgaactggagcaaccaagccttgctaggcccgactatagagtacggaggaagggtggtggtcggtcctaggtgtggaaggcgcatcacctgctcgaagcgcgcagtgatatcctccttccacccaaaaacaccgtccacgggaccaactgctgctcccgccagcggtagcccgagcaggtacgacacgtcctgcagtgtcggagccatctccccacagggaaggtggaacgtgtgcgtctcaggtctccagcggtctataagagcggcaaggagtgaccggtctgcatcccaccgcttcgctgggtcacggtcgtccgccgccgcctcaacaagcctacaaagtggtagaaggcctgccgcacgcaaccaaggaacgtgacgggggtcgacacgcaaccactcgcgcgacgtgcgtggacggaaggtgccgagctgtgcaccctcgactgctgacaggaacgagcggtggttcctgtcaatcccacggttcaacagcgccggtgtgtcgtacgccataccatcacttgcctgtccagatggactagcatctgcgccgcttggaacttctgcattcttcgggcatttcttgtaagtatggccgagcagatcacacttgctgcagcgtaaagtcctcccacctgcttctgactcatccatatcatttctgatgcgtctagtttggcgtcgaccctttttcacccttaacttagatggatctggaatataaaaaacttgggcactcagcgttgtgtaagatcctgagatcctgaactcatatatctcctcactccatgtatgaaagattgcttctttcctgaaataatttgagacgtacacattgggagatatgccacaatcaccggcagcagcaagaacgtgtgagcaaggaacgtgatgaagcttcggcttcatacaactgcaggtacatccaccatccgccttcaagacacattcctgcacggcttgcttgcgatagataccacgcctgctcctatcaacacacattatttcataccgatgcacttgtgtgccttgagcaacaactcgatgtctccgtgcctttttgattttatcttccatgtactttgtcactacgttgccaaacactatgttgttatcggccatggacggaccaattttcttgtatcgatccctaaagtacgcttgcgtgccgtgaaggatgaattcaacaatagcaaccaatggaagtacccgaactcctcgcattacccagttgtacacctctgccaaattggttgtcattatgccataccgagatccatcggtgtcgaacaatagagaccacttctccttaggctcattctcaatccactgagtgaaatttctgatggacgaccctgacctccttctcattgttggtgggtcatcatgtaatgcaccaagaggtatgggaggctcgtcaccttcaactagtggtctgcgagattgctcatctgtttgcttcgttgtcaactcatccaacttgtcccacaactcattaaatttcttctcttggttctgcgcacagagcctcttaaagagctccataagatgcttgttcttgaattgcttgtagaaatttgcacccatgtgacgcatgcaccaccgactccgaacatcaggccacttagctggaagtcccttctcatcccaaccattctgcaagtagtcaatagcccgcaacatacccgcatgacgatcatgtataaggcaaacgttgggcctcatacgcaccactgcaatgtgcactctctctaggaaccagtaccagctttcagtgttctcactctctacaaatgcaaaagccataggtagaacctggttgttcccatcacacccaattgctgtcaatatctgacctcggtatttacctgtcataaaagttccatctatgcatagaacaggtcgacaatgcacaaaagcattgatgcaagcacccaatgagaaaaaggctctttgcagcacactctttgttcgatcatcaaccgatgtaaatgtatgtaggtcatagtacgtattattattcctctgggcaatggtggctaacaaacgaggcaaattatcataagaagcttcaaatgtgccatacctcatctcaatgatcttttgtttggctctccaggcctttgcatagcttatggtgtacttgaatttgttctcgatgtgcctaataattgattttggttcaaagccaatgttaccaacaacactgctgtacatctcacttgccacaaaagctgaagtgatgtttcggtgatacttctccaccccttgtaagtagcacttgtgctcggtcacaatgctaactttccaataatcattccatttacccttatatgcatggacacgccacggacaatcttccttcatgcacctcacttcatacacataatttgttgacttgaccaccctaaactctctctgcaaggaaactgcccaatgcttcaccgcctccttcatctcatccttatgagcataccttgcaccctcaattacctcgttctccttatactcccagggtacatgatcaccctctgatataacaagtccagagaagtcctcatttgcccaatcagtggccattacatcaccttcctcatcggatgatgcgtcgtcgtccacttcctcattatccgaatcttccctctccatttcatcaacaattataccgactctctccccctcatccgccatgcccatagcctgctcctcccttggttgattttcctcattttgcatcgatggtccaacaacatcccctgcattgataggaccctctacatcttcggtttgcattgaaacatttatatctttctcttctaccgacacaaatataacgaggggccatgaccgttcaaaagccatttccacataccgtctccaagcatcagtgctgtccatcggcattagttcccaaaaataaccttctgttgcacgactcactacaactgacactgacattgtgtatacttcttggtctattctaaatcctctcaacaaccaactataaattgactgaaatgttctctccgcaggcctatcgatgcccttagatgtcattacaaaatctgacagatcaacaccatctggaccaaatctaatatttccttcaccgtgaactatctgaaatgtgaccttacttgacat

SEQ ID NO: 4527 - DNA, 1134 bp, Oryza sativa
  Clone ID: PAT_MRT4530_11402C.1
aattgaggtgaaactttattctgaaacaaactgatccactaatgttaaaaacagaccttctgtatcaccagattcctcgttctgtcctggtgtggatgtacccaatccttgtgaactattagtgctagcaacagatatgtggttaccaagtcttgcagactccatatgtgtctggaacacactttcctccatggacagtgagtgtccattaacattcattattcaatcatctactgaattaaggagctgatcctcatctaccgataactttcttaaagctttagacagcagcgtatatctggtgactacttgcctgtagagctcgtgcaattgcttgacttccgctggagtcaagctttcagtttcagagtccatgaatgggaatttcaatccttctgtatcaccagattcctcgttctgtcctggtgtggatgtacccaatccttgtgaactattagtgctagcaacagatatgtggttaccaagtcttgcagactccatatgtgtctggaacacactttccttgattgtaatgtaaataagaataggaagaaaatcatcagcccctgatagtgttcgatcatttgacattgacacatttagcagcaagttattgatgacttggcaacagctcatgatgcaactaagcttttctcgtggtgatttgaaggaattaatcttttgcaactctttaactgcaagcagccacgctgcctcattgtgcagaagcttgggtatgtccaagtgatgaggcctgacaaagtgctgcaagagaccaatcttctccgaaatctccatgtcggatttcacatcctccgcggatgaagcgaaggctcgatcgaacaatttggtcatgatatacttctcaagcccctcgagcgcgttgtcgatttcctgattggtggcattggcccaaagcgggtggtccctgatggcggtctccatctccgcgaagaaggtctggaccctgccgccgtcgacctcggcgttgggctcgccgccctgggagagggacgcgaggaagctcctgatggagtggaagaggtcggcggcggcggggcggcgcatgcggccgatgaagtcgtagaagtccagccgcgacgccggcgacgtggggctctccatggcggccgg

SEQ ID NO: 4528 - DNA, 4846 bp, Oryza sativa
  Clone ID: PAT_MRT4530_11403C.1
tcaacgaaatttgcaggcggcccccttgccgccctccgcgagggcgattttgtactgtgcggggggccgcctgcaaatgggcggcgaggggaggcatggaattttgcaggcggcccccttgccgccctcggcgagggcgattttgtactgtgcggggggccgcctgcaaatgggcggcgagggggcatggaattttgcaggcgacccccttgccgccctccgcaagggcgattttgtactgtgctccctgtccctcctaccctgcgccctaatgtgcccgtgggagtacgtgagtcggtccgggggtacggcacggccaacccgtcctgcctgtacaggtgtgacctctggctgctcctgagtgtgtgcctctggagctcctccaagctgagaggagcctagtacgtcgtggtggtctgcaccgtgcaagtcgtcgtcgtagaactggctagtaggaccagtcctaccggcgtgagacgaagaggccccagtaccgaagatcccggctgcaaatcctgcgtgtgggcgagggatcgacgctccgtgagaggaagagctggcgaacgcgcccgaagaggtggcgaacgcccctgcggagctcgtggaagcgccggtcgtgcctgcgaacgcgctcgaaggcagacgaggtccgtgcgaaataggtgccgtaggtcgaggtcctgctccgacggtaggcgcgcgaggccgtggttgtaccggaccagctggaggtacgacgtccacagcgctgcgacaggagaagacgcgcatgaccgcacgcatcttctcctgcatccggtcgaaggtcaccctctgctcaacgtcagtcaagtgcaaacctctgttcaacctcacttggactgcggtgatatcggcactgatatcccgtgcggcatcagccgccacgaagtagtctcggtcacggtgcgtgggatacgcgtccgtgacagcggcaacgtgcggctctggggcgtctggagtgaaggtcacacgcgcacgagtgcgaggaaggtaccaacgaaggtagtcacggtagttctcctccgtgtgtgggaagagctcgttgatcacctcctctgtagctaacacccagtcgtcaacgtactgctgtacacgtggagcccaaagtgcgcctgctagctgtccccgtcgagtcaacgagtggtcggcagggaggacggtcggctgcacgttgcccggaaacacctgcctaagtccgaactgtctcatcacacgctgcgggcagtgaggctcaacgaaaatgtcgaacaccatcggcaggatggtgagccagtaagcctggtcgcgtgtgcacaaggacgaaagtcctagcggtgctctcgcagcgacggcctcttctgtgtacggctcccagatgacgtcgctcggctggagacggtcaaactcgaacacgaagtccgggtaaccacgtctcacctggacgtgagcgtaacgacgcccacgtcgacaccagtaagtccccatcgtgggaccgtcctctggccactgcgcgctgcgaccaaccccatagggtgcgctgtccaccactggtcgacctatggcaaacctctcggctgcccaaagctgaagcaacatagggcagccagcgatgatcgctcccgcgtcagtcttcgtgcacgcctcacagagggcacggtacgtggctgctagcacggcagaaccccagctccactgcggcacgtcctgtggctgagcatccgcgatgcaccgtgcgtagtggaccagccggaagtccacagcgtgcccgtgggtgctagtgaacatcacccacccgaacaaccacaacaggtacgcagtgaactggagcaaccaagccttgctaggcccgactgtagagtacggaggaagggtggtggtcggtcctaggtgtggaaggcgcatcacctgctcgaagcgcgcagtgatatcctccttccacccaaaaacaccgtccacgggaccaactgctgctcccgccagcggtagcccgagcaggtacgacacgtcctgcagtgtcggagccatctccccacagggaaggtggaacgtgtgcgtctcaggtctccagcggtctacaagagcggcaaggagtgaccgatctgcatcccaccgcttcgctgggtcacggtcgtccgccgccgcctcaacaagcctacaaagtggtagaaggcctgccgcacgcaaccaaggaacgtgacgggggtcgacacgcaaccactcgcgcgacgtgcgtggacggaaggtgccgagctgtgcaccctcgactgctgacaggaacgagcggtggttcctgtcaatcccacggttcaacagcgccggtgtgtcgtacgccatacctgcttctgactcatccatatcatttctgatgcgtctagtttggcgtcgaccctttttcacccttaacttagatggatctggaatataaaaaacttgggcactcagcgttgtgtaagatcctgagatcccgaacccatatatctcctcactccatgtatgaaagattgcttctttcctgaaataatttgagacgtacacattgggagatatgccacaatcaccggcagcagcaagaacgtgtgagcaaggaaggtgatgaagcttcggcttcatacaactgcaggtacatccaccatccgccttcaagacacattcctgcacggcttgcttgcgatagataccacgcctgctcctatcaacacacattatttcataccgatgcacttgtgtgccttgagcaacaactcgatgtctccgtgcctttttgattttatcttccatgtactttgtcactacgttgccaaacactatgttgtcatcggccatggacggaccaattttcttgtatcgatccctaaagtacgcttgcgtgccgtgaaggatgaattcaacaatagcaaccaatggaagtacccgaactcctcgcattacccagttgtacacctctgccaaattggttgtcattatgccataccgagatccatcggtgtcgaacaatagagaccacttctccttaggctcattctcaatccactgagtgaaatttctgatggacgaccctgacctccttctcattgttggtgggtcatcatgtaatgcaccaagaggtatgggaggctcgtcaccttcaactagtggactgcgagattgctcatctgtttgcttcgttgtcaactcatccaacttgtcccacaactcattaaatttcttctcttggttctgtgcacagagcctcttaaagagctccataagatgcttgttcttgaattgcttgtagaaatttgcacccatgtgacgcatgcaccaccgactccgaacatcaggccacttagctggaagtcccttctcatcccaaccgttctgcaagtagtcaatagcccgcaacatacccgcatgacgatcatgtataaggcaaacgttgggcctcatacacaccactgcaatgtgcactctctctaggaaccagtaccagctttcagtgttctcactctctacaaatgcaaaagccataggtagaacctggttgttcccatcacacccaattgctgtcaatatctgacctcggtatttacctgtcataaaagttccatctatgcatagaacaggtcgacaatgcacaaaagcattgatgcaagcacccaatgagaaaaaggctctttgcagcacactctttgttcgatcatcaaccgatgtaaatgtatgtaggtcatagtacgtattattattcctctgggcaatggtggctaacaaacgaggcaaattatcataagaagcttcaaatgtgccatacctcatctcaatgatcttttgtttggctctccaggcctttgcatagcttatggtgtacttgaatttgttctcgatgtgcctaataattgattttggttcaaagccaatgttaccaacaacactgctgtacatctcacttgccacaaaagctgaagtgatgtttcggtgatacttctccaccccttgtaagtagcacttgtgctcggtcacaatgttaacttttccaatattctttcaatttacccttatatgcatgaacacgccacggacaatcttccttcatgcacctcacttcatacacataatttgttgacttgaccaccctaaactctctctgcaaggaaactgcccaatgcttcaccgcctccttcctctcatccttatgagcatatcttgcaccctcaattacctcattctccttatactcccagggtacatgatcaccctctgatataacaagtccagagaagtcctcatttgcccaatcagtggccattacatcaccttcctcatcggatgatgcgtcgtcgtccacttcctcattatccgaatcttccctctccatttcatcaacaattataccgactctctccccctcatccgccatgcccatagcctgctcctcccttggttgattttcctcattttgcatcgatggtccaacaacatcccctgcattgataggaccctctacatcttcggtttgcattgaaacatttatatctttctcttgtaccgacacaaatataacgaggggccatgaccgttcaaaagccatttccacataccgtctccaagcatcagtgctgtccatcggcattagttcccaaaaataaccttctgttgcacgactcactacaactgacactgacattgtgtagacttcttggtctattctaaatcctctcaacaaccaactataaattgactgaaatgttctctccgcaggcctatcgatgcccttagatgtcattacaaaatctgacagatcaacaccatctggaccaaatctaatatttccttcaccgtgaactatctgaaatgtgaccttacttgacat

SEQ ID NO: 4529 - DNA, 273 bp, Oryza sativa
  Clone ID: PAT_MRT4530_11404C.1
caaatctcccaaatatgtatatatgacaagtaacatatagtacttaaaatgtataacattccccaccaccatcctttcttttttttaaccaccaagtctatgttccatgttcaccaagaaaaaggtgcccccatagaaaatttcttttacaaccaccagaagtgaacccccaaaatccagcaataagtaaaatccattgccacaatttaaaggaaagggggaaaaaattccaaacattttctttctcgttcattgaataggttgaattagaac

SEQ ID NO: 4530 - DNA, 150 bp, Oryza sativa
  Clone ID: PAT_MRT4530_11405C.1
atggatagaggaggtccatgggagaagatgggccaagagccaggccagatgggcccagcccaggttcggccgaaccatctggttcagccgaaccacaatctcagccatccaggctggggtttggcgtggacggtcctgatcatctcctga

SEQ ID NO: 4531 - DNA, 4599 bp, Oryza sativa
  Clone ID: PAT_MRT4530_11406C.1
tcaacaggcagcgccgaaagttgatagtgataactcgagctgccgcttttcatgtgtgctgttgtggactgtgcgcgctactggatctgacactaccgtgaagcgtcgaaagtgtgttgtcgtgagcataagttgttctagcaccatatgaatgaaaagaaccctgtccctcctaccctgcgccctaatgtgcccctgggagtacgtgagtcggtccgggggtatggcacggccaacccgtcctgcctgtacaggtgtgacctctggctgctcctgagtgtgcgcctctggagctcctccaagctgagaggagcctagtacgtcgtggtggtgtgcaccgtgcaagtcgtcatcgtagaactggctagtaggaccagtcctaccggcgtgagacgaagaggccccagtaccgaagatcccggctgcaaatcctgctggacaaggacgtgtgggcgagggatcgacgctccgtgagaggaagagctggcgaacgcgcccgaagaggtggcgaacgcccctgcggagctcgcggaagcgtcggtcgtgcctgcgaacgcgctcgaaggcagacgaggtccggtgctgtaggtcgcactgctccgaagctaggggcgctcgaaggcaaacgaggtccggaccagctggaggtacgacgtccatggcgctgcgacaggagaagacgcgcatgaccgcacgcatcttctgctgcatccggtcgaaggtcaccctctgctcaacgtcagtcaagtgcaaacctctgttcaacctcacttggactgcggtgatatcggcactgatatcccgtgcggcatcagcccccacgaagtagtctcggtcacggtgcgtgggatacgcgtccgtgacagcggcaacgtgcggctctggggcgtctggagtgaaggtcacacgcgcacgagtgcgaggaaggtaccagcgaaggtagtcacggtagttctcctccctgtgtgggaagagctcgttgatcacctcctctgtagctaacacccagtcgtcaacgtactgctgtacacgtggagcccaaagtgcgcctgctagctgtccccgtcgagtcaacgagtggtcggcaaggaggacggtcggctgcacgttgcccggaaacacctgcctaagtccgaactgtctcatcacacgctgcgggcagtgaggctcaacgaaaatgtcgaacaccatcggcaggatggtgagccagtaagcctggtcgcgtgtgcacaaggacgaaagtcctagcggtgctctcgcagcgacggcctcttctgtgtacggctcccagatgacgtcgctcggcaggagacagtcaaactcgaacacgaagtccgggtaacctcgtctcacctggatgtgagcgtaacgacgcccacgtcgacaccagtaagtccccatcgtgggaccgtcctctagccactgcgcgctgcgaccaaccccgtagggtgcgctgtccaccactggtcgacctatggcaaacctctcggctgcccaaagctgaagcaacatagggcagccagcgatgatcgctcccgcgtcagtcttcgtgcacgcctcacagagggcacggtacgtggctgctagcacggcagaaccccagctccactgcggcacgtcctgtggctgagcatccgcgatgaaccgtgcgtagtggaccagccggaagtccacagcgtgcccgtgggtgctagtgaacatcacccacccgaacaacaacaacaggtacgcctcaagggagcgtcggaccgagtaatcatcagcgtcagggtgcagaaggtccgcagtgaactggagcaaccaagccttgctaggcccgactgtagagtacggaggaagggtgttggccggtcctaggtgtggaaggcgcatcacctgctcgaagcgcgcagtgatatcctccttccacccaaaaacacagtccacgggaccaactggtgctcccaccagcggtagcccgagcaggtacgacacgtcctgcagtgtcggagccatctccccacagggaaggtggaacgtgtgcgtctcaggtctccagcggtctaccagagcggcaaggagtgaccggtctgcatcccaccgcttcgctgggtcacggtcgtccgccgccgcctcaacaagcctacaaagtggtagaaggcctgccgcacgcaaccaaggaacgtgacgggggtcgacacgcaaccactcgcgcgacgtgcgtggacggaaggtgccgagctgtgcaccctcgactgctgacaggaacgagcggtggttcctgtcaatcccacggttcaacagcgccggtgtgtcgtacgccatacagcacaacagcattttatttcctaaatcgatagcattgttacaccatggaatcgcctgctgcgcgacgacgccttggccttgcgcgcctgcttgttgttccttcaccaggtggtcgcctaccatcacttgcctgtccagatggactagcatctgcgccgcttggaacttctgcattctttgggcatttcttgtaagcagatcacacttgctgcagcgtaaagtcctcccacctgcttctgactcatccatatcatttctgatgcgtctagtttggcgtcgaccctttttcacccttaacttagatggatctggaatataaaaaacttgggcactcagcgttgtgtaagatcctgagatcccgaacccatatatctcctcactccatgtatgaaagattgtttttttccgatgcacttgtgtgccttgagcaacaactctatgtctccgtgcctttttgattttatcttccatgtactttgtcattacgttgccaaacactatgttgttatcggccatggacggaccaattttcttgtatcgatccctaaagtacgcttgcgtgccgtgaaggatgaattcaacaatagcaaccaatggaagtacccgaactcctcgcattacccagttgtacacctctgccaaattggttgtcattatgccataccgagatccatcggtgtcgaacaatagagaccacttctccttaggctcattctcaatccactgagtgaaatttctgatggacgaccctgacctccttctcattgttggtgggtcatcatgtaatgcaccaagaggtatgggaggctcgtcaccttcaacttgtggtctgcgagattgctcatctgtttgcttcgttgtcaactcatccaacttgtcccacaactcattaaatttcttctcttggttctgtgcacagagcctcttaaagagctccataagatgcttgttcttgaattgcactgcaatgtgcactctctctaggaaccagtaccagcttttagtgttctcactctctgtcataaaagttccatctatgcatagaacaggtcgacaatgcacaaaagcattgatgcaagcacccaatgagaaaaaggctctttgcagcacactctttgttcgatcatcaaccgatgtaaatgtatgtaggtcatagtaagtattattattcctctgggcaatggtggctaacaaacgaggcaaattatcataagaagcttcaaatgtgccatacctcatctcaataatcttttgtttggttctccaagcctttgcatagcttatggtgtacttgaatttgttctcgatgtgcctaataattgattttggttcaaagccaatgttaccaacaacactgctgtacatctcacttgccacaaaagctgaagtgatgtttcggtgatacttctccaccccttgtaagtagcacttgtgctcggtcacaatgctaactttccaataatcattccatttacccttatatgcatggacacgccacggacaatcttccttgatgcacctcacttcatacacataatttgttgacttgaccaccctaaactctctctgcaaggaaactgtccaatgcttcaccgcctccttcatctcatccttatgagcataccttgcaccctcaattacctcgttctccttatactcccagggtacatgatcaccctctgatataacaagtccagaaaagtcctcatttgcccaatcagtggccattacatcaccttcctcatcggatgatgcgtcgtcgtccgcttcctcattatccgaatcttccctctccatttcatcaacaattgtaccgactctctccccctcatccgccatgcccatggcctgctcctcccttggttgattttcctcattttgcatcgatggtccaacaacatcccctgcattgataggaccctctacatcttcggtttgcattgaaacatttatatctttctcttgtaccgacacaaatataacgaggggccatgaccgttcaaaagccatttccacataccgtctccaagcagcagtgctgtccatcggcattagttcccaaaaataaccttctgttgcacgactcactacaactgatactgacattgtgtagacttcttggtctattctaaatcctctcaacaaccaactataaattgactgaaatgttctctccgcaggcctatcgatgcccttagatgtcattacaaaatctgacagatcaacaccatctggaccaaatctaatatttccttcaccgtgaactatctgaaatgtgaccttatttgacat

SEQ ID NO: 4532 - DNA, 211 bp, Oryza sativa
  unsure (1)..(211): unsure at all n locations
  Clone ID: PAT_MRT4530_11407C.1
ccgtggattcgcatgcnatcaggtcaccctgcctgcatgtccaccgccggcactagcacccacgctcgcccgccggcgcccgttctgcctgcttcgcagccgcgctatcccgccgccgtcgcggcgactgctgcatctctctccgctgcgcgcgaccgccacgcccgctccgccgtcggccgcacacacgcatatgcctgcctgcgcgtga

SEQ ID NO: 4533 - DNA, 624 bp, Oryza sativa
  Clone ID: PAT_MRT4530_11408C.1
atgcggctgggcgcggccgggttggcgcgaggccggcacggcggcggccgaggaaggtgcggcgagctcgagcgacccaccgactgcggcagcggcgcgtggcggagagagggcgagtggcgcagcatggacacgccatggcccgagctcgggttgcaaggggatagggtgctagggctaggatccaacaaaattgatgggagcgtgaacatctacgggaggcaaacagcgttgatggcgcccgaaagtgttcgtcagcgttccttgacgtccaacctccccaacggcgacagcggcagcgtcgctccgcctccatttcctccaacctccagctccggccggggagcccctcaatggtggtctctagtagcggtgagatcatgcatagaagaggtggcatggtcggtcgcgtgcgcggcgtccgggcgcgagcgcggatgcggagggatgaggcgcgaggggagggaggcgcggcacatagaagcggcgcggggattggaccaccatgggggttttcaaaggatgacatttatccatattgaacttaccaaggaccctcttggtataggtagactggtgcataaacactccttcagggagatgctcgagcagcagcccaagtag

SEQ ID NO: 4534 - DNA, 4963 bp, Oryza sativa
  Clone ID: PAT_MRT4530_11409C.1
tcagccccttctaggtcggtcagaatgcattgcattctcgtggtccttcaatcgttgatactctacttgtgtttctgactctgttatcttctggccatgatatgatggagtgacattgtcgatccatcgagtaaatccacccatccttggattgccgtgccattctaaagcctcagcagcaattcgacgttcatgctcatccttccgccttaggtagtccgatcttgtttcactacgtgggtaagcacgggttccgtcgttttgtgggttctccatgtctacccactcgatgaagttgcacattggacgatatgtctgtacaggtgtgacctctggctgctcctgagtgtgcgcctctggagctcttccaagctgagaggagcctagtacgtcgtggtggtgtgcaccgtgcaagtcgtcgtcgtagaactggctagtaggtccagtcctaccggcgtgagacgaagaggccccagttcccgaagatcccggctgcaaatcctgcgtgtgggcgagggatcgacgctccgtgagaggaagagctggcgaacgcgcccgaagaggtggcgaacgcccctgcggagctcgcggaagcgccggtcgtgcctgcgaacgcgctcgaaggcagacgaggtccgtgcgaaacaggtgccgtaggtcgaggtcctgctccgacggtaggcgcgcgaggccgtggttgtaccggaccagctggaggtatgacgtccacggcgctgcgacaggagaagacgcgcatgaccgcacgcatcttctcctgcatccggtcgaaggtcaccctctgctcaacgtcagtcaagtgcaaacctctgttcaacctcacttggactgcggtgatatcggcactgatatcccgtgcggcatcagccgccacgaagtagtctcggtcacggtgcgtgggatacgcgtccgtgacagcggcacgtgcggctctggggcgtgagcgaaggtagtcacggtagttctcctccgtgtgtgggaagagctcgttgatcacctcctctgtagctaacacccagtcgtcaacgtactgctgtacacgtggagcccaaagtgcgcctgctagctgtccccgtcgagtcaacgagtggtcggcagggaggacggtcggctgcacgttgcccggaaacacctgcctaagtccgaactgtctcatcacacgctgcgggcagtgaggctcaacgaaaatgtcgaacaccatcggcaggatggtgagccagtaagcctggtcgcgtgtgcacaaggacgaaagtcctagcggtgctctcgcagcgatggcctcttctgtgtacggctcccagatgacgtcgctcggctggagacggtcaaactcgaacacgaagtccgggtaaccacgtctcacctggacgtgagcgtaacgacgcccacgtcgacaccagtaagtccccatcgtgggaccgtcctctggccactgcgcgctgcgaccaaccccgtagggtgcgctgtccaccactggtcgacctatggcaaacctctcggctgcccaaagctgaagcagcatagggcagccagcgatgatcgctcccgcgtcagtcttcgtgcacgcctcacagagggcacggtacgtggctgctagcacggcagaaccccagctccactgcggcacgtcctgtggctgagcatccgcgatggaccgtgcgtagtggaccagccggaagtccacagcgtgcccgtgggtgctagtgaacatcacccacccgaacaaccacaacaggtacgcctcaagggagcgtcggaccgagtaatcatcagcgtcagggtgcagaaggtccgcagtgaactggagcaaccaagccttgctaggcccgactgtagagtacggaggaagggtgttggccggtcctaggtgtggaaggcgcatcacctgctcgaagcgcgcagtgatatcctccttccacccaaaaacaccgtccacgggaccaactggtgctcccgccagcggtagcccgagcaggtacgacacgtcctgcaatgtcggagccatctccccacagggaaggtggaacgtgtgcgtctcaggtctccagcggtctacaagagcggcaaggagtgaccggtctgcatcccaccgcttcgctgggtcacggtcgtccgccgccgcctcaacaagcctacaaagtggtagaaggcctgccgcacgcaaccaaggaacgtgacgggggtcgacacgcaaccactcgcgcgacgtgcgtggacggaaggtgccgagctgtgcaccctcgactgctgacaggaacgagcggtggttcctgtcaatcccacggttcaacagcgccggtgtgtcgtacgccataccatcacttgcctgtccagatggactagcatctgcgccgcttggaacttctgcattcttcgggcatttcttgtaagtatggccgcgcagatcacacttgctgcagcgtaaagtcctcccacctgcttctgactcatccatatcatttctgatgcgtctagtttggcgtcgaccctttttcacccttaacttagatggatctggaatataaaaaacttgggcactcagcgttgtgtaagatcctgagatcccgaacccatatatctcctcactccatgtatgaaagattgcttctttcctgaaataatttgagacgtacacattgggagatatgccacaatcaccggcagcagcaagaacgtgtgagcaaggaaggtgatgaagcttcggcttcatacaactgcaggtacatccaccatccgccttcaagacacattcctgcacggcttgcttgcgatatataacacgcctgctcctatcaacacacattatttcataccgatgcacttgtgtgccttgagcaacaactcgatgtctccgtgcctttttgattttatcttccatgtactttgtcactacgttgccaaacactatgttgttatcggccatggacggaccaattttcttgtatcgatccctaaagtacgcttgcgtgccgtgaaggatgaattcaacaatagcaaccaatggaagtacccgaactcctcgcattacccagttgtatacctctgccaaattggttgtcattatgccataccgagatccatcggtgtcgaacaatagagaccacttctccttaggctcattctcaatccactgagtgaaatttctgatggacgaccctgacctccttctcattgttggtgggtcatcatgtaatgcaccaagagggatgggaggctcgtcaccttcaactagtggtctgcgagattgctcatctgtttgcttcgttgtcaactcatccaacttgtcccacaactcattaaatttcttctcttggttctgtgcacagagcctcttaaagagctccataagatgcttgttcatgaattgcttgtagaaatttgcacccatgtgacgcatgcaccaccgactccgaacatcaggccacttagctggaagtcccttctcatcccaaccgttctgcaagtagtcaatagcccgcaacatacccgcatgacgatcatgtataaggcaaacgttgggcctcatacgcaccactgcaatgtgcactctctctaggaaccagtaccagctttcagtgttctcactctctacaaatgcaaaagccataggtagaacctggttgttcccatcacacccaattgctgtcaatatctgacctcggtatttacctgtcataaaagttccatctatgcatagaacaggtcgacaatgcacaaaagcattgatgcaagcacccaatgagaaaaaggctctttgcagcacactctttgttcgatcatcaaccgatgtaaatgtatgtaggtcatagtacgtattattattcctctgggcaatggtggctaacaaatgaggcaaattatcataagaagcttcaaatgtgccatacctcatctcaatgatcttttgtttggctctccaggcctttgcatagcttatggtgtacttgaatttgttctcgatgtgcctaataattgattttggttcaaagccaatgttaccaacaacactgctgtacatctcacttgccacaaaagctgaagtgatgtttcggtgatacttctccaccccttgtaagtagcacttgtgctcggtcacaatgctaactttccaataatcattccatttacccttatatgcatggacacgccacggacaatcttccttcatgcacctcacttcatacacataatttgttgacttgaccaccctaaactctctctgcaaggaaactgcccaatgcttcaccgcctccttcatctcatccttatgagcataccttgcaccctcaattacctcgttctcgttatactcccagggtacatgatcaccctctgatataacaagtccagagaagtcctcatttgcccaatcagtggccattacatcaccttcctcatcggatgatgcgtcgtcgtccgcttcctcattatccaaatcttccctctccatttcatcaacaattataccgactctctccccctcatccgccatgcccatagcctgcttctcccttggttgattttcctcattttgcatcgatggtccaacaacatcccctgcattgataggaccctctacatcttcggtttgcattgaaacatttatatctttctcttgtaccgacacaaatataacgaggggccatgaccgttcaaaagccatttccacataccgtctccaagcatcagtgctgtccatcggcattagttcccaaaaataaccttctgttgcacgactcactacaactgacactgacattgtgtagacttcttggtctattctaaatcctctcaacaaccaactataaattgactgaaatgttctctccgcaggcctatcgatgcccttagatgtcattacaaaatctgacagatcaacaccatctggaccaaatctaatatttccttcaccgtgaactatctgaaatgtgaccttacttgacat

SEQ ID NO: 4535 - DNA, 290 bp, Oryza sativa
  Clone ID: PAT_MRT4530_1140C.1
ctcgtccgcgactgccgccgctcatccacgcctcgccttacctccgcgtccgcctccgcatctgggaccggccgtcgctcgtccgcgtctcgcctcgcctccgcggccggtctcggagatccgcaaccgccgccgcctctgggaccagccgccaccgcgtctgcaaccgcctccgctgccgccgctcgtccgctgggaaccagacggccctaacggaggctcctggcatccaaatacatgcgtcgtctgaaatatcaaaattcagcccccagcagctcgtagtggagtga

SEQ ID NO: 4536 - DNA, 5205 bp, Oryza sativa
  Clone ID: PAT_MRT4530_11410C.1
ttatggtacttggtaccttaggttgcccgatctgatgttggccgtgttggcagatgtcagatccatgtggaaagagggatgtagagacagaggacacatctgatctggtggcagttgtgctcctaccaactcgatcagatggctactcttggggcattgattccgggggtgccaagatgcaagatcgatggattcgaagacggctatctgaactccagcgtcagccatgtaaatgtggtggcatggaagttccggcatagctgaaaacggggcacgtctgaccagcgagagggtggcggtacgtggtgtgagcccgacaagcatgtcgttcactgcaatggcaaagtccaattgatcaacaagtcttcggtagcacgtgaagcgccgaaagtgtgttgttgtgagcataagttgttcaagcaccttatgaatgaaaagaaccctgtccctcctaccctgcgccctaatgtgcccctgggagtacgtgagtcggtccgggggtacggcacggccaacccgtcctgcctgtacaggtgtgacctctggctgctcctgagtgtgcgcctctggagctcctccaagctgagaggagcctagtacgtcctggtggtctgcaccgtgcaagtcgtcgtcgtagaactggctagtaggaccagtcctaccggcgtgagacgaagaggccccagtaccgaagatcccggctgcaaatcctgcgtgtgggcgagggatcgacgctccgtgggaggaagagctggcgaacgcgcccgaagaggtggcgaacgcccctgcggagctcgcggaagcgccggtcgtgcctgcgaacgcgctcgaatgcagacgaggtccgtgcgaaaccggtgctgtaggtcgcactgctccgaagctaggggcgctcgaagacaaacgaggtcctgctccgacggtaggcgcgcgaggccgtgggtgtaccggaccagctggaggtacgacgtccacggcgctgcgacaggagaagacgcgcatgaccgcacgcatcttctcctgcatccggtcgaaggtcgccctctgctcaacgtcagtcaagtgcaaacctctgttcaacctcacctggactgcggtgatatcggcactgatatcccgcgccgcatcagccgccacgaagtagtctcggtcacggtgcgtgggatacgcgtccgtgacagcggcaacgtgcggctctggggcgtctggagtgaaggtcacacgcgaacgagtgcgaggaaggtaccagcgaaggtagtcacggtagttctcctccgtgtgtgggaagagctcgttgatcacctcctctgtagctaacacccagtcgtcaacgtactgctgtacacgtggagcccaaagtgcgcctgctagctgtccccgtcgagtcaacgagtggtcggcaggggggacggtcggctgcacgttgcccggaaacacctgcctaagtccgaactgtctcatcacacgctgcgggcagtgaggctcaacgaaaatgtcgaacaccatcggcaggatggtgagccagtaagcctggtcgcgtgtgcacaaggacgaaagtcctagcggtgctctcgcagcgacggcctcttctgtgtacggctcccagatgacgtcgctcggctggagacggtcaaactcgaacacgaagtccgggtaaccacgtctcacctggacgtgagcgtaacgacgcccacgtcgacaccagtaagtccccatcgtgggaccgtcctctggccactgcgcgctgcgaccaaccccgtagggtgcgctgtccaccactggtcgccctatggcaaacctctcggctgcccaaagctgaagcaacatagggcagccagcgatgatcgctcccgcgtcagtcttcgtgcacgcctcacagagggcacggtacgtggctgctagcacggcagaaccccagctccactgcggcacgtcctgtggctgagcatccgcgatggaccgtgcgtagtggaccagccggaagtccacagcgtgcccgtgggtgctagtgaacatcaccgagtaatcatcagcgtcagggtgcagaaggtccgcagtgaactggagcaaccaagccttgctaagcccgactgtagagtacggaggaagggtggtggtcggtcctaggtgtggaaggcgcatcacctgctcgaagcgcgcagtgatatcctccttccacccaaaaacaccgtcgacgggaccaactggtgctcccgccagcggtagcccgagcaggtacgacacgtcctgcagtgtcggagccatctccccacagggaaggtggaacgtgtgcgtctcaggtctccagcggtctacaagagcggcaaggagtgaccggtctgcatcccaccgcttcgctgggtcacggtcgtccgccgccgcctcaacaagcctacaaagtggtagaaggcctgccgcacgcaaccaaggaacgtgacgggggtcgacacgcaaccactcgcgcgacgtgcgtggacggaaggtgccgagctgtgcaccctcgactgctgacaggaacgagcggtggttcctgtcaatcccacggttcaacagcgccggtgtgtcgtacgccataccatcacttgcctgtccagatggactagcatctgcgccgcttggaacttctgcattcttcgggcatttcttgtaagtatggccgcgcagatcacacttgctgcagcgtaaagtcctcccacctgcttctgactcatccatatcatttctgatgcgtctagtttggcgtcgaccctttttcacccttaacttagatggatctggaatataaaaaacttgggcactcagcgttgtgtaagatcctgagatcccgaacccatatatctcctcactccatgtatgaaagattgcttctttcctgaaataatttgagacgtacacattgggagatatgccacaatcaccggcagcagcaagaacgtgtgagcaaggaaggtgatgaagcttcggcttcatacaactacaggtacatccaccatccgccttcaagatacattcctgcacggcttgcttgcgatagataccacgcctgctcctatcaacacacattatttcataccgatgcacttgtgtgccttgagcaacaactctatgtctccgtgcctttttgattttatcttccatgtactttgtcactacgttgccaaacactatgttgttatcggccatggacggaccaattttcttgtatcgatccctaaagtaggcttgcgtgccgtgaaggatgaattcaacaatagcaaccaatggaagtacccgaactcctcgcattacccagttgtacacctctgccaaattggttgtcattatgccataccgagatccatcggtgtcgaacaatagagcccacttctccttaggctcattctcaatccactgagagaaatttctgatggccgaccctgacctccttctcattgttggtgggtcatcatgtaatgcaccaagaggtatgggaggctcgtcaccttcaacttgtggtctgcgagattgctcatctgtttgcttcgttgtcaactcatccaacttgtcccacaactcattaaatttcttctcttggttctgtgcacagagcctcttaaagagatccataagatgcttgttcttgaattgcttgtagaaatttgcacccatgtgacgcatgcaccaccgactccgaacatcaggccacttagctggaagtcccttctcatcccaaccgttctgcaagtagtcaatagcccgcaacatacccgcatgacgatcatgtataaggcaaacgttgggcctcatacgcaccactgcaatgtgcactctctctaggaaccagtaccagctttcagtgttctcgctctctacaaatgcgaaagccataggtagaacctggttgttcccatcacacccaattgctgtcaatatctgacctcggtatttacctgtcataaaagttccatctatgcatagaacaggtcgacaatgcacaaaagcattgatgcaagcacccaatgagaaaaaggctctttgcagcacactctttgttcgatcttcaaccgatgtaaatgtatgtaggtcatagtaagtattattattcctctgggcaatggtggctaacaaacgaggcaaattatcataagaagcttcaaatgtgccatacctcatctcaatgatcttttgtttggctctccaggcctttgcatagcttatggtgtacttgaatttgttctcgatgtgcctaataattgattttggttcaaagccaatgttaccaacaacactgctgtacatctcacttgccacaaaagctgaagtgatgtttcggtgatacttctccaccccttgtaagtagcacttgtgctcggtcacaatgctaactttccaataatcattccatttacccttatatgcatggacacgccacggacaatcttctttcatgcacctcacttcatacacataatttgttgacttgaccaccctaaactctctctgcaatgaaactgcccaatgcttcaccgcctccttcatctcatccttatgagcataccttgcaccctcaattacctcgttctccttatactcccagggtacatgatcaccctctgatataacaagaccagagaagtcctcatttgcccaatcagtggccattacatcaccttcctcatcggatgatgcgtcgtcctccgcttgctcattatccgaatcttccctctccatttcatcaacaattataccgactctctccccctcatccgccatgcccatggcctgctcctcccttggttgattttcctcattttgcatcgatggtccaacaacatcccctgcattgctaggaccctccacatcttcggtttgcattgaaacatttgtatctttctcttgtaccgacacaaatataacgaggggccatgaccgttcaaaagccatttccacataccgtctccaagcagcagtgctgtccatcggcattagttcccaaaaataaccttctattgcacgactcactacaacagatactgacattgtgtagacttcttggtctattctaaatcctctcaacaaccaactataaattgactgaaatgttctctccgcaggcctatcgatgcccttagatgtcattacaaaatctgacagatcaacaccatctggaccaaatctaatatttccttcaccgtgaactatctgaaatgtgaccttacttgacat

SEQ ID NO: 4537 - DNA, 159 bp, Oryza sativa
  Clone ID: PAT_MRT4530_11411C.1
atggggaaggaggaggagacaggcgcgctcaagctcatagtggtgccgatgaggaagaagaaaaggatgggtggaattttgctcactttatctactcccaataaatcattccctactttcataaattcctatgcaatagttactccgaaaatacactag

SEQ ID NO: 4538 - DNA, 895 bp, Oryza sativa
  Clone ID: PAT_MRT4530_11412C.1
tagtggaccggccgggctctccccgtctccatccccatagctgcactgcacggaggtcgccgcggctaccccatcgccaccaccaccaccaccgcatctctctcccctcgccgtcgccgtcgccgtcgccgcagcgcgagatggggttcgtctccttcgccgggagggtcctcttcgcctccgtcttcctcctctccgcctaccaggagtttagtgaatttggagctgatggtggaccggctgcaaaggcccttcggcctaagtataacgtcttcaccaaaaatatttctgcacatttgggagtagcagtgcctcatgttgagttgaagcacattgttgctgctaccattggtctgaagggtctgggaggtctcctttttatcctgagcagttcgtttggtgcttatctcctgctgatttacctcgcttttatcacacctgttgtctacgacttctacaactacgacatggagaagtccgaatttgtgcagctcttcatgaagttcacacagaatttggctctctttggggcgcttcttttcttcctgggcatgaagaactccattcccaagaggcaggccaagaagaaggctcccaagtcgaagacgaactagggcgttttagatagccatggcctccggcggtgatgggggacagtttattttggagtacaagcttacagtaccagttgtgctgcccttagatgtatcggattcatttttgaagggcacgaccctaatgaggtgtgagtggagggttaggggactagattgtatcagtatatgtactcgcgatttgtttgttgaactaggcttccaaggattaaattacccatttgattattttgccctcaaaaaaaaaaaaaaaaaaaaaaaaaaaaaaaaaaaaaaaaaaa

SEQ ID NO: 4539 - DNA, 10474 bp, Oryza sativa
  Clone ID: PAT_MRT4530_11413C.1
atgggttgcattaaagatattccgaccctgaagggagataactacgcagaatggaaaagaaaactcgacattgctttcatcttgggagaggtggactgggtgttgactaccccatgtcctatagaacctgctgcacttgtcagagttgaaaatgagtcagatgctgactggcaaagaagacagagggacaatgctcccctcataatgtcgtattacattgagcaaaagaaatggtccttagtcaacaagaaatgtttggctgtggtaaagaacacgattgagccaaccttattgggctcaatcccagagtgtgacaccatctctaagtaccttgaaagaataaagagccaatttactggttcttcaaagacttatgctacacagctaataaagcagcttgtgacagaaaggtaccatggaggtggtgtaagagaccacattcttaggatgagcaacatggcttccaagttgaagccaatggatttgggcatctcagatgactttcttgtccatttggttatggcctcattgccaaagcactttgacaactttgttgtcaactacaatataagtccagagaaatggaactttgaaaagctcatcgctaattgtgtgcaagaggaggaaagaatcaaagagtccaatggagactctattaactatgttaaagataacaagaaaaagaactacaagttcttgctagagaatggtatagtagcccagtattcaacaccaggtgaacctcaacagaatggggtagctgaaaggtgtaaccgtacccttatggatatggtgcgcagcatgatgagctactccaccttaccattgggtttatggatggaggcattaaaaacctcaattcatatcctcaacatagttccaagcaaattggtgcccaaaacaccgtatgagctatggacaggaagagtaccctcgctagctcacctccatgtgtgggggagtcctgcagaggctaaaatatttaacccaaaccttgggaaattggatcccaaaacagtaagctgtcattttattggctatcctgaaagatcgaagggttatcgtttctactgtccaaacagttatacaaagtttgtagaaatgagacacgccgtcttcttggaagacgaaatgattaggaggagctcggtagttcgagaaattgatcttgaggagaggcaggtgtctgtaccggctccgtcgactcaggagccttttttctctctacctgctgatgttgtgcctgcaatgcatgacgttgcggtactagcacctattgttacccctcctgtggcaacattgaatgaaagtgaggaacctgttctacaggattcaacaaaaattattgccatacaagaggaggaggtgcaacagcctcaaacagagaatgtgccaaatgtggaggcccctagaaggattataatggctttggtggcacattatgatttggaattacatcagatggatataaaaacggtatttctaaatggagatttgaaggaaaaagtatacatggcacaaccgaaaggttttgtcgtgaaaggaaacgaaaatatgggatgtcgtctaaagagatccatttatggattaaaacaagcttcgagacagtggtacttgaagtttgatgggacaataaagaaatttgggtttcgagagaatattgaggacaactgtatttatacaaagtttaagaatgggagattcattttcctagttctgtatgtaaatgacattctactggctagtagtgatgtcagtgtactgcaggaaacaaagaaattcttgtcctcaaactttgacatgaaagacctcggtgaggcttcatatgttttgggcatagagattcaccgagacaaaacaaagtatgtattgggactttctcaaaagacatatatagaaaaggtgttgaagaaattcaacatgtacagatgcagtgccacacctgctcctatagtcaagggtgaaaagtatgggacatggcgatgtcccaaaaatcagtatgagctcaacgaaatgaaaacaaagccatatgcgtcagctgtgggaagcctacagtatgcatttcagagtaatccaggcccagagcactggaaattggtaaagaaagtcttgcgttatttgcaagggggagctatttcatggaaaagctccaaacagactatcactgcagggtctactatgtatgccgagtttatagcatgctatgaggccacggggcagatggatcggcaatggatgtacgctgaccggcggtccaaagagtttattgacggcgtgcactattttttgagagtggccgaagctaacaggcaaaggggttttatttgttgtccatgcaataagtgtaagaatcagaaggagtattctgcatccaggactattcatttccacttgtttgagtcggggttcatgccaagctataattgttggacatcccacggagagcaaggtgttgaaatggaagaagatgaagtggaagacgacaatattccggactttgctcagtatgttggatttgaaggaaatcaaacgggcgaggaggaaatagctgctgatggtaacgacgttgcggatgatcttggtcagatgttgcaggacgccagggaggactgcgaaagtgaaaaggaggcccataaattggacaagatgttggaggaccacagaacttcgttgtacccaggttgcgagcaggggcacaaaaagttggataccactctggagttgttgcaatggaaggcaaaaaatggggttagtgacaaggcatttggcgatttattgaaactcatcaagaacattcttccggggggaaacaaattgcccgagacaacgtacgaggctaagaagatagtctgcctgttaggactggaagttcataagattcacgcatgtccgaacgattgtatcctatatcgcggtgaggagtatgagaacctagaagcatgccctgtttgcaaagcactacgatacaagattagacgggacgatccaggagaagttgacgggcagctaacaaagaagagaattcctgctaaggtgatgtggtatttccctataataccacggctaaggcgtttgttcaggaacaaggggaatgctagaatgttgcgatggcacgctgaagagcgtcaacaggacgggatgctgagacaccccgccgatggttcgcagtggcgaaacatcgacagaaaatttaaagaatttggaaaggacgcacgaaacatacggtttggccccaagcaacctggtaacgacatcgacgtgtacctaagaccactggtcgaagatcttaaacagttgtggaagaaggaaggtgtccccgtgtgggacgaggacaaacaggaggagtttaacctacgagcgctgctgttcgtaaccatcaacgattggcctgcacttagcaacctatccggacagtccaacaaggggtacaaggcttgcactcactgtatggatgaaacagaaagtacgtatcttaagcactgtaggaaggttgtatacatgggtcatcgtcgattccttgcagcaaaccacccggtacggaagaaaggcaagcacttcgaacataaggccgaccaccgtacgaagcctaaacatcgcagcgggaaaatagtgtttgctatggttaaagatcttaaagtagtgttcggaaaggggcctggaagccagcatatagagagcgaagatggtcacgcggcgatgtggaaaaagaactctatattttgggagttaccatattgggaattcttggacgtacgccacgcaatcgacgtgatgcacctcactaagaacctttgcgtaaaccttcttggcttcctaggtgtatacggaaagtcgaaagatacactggaagcacgtaatgatctgaagcatatggaacaacacggcgaccttcacccggaaccaaaggagaaaggaagccattacttgagtccagccagctacactcttagcaaggcagagaaggaaagtatgtttgaatgcttggagagcataaaggtaccgtctggatactccacgaatatcaagcgaataataagcacgaaggagaagaagttcacaaacctaaagtctcatgactgtcacgtgttgatgatacaactgctaccatttgtaataaggggtatccttccagacaatgtccgggcaacaataacaaagctatgtgcattcatgaacgcaatttcgcagaaggtcatcgatccggatagattagaagcccttcagaatgaagtggtgcaatgtctcgtcagttttgagttgatatttccaccttcatttttcaatataatgacgcatctgctttgtcaccttgtgaaagagatccgtattctcgggcctatgtacctacacaacatgtttcctttcgagaggtacatgggcgttctgaagaagtatgttcgtaaccgtgctcgtccagaggcaagcatcgccaagggttatggaacagaggaggtcatcgaattttgtgtagaatttatcgaagaccttcgcccaatcggggtacctgaatcacgccatgaagggagactacggggaaagggaactctcggaaggaaagcaataatgacggtagacaacaatttattccgtaaagcccatttcactgttctgcaacactcttcattggtagctccttacatcgaggagcacttgactctagttcgcgccaggaacattggtaagtccgatgcatggattacacggcatcacattgatactttccccgcgtggctacgacaacatctcatgggtaacgagtcgatcaaccaacaacttgccttcctggcgaggggaccgtctgggtcgatcgcgacattccaaggatatgagatcaatgggtacacattctacacgagagcccaagacatgaagagcacgaaccaaaacagcgatgttcgtgtcgatgccatgggacacgatggaacaactgccacgtattacggtgccatcgaggacatatgggaacttgactatggtcctctcaaggttcctctgttccggtgccaatgggttaggttgactggtggaggcgtaatgattgatgacagtgggatgacaactgttgaccttaacaaggttggatactcggacgaaccttttgtccttgccaatgatataacgcaagtcttttttgtgaaggacatgtctagcaaaggaaagaagggcagagggcctgatgagcctaagcgtcaagtggttctcccaggcaaaagaagaatcgtcagagttgaggacaagactgacgaggattacgatcaaatggagattcaaagggcccgacggcggagggttttcgatactggattcatcgaccctcggaaagtaaacgtcgcaatgctcgaccaatatccacaagaaacagaggacaatctcgtccatctcctgaaggcgcaacattacaagacgttcatactgttgccatacaacacagaattccactgggtgcttttactcttcgacctggaggcctgcaccgtcaacgtatatgactcaatggataaaaaagagtctacgtttgacaagtgcgcaaagcaaaagcagggaactaacttgtgcggctattacgtgtgcgagtattgccactgccttgcagaccaaatcatcactacaagagagctcgattttattcgcatgagggataacctgaccacacacaaggaatttatcgcggcggttcaagaacaacctcatgggattcatcaacgaagaaatccttgatcccaagggtgaattccctgtccctcctaccctgcgccctaacgtgcccgtgggagtacgtgagtcggtccgggggtacggcacggccaacccgtcctgcctgtataggtgtgacctctggctgctcctgagtgtgcgcctctggagctcctccaagctgagaggagcctagtacgtcgtggtggtctgcaccgtgcaagtcgtcgtcgtagaactggctagtaggaccagtcctaccggcgtgagacgaagaggccccagtaccgaagatcccggcgtgtgggcgagggatcgacgctccgtgagaggaagagctggcgaacgcgcccgaagaggtggcgaacgcccctgcggagctcatggaagcgccggtcgtgcctgcgaacgcgctcgaaggcagacgaggtcctgcgatgaggaaacgtgcagttaaaacatggtgacataatcgtgcaaaagcagctggaggtacgacgtccacggcgctgcgacaggagaagacgcgcatgaccgcacgcatcttctcctgcatccggtcgaaggtcgccctctgctcaacgtcactcaagtgcaaacctctgttcaacctcacctggactgcggtgatatcggcactgatatcccgtgcggcatcagccgccacgaagtagtctcggtcacggtgcgtgggatacgcgtccgtgacagcggcaacgtgctgctctggggcgtctggagtgaaggtcacacgcgcacgagtgcgaggaaggtaccagcgaaggtagtcacggtagttctcctccgtgtgtgggaagagctcgttgatcacctcctctgtagctaacacccagtcgtcaacgtactgctgtacacgtggagcccaaagtgcgcctgctagctgtccccgtcgagtcaacgagtggtcggaaggggggacggtcggctgcacgttgcccggaaacgcctgcctaagtccgaactgtctcatcacacgctgcgggcagtggggctcaacgaaaatgtcgaacaccatcggcaggatggtgagccagtacgcctggtcgcgtgtgcacaaggacgaaagtcctagcggtgctctcgcagcgacggcctcctctgtgtacggctcccagatgacgtcgctcggctggagacggtcaaactcgaacacgaagtccgggtaaccacgtctcacctggacgtgagcgtaacgacgcccacgtcgacaccagtaagtccccatcgtgggaccgtcctcaggccactgcgcgctgcgaccaaccccgtagggtgcgctgtccaccactggtcgccctatggcaaacctctcggctgcccaaagctgaagcaacatagggcagccagcgatgatcgcgcccgcgtcagtcttcgtgcacgcctcacagagggcacggtacgtggctgctagcacggcagaaccccagctccactgcggcacgtcctgtggctgagcatccgcgatggaccgtgcgtagtggaccagccggaagtccacagcgtgcccgtgggtgctagtgaacatcacccacccgaacaaccacaacaggtacgcctcaagggagcgtcgcaccgagtaatcatcagcgtcagggtgcagaaggtccgcagtgaactggagcaaccaagccttgctaggcccgactgtagagtacggaggaagggtgctggtcggtcctaggtgtggaaggcgcatcacctgctcgaagcgcgcagtgatatcctccttccacccaacaacaccgtccacgggaccaactggtgctcccgccagcggtagcccaagcaggtacgacacgtcctgcagtgtcggagccatctccccacagggaaggtggaacgtgtgcctctcaggtctccagcggtctacaagagcggcaaggagtgaccggtctgcatcccaccgcttcgctgggtcacggtcgtccgccgccgcctcaacaagcctacacagtggtagaaggcctgccgcacgcaaccaaggaacgtgacgggggtcgacacgcaaccactcgcgcgacgtgcgtggacggaaggtgccgagctgtgcaccctcgactgctgacaggaacgagcggtggttcctgtcaatagcacggttcaacagcgccggtgtgtcgtacgccataccatcacttgcctgtccagatggactagcatctgcgccgcttggaacttctgcgttcttcgggcatttcttgtaagtatggccgcgcagatcacacttgctgtagcgtaaagtcctcccacctgcttctgactcatccatatcatttctgatgcgtctagtttggcgtcgaccctttttcacccttaacttagatggatctggaatataaaaaacttgggcactcagcgttgtgtaagatcctgagatcccgaacccatatatctcctcactccatgtatgaaagattgcttctttcctgaaataatttgagacgtacacattgggagatatgccacaatcaccggcagcagcaagaacgtgtgagcaaggaaggtgaagaagcttcggcttcatacaactgcaggtacatccaccatccgccttcaagacatattcctgcacggcttgcttgcgatagataccacgcctgctcctatcaacacacattatttcataccgatgcacttgtgtgccttgagcaacaactctatgtctccgtgcctttttgattttatcttccatgtactttgtcactacgttgccaaacactatgttgttatcggccatggacggaccaattttcttgtatcgatccctaaagtaggcttgcgtgccgtgaaggatgaattcaataatagcaaccaatggaagtacccgaactcctcgcattacccagttgtacacctctgccaaattggttgtcattatgccataccgagatccatcggtgtcgaacaatagagaccacttctccttaggctcattctcaatccactgagtgaaatttctgatggacgaccctgacctccttctcattgttggtgggtcatcatgtaatgcaccaagaggtatgggaggctcgtcaccttcaacttgtggtctgcgagattgctcatctgtttgcttcgttgtcaactcatccaacttgtcccacaacttattaaatttcttctcttggttctgtgcacagagcctcttaaagagctccataagatgcttgttcttgaattgcttgtagaaatttgcacccatgtgacgcatgcaccaccgactccgaacatcagaccacttagctggaagtcccttctcatcccaaccgttcttcaagtagtcaatagcccgcaacatacccgcatgacgatcatgtataaggcaaacgttgggcctcattcgcaccactgcaatgtgcactctctctaggaaccagtaccagctttcagtgttctcactctctacaaatgcaaaagccataggtagaacctggttgttcccatcacacccaattgctgtcaatatctgacctcggtatttaccagtcataaaagttccatctatgcatagaacaggtcgacaatgcacaaaagcattgatacaagcacccaatgagaaaaatgctctttgcagcacactctttgttcgatcatcaaccgatgtaaatgtatgtaggtcatagtaagtattattattcctctgggcaattgtggctaacaaacgaggcaaattatcataagaagcttcaaatgtgccatacctcatctcaatgatcttttgtttggctctccaggcctttgcatagcttatggtgtacttgaatttgttctcgatgtgcctaataattgattttggttcaaagccaatgttacaaacaacactgctgtacatctcacttgccacaaaaactgaagtgatgtttcggtgatacttctccaccccttgtaagtagcacttgtgctcggtgacaatgctaactttccaataatcattccatttacccttatatgcatggacacgccacggacaatcttccttcatgcacctcacttcatacacataatttgttgacttgaccaccctaaactctctctgcaatgaaactgcccaatgcttcaccgcctccttcatctcatccttatgagcataccttgcaccctcaattacctcgttctccttatactcccagggtacatgatcaccctctgatataacaagtccagagaagtcctcatttgaccaatcagtggccattacatcaccttcctcatcggatgatgcgtcgtcctccacttgctcattatccgaatcttccctctccatttcatcaacaattataccgactctctccccctcatccgccatgcccatggcctgctcctcccttggttgattttcctcatttcccatcgatggtccaacaacatcccctgcattgctagtaccctccacatcttcggttcgcattgaaacatttgtatctttctcctgtaccgacacaaatataacgaggggccatgaccgttcaaaagccatttccacataccgtctccaagcagccgtgctgtccatcggcattagttcccaaaaataaccttctgttgcacgactcactacaacagatactgacattgtgtagacttcttggtctattctaaatcctctcaacaaccaactataaattgactgaaatgttctctccgcaggcctatcgatgcccttagatgtcattacaaaatctgacagatcaacaccatctggaccaaatctaatatttccttcaccgtgaactatctgaaatgtgaccttacttgacat

SEQ ID NO: 4540 - DNA, 656 bp, Oryza sativa
  unsure (1)..(656): unsure at all n locations
  Clone ID: PAT_MRT4530_11414C.1
ctcgccgtttcttctaggtcttcttctcggtgaccggcgaggcagccggcgcggctttgccggcgagggctataggttgccggcacgtgcgacctgctccgtagcgagcgcacggggggctgccgtgactgagcagccgcaccgcgcggcaattaatgcttcgtgcctcccagtgagctgccttgatcggctgacaccctctccgcagcttcacccgagatggaggatctccccatggggcggcggaacccggcggccagcctcaccgacgacctcgtcgtcgagatcctccgccgcctccccgtccgctccgtgtgccgcttcaagcgcgtctgccggtcctggcgcaacctcatcgccgaccgtgagcaccgcaagaagctgccgcagacgctgtccggcttcttctacaaaagcatcagcggcgagcgctgcccttgctcggcgcaccacttcaccaacgtctccgggaaaggggtgcctctcatctacccgtcattctccttcctgccccagtgcgacacggtcgtccccttggactgctgncatggcctnctcctctgccgctgcttccagcccgggccctacaacagcgatgatgagattgagccgttccattatgccgtgtgcaatcctgcgaccaagaatgggtgatg

SEQ ID NO: 4541 - DNA, 762 bp, Oryza sativa
  Clone ID: PAT_MRT4530_11415C.1
atgaagcaaatatctccgccccatcatgattttaatcctgtgtccgccactggttgcaaggactacatctccttctaccttttcctcgaagacgcggtcgatgagcctgtgatgggacaggttacatttagcttactcgaccaagacgggaagccggtgctgtcacgcacccataccacccgaatgtttagcttctcacttaatagctcctttggcttccacaaattcattagaagggaagatatggagcaatcgaaacatctcaaggacgactgcttcgccgtcagtgtccatttagttatcaccaagggagcaccttccgtcaaggtaccaccatcgaacttgcacagtcattacggtgatctcctctcaagtaaacagggcgccgacgttgagttcatgatgttcgaggctctacttatctttatctacacggatatgttgccaaagatggaccaagaagacgaggtagcaatggctcaacatctgctcgtcgcatcggatacgtatggactgcagaggctcatgttgatctgcgaagatagattatgcaaccatatcaatacagactccctggcaatcatgttggtgttggccgagaagcaccactgcatacgtcttaaggaggtgtgctttgagttcctcagctcctcaacggctctagtcgagttcatggaatcaagtgactttctgtattttatacggagctgtcctactgttttgaaggatctgatttacaatgtcgctgctcatggaaaatga

SEQ ID NO: 4542 - DNA, 1380 bp, Oryza sativa
  Clone ID: PAT_MRT4530_11416C.1
atgtcggtgggtgcagatccggaggcggaggtgatcgcgctgtcgccgaggacgctgatggcgacgaacaggttcgtgtgcgagatatgcgggaaggggttccagcgagaccagaacctgcagctgcaccggcgagggcacaacctgccgtggaagctgcggcagcggagcgggaaggagccgaggaagcgggtgtacgtgtgcccggagaagagctgcgtccaccacaacccgtcgcgcgcgctcggcgacctcaccgggatcaagaagcacttctgccgcaagcacggcgagaagaagtggaagtgcgacaagtgctccaagcgctatgccgtccagtccgactggaaggcccactccaagacctgcggcacccgcgagtatcgctgcgactgcggcaccctcttctccaggagggacagcttcatcacgcaccgcgcgttctgcgacgcgctggcggaggagacggcgaggctgaacgcggcgtccggggccgccgcggcggcggcggcggccacggccacgtcgctgtgcgggcagagctacctgttcgccgggtcgggtgggccggggatggcgggcatgcggccaaacatgatgatgccgccggcggcggcggcggctggagggcagctcagggcgggtcagatgctcggtccggcggcggggggcgtcggtggggacctgtgcgacggcggcgtggcgcggcacggcgggctgtcgctgtggggtggcgaggcgttgccgtccatgggccacattggcgtcctggccagcggtggcgcggcgacagtgccgccgcagctgtacgtggatctcttcgcgccgagctccggcgcgccgccgccgcagttcgacgcggcgcagctgagctggctgtacgggaacggcaagctctcgtcgtcgaatgccagcgagctgacgagcgccacggcggcggcgaaggaggcggagagcgtgccgtccgtgttcagcaaccagcagcacgcgaagcccgcggcgcccaccgacatgtccgcgacggctctgctgcagaaggccgcgcagatcggcgccgtgacatccaccgccgcgatgcccctagtgtccccgttcgagccgaccaagcccggcggcgccaccgcctcaccggccgacgagtgcggcaagttcgacggtgcagccctattcgccgccgcgagccatcacaatgccaacctcggcggcgcaatgagcgagctcacgggggccgccggcaacgtgccttacgacgtcttgtcggcggtgcgccaccatgccggcctgaaggacgccggcggcgtcgggagagaggaaactagggatttcttgggcgttggcgtgcaagcactgtgctcgtcgtcgatacatgggtggatttaa

SEQ ID NO: 4543 - DNA, 553 bp, Oryza sativa
  Clone ID: PAT_MRT4530_11417C.1
aatacagattctgaagtttataaacacatctatgcctgaggaggatttacacctactgggttcagttcaccatttgatctttaccagataaacctgaagttcaaaccgagcagcactgcagccatgtttcccaagatagaatgacgcgtacacaaactttcagcgtgtcgagggcgaggtcgacggcggcgccgcaccccgggagcggcccgctcttgggcaccgccaccgacgcctgcctgctgtacagaaactgcagcacgagcacgagcaccagcaccttgtacgacaccagccgcggcaaccccccagcctccgccgccgcgcccaccttcttccccgacgccgaggacgacgacgacgacagtgccacgacctcctcctcctcggcaccggcgccacccacctctgccgcgtgccccccgcagcaccatcctccccggtggcgccgccgcgccactatgttcgttgccggccggcttgcaacaggagaaaagacagagagagaggaggaagggaggatgctgacggcggcgttgcctccgccggcgcg

SEQ ID NO: 4544 - DNA, 275 bp, Oryza sativa
  Clone ID: PAT_MRT4530_11418C.1
aaagtttctccttgcggctttctcacgcactagtatatgctcttccactagcaagcaagcttctctcatgtcgtgagctgtagattagggggagatttgttctttttggtctggtttttttgtggtttcttgattgttgggggtaatggcgcaccggggacggccggttcttggaggtcgccggggtggcggtgcggccggccgcggacgggaaggcattgctgccgctgctgccggcggcggagccgtcgccagtgctgccgtcgtgggacccc

SEQ ID NO: 4545 - DNA, 4922 bp, Oryza sativa
  Clone ID: PAT_MRT4530_11419C.1
atgtcaagtaaggtcacatttcagatagttcacggtgaaggaaatattagatttggtccagatggtgttgatctgtcagattttgtaatgacatctaagggcatcgataggcctgcggagagaacatttcagtcaatttatagttggttgttgagaggatttagaatagaccaagaagtctacacaatgtcagtgtcagttgtagtgagtcgtgcaacagaaggttatttttgggaactaatgccgatggacagcactgatgcttggagacggtatgtggaaatggcttttgaacggtcatggcccctcgttatatttgtgtcggtacaagagaaagatataaatgtttcaatgcaaaccgaagatgtagagggtcctatcaatgcaggggatgttgttggaccatcgatgcaaaatgaggaaaatcaaccaagggaggagcaggctatgggcatggcggatgagggggagagagtcggtataattgttgatgaaatggagagggaagattcggataatgaggaagtggacgacgacgcatcatccgatgaggaaggtgatgtaatggccactgattgggcaaatgaggacttctctggacttgttatatcagagggtgatcatgtaccctgggagtataaggagaacgaggtaattgagggtgcaagatatgctcataaggatgagatgaaggaggcggtgaagcattgggcagtttccttgcagagagagtttagggtggtcaagtcaacaaattatgtgtatgaagtgaggtgcatgaaggaagattgtccgtggcgtgtccatgcatataagggtaaatggaatgattattggaaagttagcattgtgaccgagcacaagtgctacttacaaggggtggagaagtatcaccgaaacatcacttcagcttttgtggcaagtgagatgtacagcagtgttgttggtaacattggctttgaaccaaaatcaattattaggcacatcgagaacaaattcaagtacaccataagctatgcaaaggcctggagagccaaacaaaagatcattgagatgaggtatggcacatttgaagcttcttatgataatttgcctcgtttgttagccaccattgcccagaggaataataatacgtactatgacctacatacatttacatcggttgatgatcgaataaagagtgtgctgcaaagagcctttttcgcgattccatggtgtaacaatgctttcgatttaggaaataaaatgttgttgtgatgtaatgagtgttcggactaaatacttctatcgtgtaatttcaattcaatgttgttgtaatgagtacctccgactattgttgtactagtagtattgcgaattattcggtgttgtatcataatgttatcgtgatgagtgttcggactaaacacttttgtttgtttgattgacaggaaccaccgctcgttcctgtcagcagtcgagggtgcacagctcggcaccttccgtccacgcacgtcgcgcgagtgggcccgtgttagaaggaggtactgtatgaaaagacgtggaaaaatatattatctataatattaatgtcttcacaagatattaatctttgttaggttttcaggggaggaatagctgagtttggacaaatgacagttagatctgcggagtccgttcgaggccgcggccgagggcgtgcgccggcgcccgctcgcaggaggttcacagccggcggccagttctcttccacgtggaggcggcctctcacagccgagggcaagataaggcagaaaaggggaagttgttggcaatggaggaaatcatatcaaagcagaagagggttgcaagtggtgtttttttgcatctacaagccctaagtacattggatgcaaggtacttttacatgcgtatttatgaatggttattctgtttggaatttttgttcaagatgaaacatgagctatttattctttgcttgtaggttaagacaagtggaccaaagcacacttgtggatctttcaataagtgtggtgaaacaatggtcaccactaagtgggtagctgatcgagtggtggacttgttgcgggataacccctcaaggggagcgaggcagcagtacgtcgccttgttgggcaccgcctcctggctgactagctccctgtggatggtcttcaccacccacggccgcatcgcgcggcccatggcgtccagcaccgtgttgtacacgaccaggtttggcttgacgccggccgccttcatttcctcgaacacgttgagtgcgccgtcgaagttgccgctgctcgagtgcaccctgatcaccgtggcgcatatgacggggtccagctgccatttctcggcgcgggcgcggtcgtacaggcggagggccgtctcggcgtccccggcgcggccgtacgcgtcgatcaccgccgagtacgtgagcatgtccggcgagcacccgaagtccggcatcttctcgaaccactccacggccttgcctggcatgccacaggcgcgcgcgcagctgatgacggtcgagaaggtggcgttgtccggctgcacgccctcgcgcagcatctcctcccagagcgcctcggcgtcgctccagcgccgcctcttgcgcagggccttgagcgcgacgttgtagaggatgacctccttgcgaacctcggcgttccggaggaaccaccacagcgcgagcacgacggcggcgggcctggcggaggtcgtgttgagcacgatgacggcgtcctgctcggacgggggttccgggaacgcggcctccagcgccgcggcgacgggcgcctccccggcctcgcaggcggcaagcgcggccgccgcggcggcgaggcgggcgcgtcggcccgacccggcgcgcgcgcgggcgagccccgcggcgcgcgggctgttggggttgacccagacgtacctgctcgtattgctcgacctccccggactcggattggcgtcggagggaggcggcggcgggtcttggacggagacacgggcggtggccggagagggagaggggttcttgggttggaaggagagggagattgcgcggtgaggccatgagaggagggaggaaggggaagccatgccgcgcgatgctctctctgtgtggattgggtgggggaagaaggggagagagcgcgactgctagtgcgaggagtgtggcgacgaggagggtgtcagtttgtgggcccgcgatgtcagtgacagatcagatgaaggagaggcacaataggagaccgcgccgcggcgcccttcccgctccccgcgagactccaaactcccaaaaaacaaccgcacgccgcgccgccggccgcacagaactcgcgatccgcgacgatgccgccggcgccgtcgccgctgcctccgccgttcagcgccgggcggcaacgcggcaggcctacttctcacgggtctctccgacatcgcaaccttacccgctcgacgcgctccacgtcttcctcccgttcccaccgcgcatggggatccgatcatgtttattgcagcgtcgttacgctcacgtccaggtgagacgtggttacccggacttcgtgttcgagtttgaccgtctccagccgagcgacgtcatctgggagccgtacacagaagaggccgtcgctgcgagagcaccgctaggactttcgtccttgtgcacacgcgaccaggcttactggctcaccatcctgccgatggtgttcgacattttcgttgagcctcactgcccgcagcgtgtgatgagacagttcggacttaggcaggtgtttccgggcaacgtgcagccgaccgtcctccctgccgaccactcgttgactcgacggggacagctagcaggcgcactttgggctccacgtgtacagcagtacgttgacgactgggtgttagctacagaggaggtgatcaacgagctcttcccacacacggaggagaactaccgtgactaccttcgttggtaccttcctcgcactcgtgcgcgtgtgaccttcactccagacgccccagagccgcacgttgccgctgtcacggacgcgtatcccacgcaccgtgaccgagactacttcgtggcggctgatgccgcacgggatatcagtgccgatatcaccgcagtccaagtgaggttgaacagaggtttgcacttgactgacgttgagcagagggtgaccttcgaccggatgcaggagaagatgcgtgcggtcatgcgcgtcttctcctgtcgcagcgccgtggacgtcgtacctccagctggtccggtacaaccacggcctcgcgcgcctaccgtcggagcaggacctcgacctacggcacctatttcgcacggtactgctcagcccagaggacctcgtttgccttcgagcgcccctagcttcggatcagtgcgacctacagcaccggtttcgcacgtttttgcacgattatgtcaccatgttttaactgcacgtttcctcatcgcaggacctcgtctgccttcgagcgcgttcgcaggcacgaccggcgcttccacgagctccgcaggggcgttcgccacctcttcgggcgcgttcgccacctcttcctctcacggagcgtcgatccctcgcccacacggtactttactttttattaatactgttaaatacctgtacgaaactgatggtccttgtccagcaggatttgcagccgggatcttcggtactggggcctcttcgtctcacgccggtaggactggtcctactagccagttctacgacgacgacttgcacggtgcagaccaccacgacatactaggctcctctcagcttggaggagctccagaggcgcacactcaggagcagccagaggtcacacctgtacaggcaggacgggttggccgtgccgtacccccggaccgactcacgtactcccacgggcacattagggcgcagggtaggagggacaggggtaagaggcctcgtcag

SEQ ID NO: 4546 - DNA, 957 bp, Oryza sativa
  Clone ID: PAT_MRT4530_1141C.1
atggcggcatgtcttgccgctgttgcagcatcctgccagaggaagtgcggtgagatagacatccctttcccgttcggcatcgccggtcagcccggctgcgccatgaccggcttcaagctgagctgcaacgacaccgggaacggcgtgcccaccctgctcctgcggaacgtggaggtgctcggcatctcgctgccgttaggtcaggctcggatgaagatggatatgtcctacgactgctacaacacgacaaggaaggatatcgactgcgtcgatatggttgatctgaacttgaaagggagtcccttcactttctctgacactgctaacaagtttattgtctttgggtgccgtatgctcgcttatcttggcccaggtgaacaaaatgatgtaggtagcaacctaactatcggttgtgcggccacttgtggtataggcgatgatctcgtgagtatcaacagtgccgggtgctctgggataggttgttgccaaacgaacatccctaaggggatccggtattacaaggtttggttcgacggtcgtttcaacacaacggacatctacaactggactcgttgtgcttacgcagcacttgtcgagacatccagctttaatttctccacggtttacaattccctatcaaggttcaatgacaatcttggtagccagccaccttttgtggtggactgggctattggtaattccacatgtgagcaagctaaaacaaattcagattcctacatgtgcataagcagcaatagcgtctgtttgaactcgcgaaacggacccggttacatctgcaactgccaaaatggattcgaaggaaatccttacctgaacgattcgtttggttgccaaggtaaaacaaaaggagtccatatgaggtgcaagttggaaaacaaatctgaccagctagcttattccatcattttggtggatgtattcaatatctttggttga

SEQ ID NO: 4547 - DNA, 1308 bp, Oryza sativa
  Clone ID: PAT_MRT4530_11420C.1
atggagctcttttctgcaatcctcggtgacctcactagcaggtccatctcctacgtcatggacagatactgcagcaaccagccggcggcgatcgacgacggcgtacggcagctgcgccggctgcttctacggacacacaccatcgtcgaggaggcagaagggaggcatatcaccaaccaagggatgctcccgcagctcaaggccatgagagacgagctgttcagaggccactacgtcctcgacaccttcagacaccgggctgatctcctccagaaagaggaggagaaagaagatgaacaggtgagaagctcgtttgcaatgtcaaggctcaatcctgccaagcgaatccgtttctctcgtgctagaactagtagctttcaggatttggagtccatgattcgtagcctggaagacgccattgctgacacaaaggagttcatcgtgtttctgatgagctgccctccggttatgtaccggcaacctttcagcacgcatctttatctggacaagtgtatgttcagccgtcagatcgagcgagaacaagtcatcgatttcttgctgcggattgatcctgatcctcatggtagttgtaatgacataggtgttcttccgatcattggtcccgcgttaatcgggaagagcacactgattgagcatgtctgcagagatgagagggtgaagagccacttctctctgatcttgttctacaatggagacgagctgaagcatgagacagtggccactttcagagacagatgcgatgtggatgaagatacatggaaggagctgtattactcctccgaaaaccgcattccccgtggaagcaagatcataatcacaagccgatcagaggtgtttgtgtttggaagtgcagatcctgatgagcatccaaagttgacatcaatagctatggagattgcagcagagctgagaagatctctattttgtgctcatgttgttggtgccttgctaagggttcatcttgacgcccatttctggcgcagggttcttgaaggcaccagagagtacatgcagaagaatcttatcttggcaagcgaataccctcatgatctgaagacggacaagaaccatcctcgatacgcttggataattagtgaaccaaagcctatcaaatcccttctaatctacgacagttaccagaaaggttctgaaaacgctgaggttccaaatattacaattcaggatctgctgtttggagaagcttcaggtcgggggaaatttgatatcttgctctggaaatctcaaatgccaccatactgtagccacatctgcagctgtgttgtctag

SEQ ID NO: 4548 - DNA, 260 bp, Oryza sativa
  Clone ID: PAT_MRT4530_11421C.1
gggggttggtgtttttgtgggcttggctccccccttggtcgattgtggccccgctgcttgttcccgggtcttgggggccgtgaggctttgggggggcgcctggggggccctgtgggggtctttttcttcttttttttcgggttccctcttttgcgccgtttttgttttttgtaaaccctgtgctcccagttcttttattagatcgcaaaagtcctcggggggagggggttatttcttttgcccatggggttttttttttt

SEQ ID NO: 4549 - DNA, 2301 bp, Oryza sativa
  Clone ID: PAT_MRT4530_11422C.1
atgatgctccaccacgaagcaagtgtgcaacaagcgcgagaggaagaagaagagcttgatcaccatggcgatccgatgatcacctcccctctcttgcgaccatcgacgtcgggcagctcgccggagaatggagaggaggagaactcaccggtggagctggtggcgctgacggtgccagtgagcgacgagccggagacgccggtgctgacgttcaggatgtgggtgctggggacggcgtcgtgcgcggtgctctccttccttaaccagttcttctggtaccgcaaggagccgctcaccatcaccgccatctccgcgcagatcgccgtcgtgccgctcggccgcctcatggcggcgacgctgccggagcacgccttcttccgtggccggccgtgggagttcacgcttaatccggggccgttcaatgtcaaggagcacgtgctcatcaccatcttcgccaactccggcgccggcaccgtctatgccatccacgtcatcaccggcgtccgtgtcttctacgggaaaaccctctccttcttcatctccctccttgtcgtcctcacaacacagtaccatcagatgctggggttcggctgggcgggaatattccggcgttatcttgttgagccggcgtctatgtggtggccatccaacctagtgcaggtctctctgttcagcgcacttcatgagaaggaagcacggagaaaaggtggcttgacgcggaaccagttcttcctggtggcattcgtctgcagctttgcatactacatcttcccaggctacctattccagatgctcacctccctctcctggatctgctgggtcttccccagctctgtccttgcccaacagcttggttcaggtctccgaggcctcggcgttggtgcaatcggtctcgactggtcatctatctcctcctaccttgggagccctcttgctagcccatggtttgccactgtaaatgttggtgttggcttcttcatcgtcatgtacataatcacaccaattgcatactggtttaatttctacaaggcacaaaatttccccatattttctgatggcctcttcacctcgactgggcaaaaatacaatgtatcaagcattgttgactcccatttccattttgacaccaaggcctatgagaagaatgggccactatacctcagtacttcccttcttgtcacatacggtgttggttttgcaacccttgctgcaacaattgttcatgctctcctcttccatggaagtgaaatttggctattaagtaaatcagcttttcaagaaaaaaggatggacatacacacgaaacttatgaggagatataaacaggtccctgagtggtggttcatatgcatccttattgctaacatcggaacgaccatatttgcttgtgaatactacaatgaggaactccaattgccctggtggggtgttttgtttgcatgctccattgcctttttcttcaccctcccaatagggataatcaaagcaacaacaaatcagactccaggcctgaatgtcatcacggagtacattattgggtatctgtaccctggacgacccgttgcaaatatgtgcttcaaggtatatggttacatcagcatgaaacaagctttggcatttcttgaagattttaagctgggtcactacatgaagattccaccgaggacaatgtttatggctcaggtggtgggaacttcaattgcagcatttgtgtatattggcacagcatggtggctaatggagacaatccccaacatctgcaacactgagctcctcccgtcagatagcccttggacctgcccaggtgaccatgtattctatgatgcatcagtcacatggggacttattagcccgcgcaggatatttggggacttaggcacttattcagctctaaattggttctttttgtgtggagctattgcccctctacttgtctggtttgcacacaagacattcccaggccagaactggatcttactcatcaagacgcctgtactaattggtgccaccttccagatgcctcctgctactgccgtcaactacacgacttggatacttgttgggttcttgtcaggttatgtggtctatagatatcgacgtgattggtgggagagacacaattatctgctttcaggtgcactggatgctggtttggctttcatggcggtcttaatttacttgtgcttaggcttggaggacatcagtctgaactggtggggaaatgacttggatgggtgtcctttggcttcttgtcccactgctaaaggtatagttgtcaagggatgtgcagtctatacttga

SEQ ID NO: 4550 - DNA, 337 bp, Oryza sativa
  Clone ID: PAT_MRT4530_11423C.1
tttgtggtttggcatttcctccccctttttaccttgtcctggtcggttcggctccgtggatcgtctagggtttagtgggttgagatggcagagccggatgtctagtaccgctgcttcgttggctgtctttcctgggccaccgacgaccgctttctcgagggcgtctttttcaccttcggcgagatcctcgactccaagatcattatcgacagggagacggggaggttacgtgggtttggccttttcactttctactccgagcagtcgatgcgcgacgccattgagggtttgaacggcaaggagctcgacggccgtaacatatacgtcaatgaggcct

SEQ ID NO: 4551 - DNA, 900 bp, Oryza sativa
  Clone ID: PAT_MRT4530_11424C.1
atgcccaggcccaagtgctcaactcctgccgcttcacacgccgacgatggcgacgagccgacgacgaggatgatcgaagagcaagggcgccaccgcgccagcgacagtggtagtatcaacatgtgctatgacgtcggccagcgctgctgcgccggaggccatcgcctggccacctgctgcccctcccaccctcgcctgacgcctgcagccgccgcccgtcgaccgccacagcccgggcctggcgcagcactcggcagcactccggccggcggcggccagctgatgaccccgccacaccgcacggcggcggcggacagcggcggcgtccgaccgacggcatattaccgggccccccttgcagacgacggatggagagatcgttcacgtggcgcacgcgagcagtgcctcctcccacgggcggctgtgctgtcgatcgagcgggctgggcaggggcaaccctgtggtgtccgactgtccgagccacgtgcaacggcgccctccgcccccgtcgtccccgtgaccctccggccgggcacccagcgcgccacgcatggacatgccgatgcgtccatggccgcctcctctcctcgccacgcgtggccagagcggcacggcggcgggtgggcgggcgggggaagttcgctgtctcaggtgccgaggagacaacgaggcgacaacgtgcatgacgcatcagcattgaagatggacattgaatcagtgaggtgtgcgtgctgtggcctggaagaggattgcacccaggaatacatagagaatgtcaaggcaaacttcggagggaaatggctttgtggcttatgctcagaggcggatggcactatcaagccctgcagtcaaggtggcggatggcatgaaggagatgctcagaaagaggtcaaaggataa

SEQ ID NO: 4552 - DNA, 547 bp, Oryza sativa
  Clone ID: PAT_MRT4530_11425C.1
ggggaaatgttgtttttgatgggtcgatacacgcatacccgcgtttattcccgatatacgtaggggaatttggcttcttgtggtccttttctgtttttccaagttcagatttggccccttttgctacttacaagtacgctgtaggaacattgtatggcagaagcttttttatctgttgaacaacactatcaaatggagtatcgtataagccaatcgaagtattatcagggcgcgtcaatcactgtattaattgaacgtgcctgcccaactgtattcattcaacgtgtcaatcaaaaattcaagggaggtgaggggatacagaatttgcagagtgattttgtatgtaacagaggggtctactctgttaattgtcatgaatattcacattacaaagttcttgtatcatggactgtagaattaggacgatgttggccatgcttgcactgaatttcaatcattggtatgaaaaagagttgtggtaggctatgattagttccacatctacctaccggcggtggccaagtaagttagtatgaaaacaaaggag

SEQ ID NO: 4553 - DNA, 816 bp, Oryza sativa
  Clone ID: PAT_MRT4530_11426C.1
atgcccaggcccaagtgctcaactcctgccgcttcacacgccgacgatggcgacgagccgacgacgaggatgatcgaagagcaagggcgccaccgcgccagcgacagtggtagtatcaacatgtgctatgacgtcggccagcgctgctgcgccggaggccatcgcctggccacctgctgcccctcccaccctcgcctgacgcctgcagccgccgcccgtcgaccgccacagcccgggcctggcgcagcactcggcagcactccggccggcggcggccagctgatgaccccgccacaccgcacggcggcggcggacagcggcggcgtccgaccgacggcatattaccgggccccccttgcagacgacggatggagagatcgttcacgtggcgcacgcgagcagtgcctcctcccacgggcggctgtgctgtcgatcgagcgggctgggcaggggcaaccctgtggtgtccgactgtccgagccacgtgcaacggcgccctccgcccccgtcgtccccgtgaccctccggccgggcacccagcgcgccacgcatggacatgccgatgcgtccatggccgcctcctctcctcgccacgcgtggccagagcggcacggcggcgggtgggcgggcgggggaagttcgctgtctcaggtgccgaggagacaacgaggcgacaacgtgcatgacgcatcagcattgaagatggacattgaatcagtgaggatggcactatcaagccctgcagtcaaggtggcggatggcatgaaggagatgctcagaaagaggtcaaaggataaggtaaaggggatcctctag

SEQ ID NO: 4554 - DNA, 390 bp, Oryza sativa
  unsure (1)..(390): unsure at all n locations
  Clone ID: PAT_MRT4530_11427C.1
atggacattgaatcagttaggtgtgcgtgctgtggcntgnaagaggattgcaccaaggaatacatagagaatgtcaaggcaaacttcgaagggaaatggctttgtggcttatgctcagaggcggtaggggatgagctcagtaaagacagaagagaacaggatggcatcgaagatgctatcaaagctcatatggcattctgcaggatggcactatcaagccctgcagtcaaggtggcggatggcatgaaggagatgctcagaaagaggtcaaaggataaggttatcctgtgttcttcttcgccactcgagaatatttactcagagataattgtggagaccaatcatagttgcataatcacaacaaatacaagtaatgcaagattctcataa

SEQ ID NO: 4555 - DNA, 391 bp, Oryza sativa
  Clone ID: PAT_MRT4530_11428C.1
atggatcacacgctgggcgcttcgcctcgcacggcgcactgccagttgatgccgcgcctgcaggatcatcatcaactgccccgcgtcgcgttgcggctgcgcgcgtttcaggcgttgcggctgccggggccagccggccgggggcagggcggctcgccggctcgtcagtctcggccagcaggagggatcagccgtcgcgccgcaaacccgccgccgccgtgcggtgtggcggggtcatcagctggccgccgccggccggagtgctgccgagtgctgcgccaggcccgggctgtggcggtcgacgggcggcggctgcaggcgtcaggcgagggtgggaggggcagcaggtggccaggcgatggcctccggcgcagcagcgctggccgactga

SEQ ID NO: 4556 - DNA, 207 bp, Oryza sativa
  Clone ID: PAT_MRT4530_11429C.1
cccacgcgtacgccacgcgtaagcgtacgatactgtgagtgtacacagtatatcagaactggagctgaccgagcataccaagtcaaagtgaacgggagtggagctcttctacgatcacaccctgaacctaattgatggcacatgaggctgccagttagtaattactcacttggacaacaggcaaatgcttattaagtccaagctcgg

SEQ ID NO: 4557 - DNA, 567 bp, Oryza sativa
  Clone ID: PAT_MRT4530_1142C.1
aggggtcgtcttactataaattttttttttaacaaattttttttgaatattgttttgggggggtcaaaaaaaaaaaagcaaggggggcccgcaaataagtttattggccacaaatttgacagagcaggactttgggggcttaaggcccgcaggaaagcaaaaaaaaaaagtccagagaaggggggactggtgacaaaaagggggagctcaacagggctacaggggaactgaaaagggggggaacacctataattaggctattcatgggggaggaatcatacaaggaagtttaacttgaggggcaagggggccactttacaaacgaggacagggaaaagagggtggtaaaaataattgggggggacaaataaatttggaaaaaaatttacaagcaaaaaagggggttcctaaaaaaagggggaaaagaagaacgaaaaaattttcccgccggcccaaaagatgggccctttatgccaagggggagaaattttgggatacaaaagctccaagcaaaagctccgtgaaatatttttttatggcccaaaaaaaacattggcgggggcggca

SEQ ID NO: 4558 - DNA, 152 bp, Oryza sativa
  Clone ID: PAT_MRT4530_11430C.1
aagcaaaccaccaccagggattacactcatgatgctgaaacaatgactgatcagctttgcttagataagaaaggctcggcatatacaaggattagataaaagcagggatcaacttactgggatcacctttatttaagccccttattgcaact

SEQ ID NO: 4559 - DNA, 1835 bp, Oryza sativa
  Clone ID: PAT_MRT4530_11431C.1
tggggcgtctaaactagtggatccccccccggccggctggttttcggctcgaccggtgcttttttttttttcctgttaacaacatgcaatttagctccacagttaattaatcagtgtgatacagagaacagaacacaacaccatcttcatttttttctttttcgctactagtattgccactacagacctgaagtgtaggtaactccagtggcaggtagccacgcatccccaacgataaagtttgccacggtgaacctcgtggcgtccgacgtggacatcgacgtgtgcacgccgctccacgtcacccgccgacgtgtccccgcgccaggcccggtgttgccgtactcgccatagtagagcgtgctgagcccgaactggcccgaccactcgagccacccggccggtgcgatcgaacggtccaggaacgtccccatcacgaccgtccgtgagtacctccgccacggacggcccagatacaccggcgtgccgccgaggtccggcgcgccggtgatccggcaccgatggatagagatgccggtgttctggttcgggtcggaccggccctgggccgtgacggtgtcctcctggcccgggctgggccgccgggcccggatctcgcagccctggatgaccgccgcggcgttgccgaagatgaagtccaccgtgccggagatgtcgtcggcggcgtagaactgccggttggagtgcacgtagagcgtgtcctggtacgcctcaatgccgcaattgtacacgacagagaggtcgccgccgacgcgcagcgccaccgcctggcccttccccggcccggcactgttcacgatcgtcaggcccttggctataaaccccgaccccattgcagcgacggtggcggaggcgtaggtggtgtagccgccggcgacgctccggtggccggagatgaccgtcttccccttgccgtcgccgagcagcatcacgtccttctgcttgctcgtgatgctcacgctctcctcgtacctcccagccttcacgtagatcacctttcggctccgtccgccgccgccgccgccgctcgccgtggggtggtgcgccggcggcggcggcgcggtcacggcggcgatcgcgtcgctgatgctcgtgtgcgtcccgctgccgtcgagggccaccacggcgtccggcgcgatggtgctcgccggggatgagaggaggtgcctgtcgtgcttggtgacccaggatgggaacgcggcgcggctcggcggcgccggcgaggagctcccgctgccgccattgttgagcttggcgtggagagccagcgccgtgccgatgaactgctcgagcgcggcgacccgggcgcgtacggcggagcgcgccgcggggtcgggaacggcggcgaggctgtcgccgcacgtgccctggttcgtcagcgcggcgctgagccacgtcgtcacgccggccgcgtccgcggcgcgcgcggcgagcgcgtcgtggagctggtcgaggctgatgtcgagcagctcggcgcagtcgtccatgccgctcggcgccacgcgtggcctcgacgacgacgccgacaggttgcgcgccagcgcgcgcgccgactcggcgcgggtcatcgcgaactgcaccgacgccgcgaacgggtcgttggccgcgccccgcgccgccgccgacgagagcgccgtctcgcacgcgctcgggtacggcgtcgccatgcagatggccgtgacgttcacgctcgacgccgccgccgccgccgaggcggcaatcctcgggacgacggccacattgtccttcgccgccgccgtgtcgccgtggttggcagcgacagccgccaccggtgtcgctagagctagcgccat

SEQ ID NO: 4560 - DNA, 364 bp, Oryza sativa
  Clone ID: PAT_MRT4530_11432C.1
gaccaacatttgcgatatattttttgttcgaagggagaggaagcatggcgaatcttacatgaagaacaggggctaacaccaaagttaagcaagaacatgtgcgtcacatgaaacatatgcataattgtggaagacgacaaaaagggcatactgccattcatcagcgacaagcaataaacatgttttggatgaaattaacttgaacaagacatgcataacaatgagacgaacagacagacagaaacacggtacgtcctatgcactctccctaagcacaggtagcagctgctttttatgtctacccattaccccacaatcgctatgcatgccaagatatggatcgctgggaaaacagcctgatgtt

SEQ ID NO: 4561 - DNA, 3879 bp, Oryza sativa
  Clone ID: PAT_MRT4530_11433C.1
atgtcaagtaaggtcacatttcagatagttcacggggaaggaaatattagatttggtccagatggtgttgatctgtcagattttgtaatgacatctaagggcatcgataggcctgcggagagaacatttcagtcaatttatagttggttgttgagaggatttagaatagaccaagaagtctacacaatgtcagtgtcagttgtagtgagtcgtgcaacagaaggttatttttgggaactaatgccgatggacagcactgatgcttggagacggtatgtggaaatggcttttgaacggtcatggcccctcgttatatttgtgtcggtacaagagaaagatataaatgtttcaatgcaaaccgaagatgtagagggtcctatcaatgcaggggatgttgttggaccatcgatgcaaaatgaggaaaatcaaccaagggaggagcaggctatgggcatggcggatgagggggagagagtcggtataattgttgatgaaatggagagggaagattcggataatgaggaagtggacgacgacgcatcatccgatgaggaaggtgatgtaatggccactgattgggcaaatgaggacttctctggacttgttatatcagagggtgatcatgtaccctgggagtataaggagaacgaggtaattgagggtgcaaggtatgctcataaggatgagatgaaggaggcggtgaagcattgggcagtttccttgcagagagagtttagggtggtcaagtcaacaaattatgtgtatgaagtgaggtgcatgaaggaagattgtccgtggtgtgtccatgcatataagggtaaatggaatgattattggaaagttagcattgtgaccgagcacaagtgctacttacaaggggtggagaagtatcaccgaaacatcacttcagcttttgtggcaagtgagatgtacagcagtattgttggtaacattggctttgaaccaaaatcaattattatgcacatcgagaacaaattcaagtacaccataagctatgcaaaggcctggagagccaaacaaaagatcattgagatgaggtatggcacatttgaagcttcttatgataatttgcctcgtttgttagccaccattgcccagaggaataataatacgtactatgacctacatacatttacatcggttgatgatcgaacaaagagtgtgctgcaaagagcctttttctcattgggtgcttgcatcaatgcttttgtgcattgtcgacctgttctatgcatagatggaacttttatgacaggtaaataccgaggtcagatattgacagcaattgggtgtgatgggaacaaccaggttctacctatggcttttgcatttgtagagagtgagaacactgaaagctggtactggttcctagagagagtgcacattgcagtggtgcgtatgaggcccaacgtttgccttatacatgatcgtcatgcgggtatgttgcgggctattgactacttgcagaacggttgggatgagaagggacttccagctaagtggcctgatgttcggagtcggtggtgcatgcgtcacatgggtgcaaatttctacaagcaattcaagaacaagcatcttatggagctctttaagaggctctgtgcacagaaccaaaagaagaaatttaatgagttgtgggacaagttggatgagttgacaacgaagcaaacagatgagcaatctcgcagaccactagttgaaggtgacgagcctcccatacctcttggtgcattacatgatgacccaccaacaatgagaaggaggtcagggtcgtccatcagaaatttcactcagtggattgagaatgagcctaaggagaagtggtctctattgttcgacaccgatggatctcggtatggcataatgacaaccaatttggcagaggtgtacaactgggtaatgcgaggagttcgggtacttccattggttgctattgttgaattcatccttcacggcacgcaagcctactttagggatcgatacaagaaaattggtccgtccatggccgataacaacatagtgtttggcaacgtagtgacaaagtacatggaagataaaatcaaaaaggcacggagacatcgagttgttgctcaaggcatacaagtgcatcggtatgaaataatgtgtgttgataggagcaggcgtggtatctatcgcaagcaagccgtgcaggaatgtgtcttgaaggcggatggtggatgtacctgcagttgtatgaagccgaagcttcatcaccttccttgctcacacgttcttgctgctgccggtgattgtggcatatctcccaatgtgtacgtctcaaattatttcaggaaagaagcaatctttcatacatggagtgaggagatatatgggttcgggatctcaggatcttacacaacgctgagtgcccaagttttttatattccagatccatctaagttaagggtgaaaaagggtcgacgccaaactagacgcatcagaaatgatatggatgagtcagaagcaggtgggaggactttacgctgcagcaagtgtgatctgcgcggccatacttacaagaaatgcccgaagaatgcagaagttccaagcggcgcagatgctagtccatctggacaggcaagtgatggtatggcgtacgacacaccggcgctgttgaaccgtgggattgacaggaaccaccgctcgttcctgtcagcagtcgagggtgcacagctcggcaccttccgtccacgcacgtcgtgcgagtggttgcgtgtcgacccccgtcacgttccttggttgactcgacggggacagctagcaggcgcactttgggctccacgtgtacagcagtacgttgacgactgggtgttagctacagaggaggtgatcaacgagctcttcccacacacggaggagaactaccgtgactaccttcgctggtaccttcctcgcactcgtgcgcgtgtgaccttcactccagacgccccagagccgcacgttgccgctgtcacggacgcgtatcccatgcaccgtgaccgagactacttcgtggcggctgatgccgcacgggatatcagtgccgatatcaccgcagtccaagtgaggttgaacagaggtttgcacttgactgacgttgagcagagggtgaccttcgaccggatgcaggagaagatgcgtgcggtcatgcgcgtcttctcctgtcgcagcgccgtggacgtcgtacctccagctggtccggtacaaccccggcctcgcgcgcctaccgtcggagcaggacctcgacctacggcacctgtttcgcacggacctcgtctgccttcgagcgcgttcgcaggcacgaccggcgcttccgcgagctccgcaggggcgttcgccacctcttcgggcgcgttcgccagctcttcctctcacggagcgtcgatccctcgcccacacgcaggatttgcagccgggatcttcggtactggggcctcttcgtctcacgccggtaggactggtcctactagccagttctacgacgacgacttgcacggtgcacaccaccacgacgtactaggctcctctcagcttggaggagctccagaagcgcacactcaggagcagccagaggtcacacctgtacaggcaggacgggttggccgtgtcgtacccccggaccgactcacgtactcccaggggcacattagggcgcagggtaggagggacagggttcttttcattcatatggtgctagaacaacttatgctcacgacaacacactttcggcgcttcacggtagtgtcagatccagtagcgcgcacagtccacaacagcacacatgaaaagcggcagctcgagttatcactatcaactttcggcgctgcctgttgacataaagtgaatcacgcccacgcg

SEQ ID NO: 4562 - DNA, 6651 bp, Oryza sativa
  Clone ID: PAT_MRT4530_11434C.1
atgccgtctgctccctcgcgtggcagcacccgcgttgacgccacccgacgcgggctcgccggccatggccatggccgcagccactcgctctcctcccgccgcgcggcgccgctcccgtgccgccggcggccgccgccgcacgggattgggtcaaatcaggccgcatcaaccaccaacattttctaccgtcccgtcatcttcttctccgtgctcctttgtttccaataccgtgccgccggcgttgcatcggacacgctcagcaatggccgcaacctcactgatggcgacacgctcgtgtcagccaatggctccttcactctggggttcttctcacccggcttgccaagcaggagatacctcgcgatatggttctccgagtcggcggacgccgtctgggtggccaaccgcgacagcccactgaacgacaccgccggcgtagtggttatcgatggcacgggcgggctcgtcctgctcgacggcgccgccggccaggccgcctggtcgtcgaacacgactggctcgtctccatcggtggcggtgcagctgctcgagtctgggaacctcgtcgtgcgcgaccagggcagcggcgacgtgctgtggcagtcgttcgacaacccgtcgaacaccctgatcgccggcatgaggctcggcaggaacccacggaccggcgccgagtggtccctcacgtcgtggcgcgcgcccgacgacccggcgacggggggctgccgccgcgtgatggacacgagagggctagcggactgcgtctcgtggtgcggcgccggcaagaagtaccgcacggggccatggaacgggctgtggttcagcggtgtcccggagatggcatcgtactcgtccatgttcgcgaaccaggtggtggtcaagcccgacgagatcgcctacgtcttcaccgccgccaccgccgcggcccccttctcccgcctcgtgctgagtgaggccggcgtgatccagcgcctcgtgtgggatcccagcagcaaggggtggaacacgttcgcgcaggcgccgcgcgacgtatgcgacgactacgccaagtgcggcgcgttcgggctgtgcaacgtgaacaccgcgtcgacgctcttctgcagctgcatggcggggttcagcccgatgttcccctcccagtggtccatgagggagacctccggtggttgccggaggaacgcgccgctggagtgcggcaacgggagcaccacggacgggttcgtgccggtgcgcggcgtgaagctccccgacacggacaacgccacggtggacacgggcgccacgcttgacgagtgcagggcgaggtgcttcgccaactgttcctgcgtcgcctacgccgccgcggacatccgaggcgccggcggcggcagcggatgcgtgatgtggacgggtgacgtcattgacgttcggtatgtcgacaaagggcaggatctctatttgaggctggcaaagcctgaactagttaacaataagaagaggactgtgataaaagttctgctcccagttacagcagcatgtttgcttctgctgatgagcatgttccttgtgtggttacgcaagtgcagaggcaaacgtcagaataaggttgtccagaaaaggatgctaggatacttgagtgcattaaatgaacttggtgatgaaaatttagaactcccgtttgtcagttttggagacattgctgctgcaacaaataatttttctgacgacaacatgctcggacaaggtggcttcggaaaggatcagtttcgtcaaataactgctagtaagttggatgttttagtgtttcaagaagtcggaagttctacaccaggcggcaatggcatgatgcaacccctccggcctccatctcgcgcgcgctgcattgggagcggcggacgccgggcgtcggggcacttggacgtgcgggccgagccgccctccgccggttcactgcccctgttcgacggatggctccgcggcacccgcgcccgctcgccggttgacgtggcgcctccgtgccggggcagccgacgtcacttgggtcttccaccggccaccgcctcagccctcatccaagcgcttccctctcctgatctcctccgctacctcgccgagcgggagtgcgggacaatggggttggacgcggcgacccaacgctgggtcaccggctcactgcccgaacctactcagctcggctcaccgctctgccggtgtgacctctggctgctcctgagtgtgcgcctctggagctcctccaagctgagaggagcctagtacgtcgtggtggtgtgcaccgtgcaagtcgtcgtcgtagaactggctagtaggaccagtcctaccggcgtgagacgaagaggccccagtaccgaagatcccggctgcaaatcctgcgtgcgaaacaggtgccgtaggtcgaggtcctgctccgacggtaggcgcgcgaggccgtggttgtaccggaccagctggaggtacgacgtccacggcgctgcgacaggagaagacgcgcatgaccgcacgcatcttctcctgcatccggtcgaaggtcaccctctgctcaacgtcagtcaagtgcaaacctctgttcaacctcacttggactgcggtgatatcggcactgatatcccgtgcggcatcagccgccacgaagtagtctcggtcacggtgcatgggatacgcgtccgtgacagcggcaacgtgcggctctggggcgtctggagtgaaggtcacacgcgcacgagtgcgaggaaggtaccagcgaaggtactcacggtagttctcctcagtgtgtgggaagagctcgttgatcacctcctctgtagctaacacccagtcgtcaacgtactgctgtacacgtggagcccaaagtgcgcctgctagctgtccccgtcgagtcaacgagtggtcggcagggaggacggtcggcatcggcaggatggtgagccagtaagcctggtcgcgtgtgcacaaggacgaaagtcctagcggtgctctcgcagcgacggcctcttctgtgtacggctcccagatgacgtcgctcggctggagacggtcaaactcgaacatgaagtccgggtaaccacgtctcacctggacgtgagcgtaacgacgcccacgtcgacaccagtaagtccccatcgtgggaccgtcctctggccactgcgcgctgcgaccaaccccgtagggtgcgctgtccaccactggtcgacctatggcaaacctctcggctgcccaaagctgaagcaacatagggcagccagcgatgatcgctcccgcgtcagtcttcgtgcacgcctcacagagggcacggtacgtggctgctagcacggcagaaccccagctccactgcggcacgtcctgtggctgagcatccgcgatggaccgtgcgtagtggaccagccggaagtccacagcgtgcccgtgggtgctagtgaacatcacccacccgaacaaccacaacaggtacgcctcaagggagcgtcggaccgagtaatcatcagcgtcagggtgcagaaggtccgcagtgaactggagcaaccaagccttgctaggcccgactgtagagtacggaggaagggtgttggtcggtcctaggtgtggaaggcgtatcacctgctcgaagcgcgcagtgatatcctccttccacccaaaaaaaccgtccacgggaccaactggtgctcccgtcagcggtagcccgagcaggtacgacacgtcctgcagtgtcggagccatctccccacagggaaggtggaacgtgtgcgtctcaggtctccagcggtctacaagagcagcaaggagtgaccggtctgcatcccaccgcttcgctgggtcacggtcgtccgccgccgcctcaacaagcctacaaagtggtagaaggcctgccgcacgcaaccaaggaacgtgacgggggtcgacacgcaaccactcgcgcgacgtgcgtggacggaaggtgccgagctgtgcaccctcgactgctgacaggaacgagcggtggttcctgtcaatcccacggttcaacagcgccggtgtgtcgtacgccataccatcacttgcctgtccagatggactagcatctgcgccgcttggaacttctgcattcttcgggcatttcttgtaaatatggccgcgcagatcacacttgctgcagcgtaaagtcctcccacctgcttctgactcatccatatcatttctgatgcgtctagtttggcgtcgaccctttttcacccttaacttagatggatctggaatataaaaaacttgggcactcagcgttgtgtaagatcctgagatcccgaacccatatatctcctcactccatgtatgaaagattgcttctttcctgaaataatttgagacgtacacattgggagatatgccacaatcaccggcagcagcaagaacgtgtgagcaaggaaggtgatgaagcttcggcttcatacaactgcaggtacatccaccatccgccttcaagacacattcctgcacggcttgcttgcgatagataccacgcctgctcctatcaacacacattatttcataccgatgcacttgtgtgccttgagcaacaactctatgtctccgtacctttttgattttatcttccatgtactttgtcactacgttgccaaacactatgttgttatcggccatggacggaccaattttcttgtatcgatccctaaagtacgcttgcgtgccgtgaaggatgaattcaacaatagcaaccaatggaagtacccgaactcctcgcattacccagttgtacacctctgccaaattggttgtcattatgccataccgagatccatcggtgtcgaacaatagagaccacttctccttaggctcattctcaatccactgagtgaaatttctgatggacgtccctaacctccttctcattgttggtgggtcatcatgtaatgcaccaagaggtatgggaggctcgtcaccttcaactagtggtctgcgagattgctcatctgtttgcttcgttgtcaactcatccaacttgtcccacaactcattaaatttcttctcttggttctgtgcacagagcctcttaaagagctccataagatgcttgttcttgaattgcttgtagaaatttgcacccatgtgacgcatgcaccaccgactccgaacatcaggccacttagctggaagtcccttctcatcccaaccgttctgcaagtagtcaatagcccgcaacatacccgcatgacgatcatgtataaggcaaacgttgggcctcatacgcaccactgcaatgtgcactctctctaggaaccagtaccagctttcagtgttctcactctctacaaatgcaaaagccataggtagaacctggttgttcccatcacacccaattgctgtcaatatctgacctcggtatttacctgtcataaaagttccatctatgcatagaacaggtcgacaatgcacaaaagcattgatgcaagcacccaatgagaaataggctctttgcagcacactctttgttcgatcatcaaccgatgtaaatgtatgtaggtcatagtacgtattattattcctctgggcaatggtggctaacaaacgaggcaaattatcataagaagcttcaaatgtgccatacctcatctcaatgatcttttgtttcgctctccaggcctttgcatagcttatggtgtacttgaatttgttctcgatgtgcctaataattgattttggttcaaagccaatgttaccaacaacactgctgtacatctcacttgccacaaaagctgaagtgatgtttcggtgatacttctccaccccgtgtaagtagcacttgtgctcggtcacaatgctaactttccaataatcattccatttacccttatatgcatggacacgccacggacaatcttccttcatgcacctcacttcatacacataatttgttgacttgaccaccctaaactctctctgcaaggaaactgcccaatgcttcaccgcctccttcatctcatccttatgagcataccttgcaccctcaattacctcgttctccttatactcccagggtacatgatcaccctctgatataacaagtccagagaagtcctcatttgcccaatcagtggccattacatcaccttcctcatcggatgatgcgtcgtcgtccgcttcctcattatccgaatcttccctctccatttcatcaacaattatacggactctctccccctcatccgccatacccatggcctgctcctcccttggttgattttcctcattttgcatcgatggtccaacaacatcccctgcattgataggaccctctacatcttcggtttgcattgaaacatttatatctttctcttgtaccgacacaaatataacgaggggccatgaccgttcaaaagccatttgcacataccgtctccaagcagcagtgctgtccatcggcattagttcccaaaaataaccttctgttgcacgactcactacaactgatactgacattgtgtagacttcttggtctattctaaatcctctcaacaaccaactataaattgactgaaatgttctctccgcagggctatcgatgcccttagatgtcattacaaaatctgacagatcaacaccatctggaccaaatctaatatttccttcaccgtgaactatctgaaatgtgaccttacttgacat

SEQ ID NO: 4563 - DNA, 4185 bp, Oryza sativa
  Clone ID: PAT_MRT4530_11435C.1
atgtcaaataaggtcacatttcagatagttcacggtgaaggaaatattagatttggtccagatggtgttgatctgtcagattttgtaatgacatctaagggcatcgataggcctgcggagagaacatttcagtcaatttatagttggttgttgagaggatttagaatagaccaagaagtctacacaatgtcagtatcagttgtagtgagtcgtgcaacagaaggttatttttgggaactaatgccgatggacagcactgctgcttggagacggtatgtggaaatggcttttgaacggtcatggcccctcgttatatttgtgtcggtacaagagaaagatataaatgtttcaatgcaaaccgaagatgtagagggtcctatcaatgcaggggatgttgttggaccatcgatgcaaaatgaggaaaatcaaccaagggaggagcaggccatgggcatggcggatgagggggagagagttggtataattgttgatgaaatagagagggaagattcggataatgaggaagcggacgacgacgcatcatccgatgaggaaggtgatgtaatggccactgattgggcaaatgaggacttctctggacttgttatatcagagggtgatcatgtaccctgggagtataaggagaacgaggtaattgacggtgcaaggtatgctcataaggatgagatgaaggaggcggtgaagcattgggcagtttccttgcagagagagtttagggtggtcaagtcaacaaattatgtgtatgaagtgaggtgcatgaaggaagattgtccgtggcgtgtccatgcatataagggtaaatggaatgattattggaaagttagcattgtgaccgagcacaagtgctacttacaaggggtggagaagtatcaccgaaacatcacttcagcttttgtggcaagtgagatgtacagcagtgttgttggtaccattggctttgaaccaaaatcaattattaggcacatcgagaacaaattcaagtacaccataagctatgcaaaggcctggagagccaaacaaaaaattattgagatgaggtatggcacatttgaagcttcttatgataatttgcctcgtttgttagccaccattgcccagaggaataataatacttactatgacctacatacatttacatcggttgatgatcgaacaaagagtgtgctgcaaagagcctttttctcattgggtgcttgcatcaatgcttttgtgcattgtcgacctgttctatgcatagatggaacttttatgacagataaataccgaggtcagatattgacagcaattgggtgtgatgggaacaaccaggttctacctatgacttttgcatttgtagagagtgagaacactgaaagctggtactggttcctagagagagtgcacattgcagtggatgagaagggacttccagctaagtggcctgatgttcggagtcggtggtgcatgcgtcacatgggtgcaaatttctacaagcaattcaagaacaagcatcttatggagctctttaagaggctctgtgcacagaaccaagagaagaaatttaatgagttgttggacaagttggatgagttgacaacgaagcaaacggatgagcaatctcgcataccacaagttgaaggtgacgagcctcccatacctcttggtgcattacatgatgacccaccaacaatgagaaggaggaaagaagcaatctttcatacatggagtgaggagatatatgggttcgggatctcaggatcttacacaacgctgagtgcccaagttttttatattccagatccatctaagttaagggtgaaaaagggtcgacgtcaaactagacgcatcagaaatgatatggatgagtcagaagcaggtgggaggactttacgctgcagcaagtgtgatttgcgcggccatacttacaagaaatgcccgaagaatgcagaagttccaagcggcgtagatgctagtccatctggacaggcaagtgatggtatggcgtacgacacaccggcgctgttgaaccgtgggattgacaggaaccaccgctcgttcctgtcagcagtcgagggtgcacagctcggcaccttccgtccacgcatgtcgcgcgagtggttgcgtgtcgacccccgtcacgttccttggttgcgtgcggcaggccttctaccactttgtaggcttgttgaggcggcggcggacgaccgtgacccagcgaagcggtgggatgcagaccggtcactccttgccgctctggtagaccgctggagacctgagacgcacacgttccaccttccctgtggggagatggctctgacactgcaggacgtgtcgtacctgctcgggctaccgctggcgggagcaccagttggtcccgtggacggtgtttttgggtggaaggaggatatcactgcgcgcttcgagcaggtgatgcgccttccacacttaggactggccaacacccttcctccgtactctacagtcgggcctagcaaggcttggttgctccagttcactacggaccttctgcatcctgacgctgatgataactcggtccgacgctcccttgaggcgtacctgttgtggttgttcgggtgggtgatgttcactagcacccacgggcacgctgtggacttccggctggtccactacgcacggtccatcgcggatgctcagccacaggacgtgccgcagtggagctggggttctgccgtgctagcagccacgtaccgtgccctctgtgaggcgtgcacgaagactgacgcgggagcgatcatcgctggctgtcctatgttgcttcagctttgggcagccgagaggtttgccatagggcgaccagtggtggacagcgcaccctacggggttggtcgcagcgcgcagtggccagaggacggtcccacgatggggacttactggtgtcgacgtgggcgtcgttacgctcacgtccaggtgagacgtggttacccggacttcgtgttcgagtttgaccgtctccagccgagcgacgtcatctgggagccgtacacagaagaggccgtcgctgcgagagcaccgctaggactttcgtccttgtgcacacgcgaccaggcttactggctcaccatcctgccgatggtgttcgacattttcgttgagcctcactggccgcagcgtgtgatgagacagttcggacttaggcaggtgtttcccggcaacgtgcagccgaccgtcccccctgccgaccactcgttgactcgacggggacagctagcaggcgcactttgggctccacgtgtacagcagtacgttgacgactgggtgttagctacagaggaggtgatcaacgagctcttcccacacacggaggagaactaccgtgactaccttcgctggtaccttcctcgcactcgtgcgcgtgtgaccttcactccagacgccccagagccgcacgttgccgctgtcacggacgcgtatcccacgcaccgtgaccgagactacttcgtggcggctgatgcggcacgggatatcagtgccgatatcaccgcagtccaggtgaggttgaacagagcgccgtggacgtcgtacctccagctggtccggtacacccacggcctcgcggtcctaccgtcggagcaggacctcgtttgtcttcgagcgcccctagcttcggagcagtgcgacctacagcaccggacctcgtatgccttcgagcgcgttcgcaggcacgaccggcgcttccgcgagctccgcaggggcgttcgccacctcttcaggcgcgttcgccagctcttcctctcacggagcgtcgatccctcgcccacacgccgggatcttcggtactggggcctcttcgtctcacgccgcttggaggagctccagaggcgcacactcaggagcagccagaggtcacacctgtacaggcaggacgggttggccgtgccgtacccccggaccgactcacgtactatagatggccatgtggactgcccggcacggtacggcctaggcccggccgtgcctgggccgaggcatgttgggccggcacggcccgaccgacgcaccgggccgtgtctctctatactttgtgtgccgggcctggcctaccggcccatcgtgccgggccaacccagcgtgccggtggagaggcccaggcacagcccggcggtcaggccgggccggcacgggcccgacccaagcgatgtttag

SEQ ID NO: 4564 - DNA, 5598 bp, Oryza sativa
  Clone ID: PAT_MRT4530_11436C.1
tcatctatctctcctctcctctcctctctctcggggacggagaggcagcggcacgcggtggccggctgccggcgggagaggaggaagcggcgcagccaggcgcggcgtgcggaggcggtttggcgcgatggcgcggcaccggcaatgaaggggaagaaggcgaagggagctccatgggcggcggtgggtttggggaagggctggcggcggcggggatggtggtgagatcagcgcggggtggaacagggaggtcggcgcggcgtcaacagcagcggccgggcgcggcggctcggcagtgcgcggccaggaggtggcgtagggggaggaatcggggcggcgccgggcagaggagggagggaaggggagcttcacggggcggcggtggattgggaaggccggcatggtggtgtggagaagaggaggccgacggctgtggggatggagaggatggccagcgaaggtggggatggagaggatggaccggcgtggtggggaagggcgccacgaggagaggctaccgcgggcgacgccggcgccgctgtgctcggctgagcgtcggccgactccgcgtggcggtgggaatggagaggtgcgccgaccttctccccaccgttccatggcgcgccatcgcctcacgggccgccgaaggcggaggagctcgggcgccgcccggtgacgctgcgtggggcggcggcggccgccgcgtccattggcgtcagcggcggaagggacgaggccctgcgcggctgcggcccgcgaggcgatggcgctgggcacgctcctccgcccgcgaggcgatgacagggagtcgccgaggatgccgaggtcgacgtcgacgtcgtccgcggcggagggcggtcgccactccctctcccgctggccgccgtcagctgcgcacctctccctccgtccgtcgccatcaagtccccgcccatggctctcggccatcgccggcctccctgcgtcctccctccctgcccgcctcgccggtctttgcgcgttgctccctcctctcttgccgccggccgcgcgtcgccgcgcgccgttgtcttctgtggcgcccctgtccctcctaccctgcgccctaatgtgcccctgggagtacgtgagtcggtccgggggtacggcacggccaacccgtcctgcctgtacaggtgtgacctctggctgctcctgagtgtgcgcctctggagctcctccaagctgagaggagcctagtacgtcctggtggtctgcaccgtgcaagtcgtcgtcgtagaactggctagtaggaccagtcctaccggcgtgagacgaagaggccccagtaccgaagatcccggcgtgtgggcgagggatcgacgctccgtgagaggaagagctggcgaacgcgcccgaagaggtggcgaacgcccctgcggagctcgcggaagcgccggtcgtgcctgcgaacgcgctcgaaggcatacgaggtcctgcgatgaggaaacgtgcagttaaaacatggtgacacattcgtgcaaaagcagctggaggtacgacgtccacggcgctgcgacaggagaagacgcgcatgaccgcacgcatcttctcctgcatccggtcgaaggtcgacctctgctcaacgtcagtcaagtgcaaacctctgttcaacctcacttggactgcggtgatatcggcactgatatcccgtgcggcatcagcccccacgaagtagtctcggtcacggtgcgtgggatacgcgtccgtcacaacggcaacgtgcggctctggggcgtctggagtgaaggtcacacgcgcacgagtgcgaggaaggtaccagcgaaggtagtcatggtagttctcctccgtgtgtgggaagagctcgttgatcacctcctctgtagctaacacccagtcatcaacgtactgctgtacacgtggagcccaaagtgcgcctgctagctgtccccgtcgagtcaacgagtggtcggcagggaggacggtcggctgcacgttgcccggaaacaactgcctaagtccgaactgtctcatcacacgctgcgggcagtgaggctcaacgaaaatgtcgaacaccatcggcaggatggtgagccagtaagcctggtcgcgtgtgcacaacgacgaaagtcctagcggtgctctcgcagcgacggcctcttctgtgtacggctcccagatgacgtcgctcggctggagacggtcaaactcgaacacgaagtccgggtaacctcgtctcacctggacgtgagcgtaacgacgcccacgtcgacaccagtaagtccccatcgtgggacagtcctctggccactgcgcgctgcgaccaaccccgtagggtgcgctgtccaccactggtcgacctatggcaaacttctcggctgcccaaagctgaagcaacatagggcagccagcgatgatcactcccgcgtcagtcttcgtgcacgcctcacagagggcacggtatgtggctgctagcacggcagaaccccagctccactgcggcacgtcctgtggctgagcatccgcgatggaccgtgcgtagtggaccagccggaagtccacaacgtgcccgtgggtgctagtgaacatcacccaaccgaacaaccacaacaggtacgcctcaagggagcgtcggaccgagttatcatcagcgtcagggtgcagaaggtccgcagtgaactggagcaaccaagccttgctaggcccgactgtagagtacggaggaagggtgttggccggtcctaggtgtggaaggcgcatcacctgctcgaagcgcgcagtgatatcctccttccacccaaaaacaccgtccacgggaccaactggtgctcccgccagcggtagcccgagcaggtacgacacgtcctgcagtgtcggagccagcatcacctgctcgaagcgcgcagtgatatcctccttccacccaaaaacaccgtccacgggaccaactggtgctcccgccagcggtagcccgagcaggtacgacacgtcctgcagtgtcggagccatctccccacagggaaggtggaacgtgtgcgtctcaggtctccagcggtctaccagagcggcaaggagtgaccggtctgcatcccaccgcttcgctgggtcacggtcgtccgccgccgcctcaacaagcctacaaagtggtagaaggcctgccgcacgcaaccaaggaacgtgacggaggtcgacacgcaaccactcgcgcgacgtgcgtggatggaaggtgccgagctgtgcaccctcgactgctgacaggaacgagcggtggttcctgtcaatcccacggttcaacagcgccggtgtgtcgtacgccataccatcacttgcctgtccagatggactagcatctgcgccgcttggaacttctgcattcttcgggcatttcttgtaagtatggccgcgcagatcacacttgctgcagcgtaaagtcctcccacctgcttctgactcatccatatcatttctgatgcgtctagtttggcgtcgaccctttttcacccttaacttagatggatctgtaatgtaaaaaacttgggcactcagcgttgtgtaagatcctgagatcccgaacccatatatctcctcactccatgtatgaaagattgtttctttcctgaaataatttgagacgtacacattgggagatatgccacaatcaccggcagcagcaagaacgtgtgagcaaggaaggtgatgaagcttcggcttcatacaactgcaggtacatccaccatccgccttcaagacacattcctgcacggcttgcttgcgatagataccacgcctgctcctatcaacacacattatttcataccgatgcacttgtgtgccttgagcaacaactctatgtctccttgcctttttgattttatcttccatgtactttgtcactacgttgccaaacactatgttgttatcggccatggacagaccaattttcttgtatcgatccctaaagtacgcttgcgtgccgtgaaggatgaattcaacaatagcaaccaatggaagtatccgaactcctcgcattacccagttgtacacctctgcaaaattggttgtcattatgccataccgagatccatcggtgtcgaacaatagagaccacttctccttaggctcattctcaatccactgagtgaaatttctgatggacgaccctgacctccttctcattgttggtgggtcatcatgtaatgcaccaagaggtatgggaggctcgtcaccttcaacttgtggtctgcgagattgctcatctgtttgcttcgttgtcaactcatccaacttgtcccacaactcattaaatttcttctcttggttctgtgcacagagcctcttaaagagctccataagatgcttgttcttgaattgcttgtagaaatttgcacccatgtgacgcatgcaccaccgactccgaacatcaggccacttagctggaagtcccttctcatcccaaccgttctgcaagtagtcaatagtccgcaacatacccgcatgacgatcatgtataaggcaaacgttgggcctcatacgcacaactgcaatgtgcactctctctaggaaccagtaccagctttcagtgttctcactctctacaaatgcaaaagccataggtacaacctggttgttcccatcacacccaattgctgtcaatatctgacctcggtatttaccaacaacactgttgtacatctcacttgccacaaaagctgaagtgatgtttcggtgatacttctccaccccttgtaagtagcacttgtgctcggtcacaatgctaactttccaataatcattccatttacccttatatgcatggacacgccacggacaatcttccttcatgcacctcacttcatacacataatttgttgacttgaccaccctaaactctctctgcaaggaaactacccaatgcttcaccgcctccttcatctcatccttatgagcataccttgcaccgtcaattacctcgttctccttatactcccagggtacatgatcaccctctgatataacaagtccagagaagtcctcatttgcccaatcagtggccattacatcaccttcctcatcggatgatgcgtcgtcgtccgcttcctcattatccgaatcttccctctccatttcatcaacaattataccgactctctccccctcatccgccatgcccatggcctgctcctcccttggttgattttcttcattttgcatcgatggtccaacaacatcccctgcattgataggaccctctacatcttcggtttgcattgaaacatttatatctttctcttgtaccgacacaaatataacgaggggccacgaccgttgaaaagccatttccacataccgtctccaagcagcagtgctgtccatcggcattagttcccaaaaataaccttctgttgcacgactcactacaactgatactgacattgtgtagacttcttggtctattctaaatcctctcaacaaccaactataaattgactgaaatgttctctccgcaggcctatcgatgcccttagatgtcattacaaaatctgacagatcaacaccatctggaccaaatctaatatttccttcaccgtgaactatctgaaatgtgaccttatttgacat

SEQ ID NO: 4565 - DNA, 1648 bp, Oryza sativa
  Clone ID: PAT_MRT4530_11437C.1
ctcgagttttttttttttggtgctccccccctttttttttttttttttttttttttttttttgacaggtaaacaggcagttcatactttcagataaccatatctaactttccaggtacaggtattgcaaccatgacttcatatcatgtaagcaccatacatgatatcaggtattgcaacagacagcacaacataaaattcagtctaacaacccgcagactatgtcttgactctgaccaggtttccacatggctaatctaaatgtcttgagaccaggattccaaaatggctaactaattgacatctccttttcgctcaagacaatggtttttcccaatggctaactatagcatcttgttttcgccttcaggtggtggcgacgaaagatcaaaggtttgatttcgcctactcggtttcgtctatccagtcaccatagatcctgctgatcttgtcagggcccttccatttctgaatgggcctctgtacctgcccagacctttggccggcaatggtagaacgctgcgcctgcacgcctagatggtacacgtctgcatgagggagcactgtggtggatgcagcagcggtctctgctggagctttcgcagataccacagcttgcttggagtcgggagttgctgcagcatccctgctgtctatgtcaacaagtcccccaccatacttgtggagttcagctgctccatgagcgaagtggcatttgctgccaaaggggcagtacccagtcatctcccacttgttacagatcctcgtcttccagttcgacggcttctgcatcggcccattccccgccgcggcggaggcggaggcggccgcggcggccgcagaattgtagctcccgccaccgccgccgccgccgacgctcggcgagaggctgatcgcgacgctctccctggccttggactgctcgtcgtggaggaacgtgcacgcgtcgccgtaggggcatccctcgtcggtgtagaacttcttgcagtgcctccccttgtaggccctcccggagccgccgccgccgccgccgccgcagcccgcgtcgccgccggcggtgggtcccgacgacgtcatgatggggatctggtgctcctccctcgcctccgtggcctcctcgtgcgccgcgacgatctcctgccagttgggcggcggcttgcggagctcctccatgccgtgggcgaagttgcagttggtgacgtaggggcaggtccccgccctgaacttgcagcacagcttcgtcttgaagaacatcttcccgatcgcccgcgacttgctcgtgttcccgccgccttcgccgccgccgccgccgcgggatttcttgcccggaggtggctgctcgctcccggccctcgaggagccgccgccgccgccgtcggcgttccactggctgttgtagtcgtcctcggtggcccatatcccggcgtccccgccctgcgccgccgcgttcgcccaggcgtcggggcccgccgcgtccgggatgatgtggatggcgttggtgtaatccatcacccgctaccaagaatcgaaggcagcggaagaaggaggaggtgggagagacgaacagcgaggtcacttgcttgctcggtgatggcgaacggcggcgccggcggcgaaggcggcagcgctatcccgccgaggagatgagt

SEQ ID NO: 4566 - DNA, 7569 bp, Oryza sativa
  Clone ID: PAT_MRT4530_11438C.1
ctacgaactccgtagccaggggccagctaccctagggatcaacgcccttgacagtagaactctgaattcagttctgaaagagcaaccttgtatccaccagttgcagttaggtatgcttctatcacactgcatggttccaccgtcagcaatcttaatctgcactggatgtgataaggtctgaattcctgccagctttctagccacttgctcatcaatgaaggagtgagtacttccactatcaacaagcattaagagttccaagccctgaacccaacctctcaccctaatagactttgaagattccactccagctattgcctgacttgaaactgccataagagtgccctcagcttcagccacaatatcatcaccaactgggtcatcatcttcttgcaaagcttctaaaagctcttccatgacatgtaactgtactgttgaggcacatttgtggtcccttccccacctttcaccacaagtgaaacacagccccttagattttctgtaagccttaagtgaggacaatctatcatctctgggagtaatcttagctgcttcaggggttttcttatcctcattcacaacaggtctcactggtagaggtgtcaaagaaacttgagcagtgttcctgaaattggacttcactggagtagagaactccaaccttcgagttcccagcattgcctcctcctgtaataaagccaaagagcaagcagtatccagatcttgggggcgttgcaccataattacagtgtgaatagcatcctttaaaccctctacgaacttagtgacgaagtacacaggcttcagttcactatcgtaagcaatcaattggtgcatcaagctatcaaacttatccacatattcagttacactaccagtctgtctaatgtgtatgtattgccttatcagctgttgatgcctatccctagaaaacttagcacaaactttctcacaaagttctacccaagtgactcctattaattgggacctaactgactgcaaccaaaatgaggcattcccagaaaaattgagggtggctatcctaacccaatgagcagggctgactccataagtatcaaagtaggcttcacagttttctctccacatttgggggttatctccatcaaattgtggacatggcataggaggtaaaccagtgcttgtgcccacagcactaccagtaaaagcagttcgcatggctggatcatggaaataaggagcaggtgtggagaacaagattgagttcgtaccattggccgggggtggtgattggggatgagacccaagcacctccgcccgtatttcagcagcattgcgggcgcccaattgggcggtaaggtcaggcttcggctccgccttgttcaggagttgaagctgatcgaactgaagctgcagatttccaacggtggtcgccagatcagtcaccttcttctcgagctgtggcttccacgaatccactgatgtcttgaggttcagcatatccgcgcgggagttcttctccagatccaccaacttggagtccgtctcggtcagcttcttcaggatcagatccagcttggcctcgttctccatgattttgaacgcttgcttggtttgataccttggcttttctagtttgacgcaacgggatccacttcccctgttccttttcgcggatttcagctgcaagagccgatctccaatccccaatcggaacccttttgctgccggatcaagaattgggtgggatagtaggctctgataccaagttttgtcaattcctttggcccacattggcccactatagcgagggttaggaacacgagctcgaatgggcttctttgctgtagcgcttgaagtctcttctatctcctgctctgctgctatctccagttctactgcattgttctcctgttctccatcaggcaagatctcggcctcgacagcgccgccgccgagtccggctccggcatgttcctcgactgctcctgcaaggacgacctctcctgcgcccataagcaatgcgccgagacctggttcaaattcaggggcaacaggtaatctctggaacgccgtcgtgcccacggcgctctggaacgcgcaccggagcgacgccgccacgacatcatcttcctccccgtcgatcatccatgtggcctcactaacctcgtggacacacatgcatgctagatcttggagacgtttgagctgtcgccattctcccggagctccgcatcgccgtcgagccgttccaaccgaagctgtcgccgcgcaggaggtagcgtcggccgccgcagttgaacctgcgcccagccgctgcgcagcgccggtcgccacctccatgacgtcggtgccggtggcctcgcagagcgcggagatggcgttcaccgatgacaccctctgcaccaagaacgcgttcacggcgagcttggacagctccgccgaccagaggttggtggtgatgatccggtcgacggggacccattgcgcgtacacgtccttcagcgcctggaactcgacgacatgggcgttgtgcgcgaggatcttctctatggcctcggccgtcttgacggggacggtggacttctcgacgacgaccttgctggagcgtgacgagtcggcgatcatcctcgccgcgctctcccagtaggcgaggtcggcggccttgccggcgccgcctcgccgccttgccgccacgccacgcctggccgcttgtccaccggtgccgcctggcctctctctgaaacaaagcagagatgtaaagttataacccactaattccctgtccctcctaccctgcgccctaatgtgcccctgggagtacgtgagtcggtccgggggtacggcacggccaacccgtcctgcctgtacaggtgtgacctctggctgctcctgagtgtgcgcctctggagctcctccaagctgagaggagcctagtacgtcctggtggtctgcaccgtgcaagtcgtcgtcgtagaactggctagtaggaccagtcctaccggcgtgagacgaagaggccccagtaccgaagatcccggctgcaaatcctgcgtgtgggcgagggatcgacgctccgtgagaggaagagctggcgaacgcgcctgaagaggtggcgaacgcccctgcggagctcgcggaagcgccggtcgtgcctgcgaacgcgctcgaaggcatacgaggtccgtgcgaaaccggtgctgtaggtcgcactgctccgaagctaggggcgctcgaagacaaacgaggtcctgctccgacggtaggaccgcgaggccgtgggtgtaccggaccagctggaggtacgacgtccacggcgctgcgacaggagaagacgcgcatgaccgcacgcatcttctcctgcatccggtcgaaggtcgacctctgctcaacgtcagtcaagtgcaaacctctgttcaacctcacctggactgcggtgatatcggcactgatatcccgtgccgcatcagccgccacgaagtagtctcggtcacggtgcgtgggatacgcgtccgtgacagcggcaacgtgcggctctggggcgtctggagtgaaggtcacacgcgcacgagtgcgaggaaggtaccagcgaaggtagtcacggtagttctcctccgtgtgtgggaagagctcgttgatcacctcctctgtagctaacacccagtcgtcaacgtactgctgtacacgtggagcccaaagtgcgcctgctagctgtccccgtcgagtcaacgagtggtcggcaggggggacggtcggctgcacgttgccgggaaacacctgcctaagtccgaactgtctcatcacacgctgcggccagtgaggctcaacgaaaatgtcgaacaccatcggcaggatggtgagccagtaagcctggtcgcgtgtgcacaaggacgaaagtcctagcggtgctctcgcagcgacggcctcttctgtgtacggctcccagatgacgtcgctcggctggagacggtcaaactcgaacacgaagtccgggtaaccacgtctcacctggacgtgagcgtaacgacgcccacgtcgacaccagtaagtccccatcgtgggaccgtcctctggccactgcgcgctgcgaccaaccccgtagggtgcgctgtccaccactggtcgccctatggcaaacctctcggctgcccaaagctgaagcaacataggacagccagcgatgatcgctcccgcgtcagtcttcgtgcacgcctcacagagggcacggtacgtggctgctagcacggcagaaccccagctccactgcggcacgtcctgtggctgagcatccgcgatggaccgtgcgtagtggaccagccggaagtccacagcgtgcccgtgggtgctagtgaacatcacccacccgaacaaccacaacaggtacgcctcaagggagcgtcggaccgagtaatcatcagcgtcagggtgcagaaggtccgcagtgaactggagcaaccaagccttgctaggcccgactgtagagtacggaggaagggtggtggtcggtcctaggtgtggaaggcgcatcacctgctcgaagcgcgcagtgatatcctccttccacccaaaaacaccgtcgatgggaccaactggtgctcccgccagcggtagcccgagcaggtacgacacgtcctgcagtgtcggagccatctccccacagggaaggtggaacgtgtgcgtctcaggtctccagcggtctacaagagcggcaaggagtgaccggtctgcatcccaccgcttcgctgggtcacggtcgtccgccgccgcctcaacaagcctacaaagtggtagaaggcctgccgcacgcaaccaaggaacgtgacgggggtcgacacgcaaccactcgcgcgacgtgcgtggacggaaggtgccgagctgtgcaccctcgactgctgacaggaacgagcggtggttcctgtcaatcccacggttcaacagcgccggtgtgtcgtacgccataccatcacttgcctgtccagatagactagcatctgcgccgcttggaacttctgcattcttcgggcatgtcttgtaagtatggccgcgcagatcacacttgctgcagcgtaaagtcctcccacctgcttctgactcatccatatcatttctgatgcgtctagtttggcgtcgaccctttttcaccctaaacttagatggatctggaatataaaaaacttgggcactcagcgttgtgtaagatcctgagatcccgaacccatatatctcctcactccatgtatgaaagattgcttctttcctgaaataatttgagacgtacacattgggagatatgccacaatcaccggcagcagcaagaacgtgtgagcaaggaaggtgatgaagcttcggcttcatacaactgcaggtacatccaccatccgccttcaagacacattcctgcacggcttgcttgcgatagataccacgcctgctcctatcaacacacattatttcataccgatgcacttgtgtgccttgagcaacaactctatgtctccgtgcctttttgattttatcttccatgtactttgtcactacgttgccaaacactatgttgttatcggccatggacggaccaattttcttgtatcgatccctaaagtaggcttgcgtgccgtgaaggatgaattcaacaatagcaaccaatggaagtacccgaactcctcgcattacccagttgtacacctctgccaaattggttgtcattatgccataccgagatccatcggtgtcgaacaatagagcccacttctccttaggctcattctcaatccactgagagaaatttctgatggccgaccctgacctccttctcattgttggtgggtcatcatgtaatgcaccaagaggtatgggaggctcgtcaccttcaacttgtggtctgcgagattgctcatctgtttgcttcgttgtcaactcatccaacttgtcccacaactcattaaatttcttctcttggttctgtgcacagagcctcttaaagagctccataagatgcttgttcttgaattgcttgtagaaatttgcacccatgtgacgcatgcaccaccgactccgaacatcaggccacttagctggaagtcccttctcatcccaaccgttctgcaagtagtcaatagcccgcaacatacccgcatgacgatcatgtataaggcaaacgttgggcctcatacgcaccactgcaatgtgcactctctctaggaaccagtaccagctttcagtgttctcactctctacaaatgcaaaagccataggtagaacctggttgttcccatcacacccaattgctgtcaatatctgacctcggtatttacctgtcataaaagttccatctatgcatagaacaggtcgacaatgcacaaaagcattgatgcaagcacccaatgagaaaaaggctctttgcagcacactctttgttctatcttcaaccgatgtaaatgtatgtaggtcatagtaagtattattattcctctgggcaatggtggctaacaaacgaggcaaattatcataagaagcttcaaatgtgccatacctcatctcaatgatcttttgtttggctctccaggcctttgcatagcttatggtgtacttgaatttgttctcgatgtgcctaataattgattttggttcaaagccaatgttaccaacaacactgctgtacatctcacttgccacaaaagctgaagtgatgtttcggtgatacttctccaccccttgtaagtagcacttgtgctcggtcacaatgctaactttccaataatcattccatttacccttatatgcatggacacgccacggacaatcttccttcatgcacctcacttcatacacataatttgttgacttgaccaccctaaactctctctgcaatgaaactgcccaatgcttcaccgcctccttcatctcatccttatgagcataccttgcaccctcaattacctcgtactccttatactcccagggtacatgatcaccctctgatataacaagaccagagaagtcctcatttgcccaatcagtggccattacatcaccttcctcatcggatgatgcgtcgtcctccgcttgctcattatccgaatcttccctctccatttcatcaacaattataccgactctctccccctcatccgccatgcccatggcctgctcctcccttggttgattttcctcattttgcatcgatggtccaacaacatcccctgcattgctaggaccctccacatcttcggtttgcattgaaacatttgtatctttctcttgtaccgacacaaatataacgaggggccatgaccgttcaaaagccatttccacataccgtctccaagcagcagtgctgtccatcggcattagttcccaaaaataaccttctattgcacgactcactacaacagatactgacattgtgtagacttcttggtctattctaaatcctctcaacaaccaactataaattgactgaaatgttctctccgcaggcctatcgatgcccttagatgtcattacaaaatctgacagatcaacaccatctggaccaaatctaatatttccttcaccgtgaactatctgaaatgtgaccttacttgacat

SEQ ID NO: 4567 - DNA, 348 bp, Oryza sativa
  Clone ID: PAT_MRT4530_11439C.1
atggaggcggcggcgccagccatgctggcgccctcctccctggggcggcgccagctgctcctcctaccacgtcgtcgcgtggtgaccggagcacatgccatccgaattctggactgcgagaagagaggccacagtggacaggggaaagaagacaaagatgtcaatagcctcgtttgcaaaaaccgttgtgcagggaagcaccggaagctttcgcgatttggatcccgaccaggtttaccaaattatctggagccagatcacctagagttaagtataactctaccgggtggagttggtcaaatctgtgccattcggcatacttcaagggctaggattaagccacattaa

SEQ ID NO: 4568 - DNA, 1202 bp, Oryza sativa
  Clone ID: PAT_MRT4530_1143C.1
tcatcgccgcggccgctggacgccgacgctgacatggaagtggtcctcgagctcaccggcgtgggcccaggcggcgacgaggtgagcgaggatgcacacggtggtgggggtggagccgcggatgcagaggcgacggaagcggcggacggcggtcgacgtcgagcatctggaggcggaggcgcgtcgtgccactcttggatctcggccaccacgccgagcacctcgtcgcggccatctagatcgtgtgttgcaggagttgtggagttcttgcaaaggctgtcgatgacggaagtgcgggtgcgatcggtagaggcggtgcgccggtagcctcctttgcggcggttgcgccgccgccgctgccatggccggggcagggcttccctcttctgcgtcggtggcccctccgatgcatcgctctgagctggccaatggggcccagcctccttcgtcgtcgcctcgcaccatgccgccgcaaccatccttccccttcccctcctccgcctcccccacctcaccgacaacgacgaccatctcctcttttgtaacgctccgcttttcgtgaggcgttaaaaacgacctcgcctccgctataaaaacccaagcccctcccatcgaatcctcctctcgtttcacttccatcaccgccgcgccattgttgctgctcgccccgctctcgccgtcgccgtccgccgccgagcaccggaggagccggtgcgtgcgtggacgcgtgacggggagctccgggctgccccatcgccacctctccctccctccttccccggccgcgcaccctcggtgccgcgccgccccgccgtcgcgtccacctcgccgcgactccatccgcgccgccgacgctgtttctctcgtcggtgagctccccaccgaaccacttccccctgtcgcacgccgcgccatgccgccgccgttcgccacagctcgccgcgcgccctcgccatgtcccgggcatcactcgccgtcgccatgatcccctaggctagctcgtcgccgcccgttgcttgaaacgagttcccggagccgtgtagaagctccttccccggtgaattggactcccgttgccccggcgagttttccccttttctccgccggcgatggctggcgccgcaatccaccggcgtcgggccttctctcgccgattccttgcgccgcgaacctccccgtgtccccttgaaccttcccaggct

SEQ ID NO: 4569 - DNA, 5697 bp, Oryza sativa
  Clone ID: PAT_MRT4530_11440C.1
tcaggatgccacgttagccggtcctcggttcctcctctctctctgcctgttgagcgcgagcgcgaggcttgcaggcgagcagatggttgaggactcggcgagctcggaccggtgcacgacgcggaaggggtccgggtgaccggcgagggcgcggccgacggctgcaacgcccacggcctcggcggcagagaggaggagatcggcgaccagcgccgccgccgccgtgcttcctccacgcgctggccaccaccgcctccacggggacctcgccgcccctagggccctccacgccggcgcacaaggggcttgccgcggaggacgagcggcgtggagctccagacgcgccgccagcgggaggcgagcgcggcggtgcgagtcgcgtccttgacgggaggcgggcgacgaggaggtcgtcggggagcgcgctgacgcggtcctcgccgtcgtagccctcggcggcggaaagcgtggcgccgttgtcggaggcgggatggccggggaaccaccggaggcggccttggacgtggcgctgtcgtcgtcgtcgtcctcggagtcggggaagaaggtggacgcggcggcggcggaggctagggggttgccgcggctagtgtggatggaaagtttcagcgtgtcgagggcgaggtcgacggcggcgccgcaccgcgtgtgccagcaaccccaggcgccgcaccccgggagcggcccgctattgggagccgccaccgacgcctgcctgctgtacagaaactgcagcacgagcacgagcaccagcaccttgtaccgcaccagccgcggcaaccccctagcctccgccgccgcgcccaccttcttcctcgacgccgaggacgacgacgacgacagtgccacgacctcctcctcctcggcaccggcgccgcccacctctgccgcgtgccccacgcagcaccaccctccccggtggcgccgccgcgccactatgttcgttgccggccggcttccaacaggagaaaagagtgagagagagagagagagaggaggaagggaggatgctgacggcggcgttgcctccgccggcgcgacgccggctgccggaccttctcctctcccctccccccggcggcctcctcccccacagcgccgcccgtcgccggccctgtccctcctaccctgcgccctaatgtgcccctgggagtacgtgagtcggtccgggggtacggcacggccaactcgtcctgcctgtacaggtgtgacctctggctgctcctgagtgtgcgcctctggagctcctccaagctgagaggagcctagtacgtcgtggtggtgtgcaccgtgcaagtcgtcgtcgtagaactggctagtaggaccagtcctaccggcgtgagacgaagaggccccagtaccgaagatcccggctgcaaatcctgctggacaaggactatcagtttcatacaggtatttaatagtattaataaaaagtaaagtaccgtgtgggcgagggatcgacgctccgtgagaggaagagctggcgaacgcgcccgaagaggtggcgaacgcccctgcggagctcgcggaagtgccggtcgtgcctgcgaacgcgctcgaaggcagacgaggtccgtgcgaaacaggtgccgtaggtcgaggtcctgctccgacggtaggcacgcgaggccgtggttgcaccggaccagctggaggtacgacgtccatggcgctgcgacaggagaagacgcgcatgaccgcacgcatcttctcctgcatccggtcgaaggtcaccctctgctcaacgtcagtcaagtgcaaacctctgttcaacctcacttggactgcggtgatatcggcactgatatcccgtgcggcatcagcccccacgaagtagtctcggtcacggtgcgtgggatacgcgtccgtgacagcggcaacgtgcggctctggggcgtctggagtgaaggtcacacgcgcacgagtgcgaggaaggtaccagcgaaggtagtcacggtagttctcctccgtgtgtgggaagagctcgttgatcacctcctctgtagctaacacccagtcgtcaacgtactgctgtacacgtggagcccaaagtgcgcctgctagctgcctaagtccgaactgtctcatcacatgctgcgggcagtgaggctcaacgaaaatgtcgaacaccatcggcaggatggtgagccagtaagcctggtcgcgtgtgcacaaggacgaaagtcctagcggtgctctcgcagcgacggcctcttctgtgtacggctcccagatgacgtcgctcggcaggagacggtcaaactcgaacacgaagtccgggtaacctcgtctcacctggacgtgagcgtaacgacgcccacgtcgacaccagtaagtccccatcgtgggaccgtcctctggccactgcgcgctgcgaccaaccccgtagggtgcgctgtccaccactggtcgacctatggcaaacctctcggctgcccaaagctgaagcaacatagggcagccagcgatgatcgctcccgcgtcagtcttcgtgcacgcctcacagagggcacggtacgtggctgctagcacggcagaaccccagctccactgtggcacgtcctgtggctgagcatccgcgatgaaccgtgcgtagtggaccagccggaagtccacagcgtgcccgtgggtgctagtgaacatcacccacccgaacaacaacaacaggtacgcctcaagggagcgtcggaccgagtaatcatcagcgtcagggtgcagaaggtccgcagtgaactggagcaaccaagccttgctaggcccgactgtagagtacggaggaagggtgttggccggtcctaggtgtggaaggcgcatcacctgctcgaagcgcgcagtgatatcctccttccacccaaaaacaccgtccacgggaccaactggtgctcccgccagcggtagcccgagcaggtacgacacgtcctccagtgtcggagccatctccccacagggaaggtggaacgtgtgcgtctcaggtctccagcggtctaccagagcggcaaggagtgaccggtctgcatcccaccgcttcgctgggtcacggtcgtccgccgccgcctcaacaagcctacaaagtggtggaaggcctgccgcacgcaaccaaggaacgtgacgggggtcgacacgcaaccactcgcgcgacgtgcgtggacggaaggtgccgagctgtgcaccctcgactgctgacaggaacgagcggtggttcctgtcaatcccacggttcaacagcgccggtgtgtcgtacgccataccctcacttgcctgtccagatggactagcatctgcgccgcttggaacttctgcattctttgggcatttcttgtaagtatggccgcgcagatcacacttgctgcagcgtaaagtcctcccacctgcttctgactcatccatatcatttctgatgcgtctagtttggcgtcgaccctttttcacccttaacttagatggatctggaatataaaaaacttgggcactcagcgttgtgtaagatcctgagatcccgaacccatatatctcctcactccatgtatgaaagattgcttctttccgatgcacttgtgtgccttgagcaacaactctatgtctccgtgcctttttgattttatcttccatgtactttgtcactacgttgccaaacactatgttgttatcggccatggacggaccaattttcttgtatcgatccctaaagtacgcttgcgtgccgtgaaggatgaattcaacaatagcaaccaatggaagtacccgaactcctcgcattacccagttgtacacctctgctaaattggttgtcattatgccataccgagatccatcggtgtcgaacaatagagaccacttctccttaggctcattctcaatccactgagtgaaatttctgatggacgaccctgacctccttctcattgttggtgggtcatcatgtaatgcaccaagaggtatgggaggctcgtcaccttcaacttgtggtctgcgagattgctcatctgtttgcttcgttgtcaactcatccaacttgtcccacaactcattaaatttcttctcttggttctgtgcacagagcctcttaaagagctccataagatgcttgttcttgaattgcttgtagaaatttgcacccatgtgacgcatgcaccaccgactccgaacatcaggccacttagctggaagtcccttctcatcccaaccgttctgcaagtagtcaatagcccgcaacatacccgcatgacgatcatgtataaggcaaacgttgggcctcatacgcaccactgcaatgtgcactctctctaggaaccaataccagctttcagtgttctcactctctacaaatgcaaaagccataggtagaacctggttgttcccatcacacccaattgctgtcaatatctgacctcggtatttacctgtcataaaagttccatctatgcatagaacaagtcgacaatgcacaaaagcattgatgcaagcacccaacgagaaaaaggctctttgcagcacactctttgttcgatcatcaactgatgtaaatgtatgtaggtcatagtaagtattattattcctctgggcaatggtggctaacaaacgaggcaaattatcataagaagcttcaaatgtgccatacctcatctcaataatcttttgtttggctctccaggcctttgcatagcttatggtgtacttgaatttgttctcgatgtgcctaataattgattttggttcaaagccaatgttaccaacaacactgctgtacatctcacttgccacaaaagctgaagtgatgtttcggtgatacttctccaccccttgtaagtagcacttgtgctcggtcacaatgctaactttccaataatcattccatttacccttatatgcatggacacgccacggacaatcttccttcatgcacctcacttcatacacataatttgttgacttgaccaccctaaactctctctgcaaggaaactgcccaatgcttcaccgcctccttcatctcatccttatgagcataccttgcaccctcaattacctcgttctccttatactcccagggtacatgatcaccctctgatataacaagtccagagaagtcctcatttgcccaatcagtggccattacatcaccttcctcatcggatgatgcgtcgtcgtccacttcctcattatccgaatcttccctctccatttcatcaacaattataccgactctctccccctcatccgccatgcccatagcctgctcctcccttggttgattttcctcattttgcatcgatggtccaacaacatcccctgcattgataggaccctctacatcttcggtttgcattgaaacatttatatctttctcttgtaccgacacaaatataacgaggggccatgaccgttcaaaagccatttccacataccgtctccaagcatcagtgctgtccatcggcattagttcccaaaaataaccttctgttgcacgactcactacaactgacactgacattgtgtagacttcttggtctattctaaatcctctcaacaaccaactataaattgactgaaatgttctctccgcaggcctatcgatgcccttagatgtcattacaaaatctgacagatcaacaccatctggaccaaatctaatatttccttcaccgtgaactatctgaaatgtgaccttacttgacat

SEQ ID NO: 4570 - DNA, 658 bp, Oryza sativa
  Clone ID: PAT_MRT4530_11441C.1
ggtagcagttgaaggtagcaacgtacgtacaaacgtctaaggaaggtgatggctcgttactcactagccatgctgcatcaaccgatgggaattaatcagcaaatcagctggcctggagtgagtgagtgagtgagctgatcactggaccgggcattgatatgatcctcgcatatatgcacacggatccaccaaccctgtgtacacacatagtgcccgactgcgtcggtcgctggcgtgtgatagcgtggccgtgattgacgtggccaatttcttgacgattatcgagtgcgcgagcgagcggcaggatatttttgggctgcaaatgttcgaggtttcgtggacaatcgatgaacacggctggatcttcatttttctctctgattgatgagacgtgtggatcgatagaaatgatttgatgcattgaggggtcttggaatcttggtaccgtgtaaagcctttctgccgtgtggcaacgtccactctcgctgccgggctactccggctgagttgttccgtccggtccttttggtcccaggttaactgcacgtctgcacatagatagcgcccatgtgcggctacaaacggcaggcatgcgtgcacactattacatagagctaccgtgttgaaagcttgaggctgtgtttagttggatccaaag

SEQ ID NO: 4571 - DNA, 209 bp, Oryza sativa
  unsure (1)..(209): unsure at all n locations
  Clone ID: PAT_MRT4530_11442C.1
gacgagccagtagtagccaatggnttccntcctgctgctgctgcgagcaatcgtcatcggcgtcgacgtcgaggagaggcagctcgtcagcggcgcgaggnaggcggcggaggaggcggagaggtcttgttcgaagcatccggcgatcccccggcgatncggcttcttctccgacaacgatntngaggaagaacggtngctggtctcat

SEQ ID NO: 4572 - DNA, 448 bp, Oryza sativa
  Clone ID: PAT_MRT4530_11443C.1
cggacgcgtaggttacccactcatctcccaacaacctccgattctacaccaacggggggcccggccttccactctagtccaccatgttcctcgacatgtcactctgctacataccctaatccattctccttcaccttttcatcaagctctaccaatcccttactctcacctaactcttcaactgatcaatacccctttctatagaccccctactttttctctcatcatatcaaatcggatccgatcgcatcccatcagattacatgtttattaatgtgtatgaaaaaagacaaacctaacatcagtgcactattatgaatatccatctgcttactaagtaccttgctagatctttcaaccaattgtactctaccatagaccaattttactcttaatttatcttatttcatacaaacaattaacgctaaatacttctacttgttcttgc

SEQ ID NO: 4573 - DNA, 315 bp, Oryza sativa
  Clone ID: PAT_MRT4530_11444C.1
gggcaacatcgtctttcggacgctttgatgactccttcagcgcggcctccctcaaggcctacgtcgccgagttcatttccaccctcgtcttctgttttaccggcgtcggcttcgccatcgcctacaccaagttgaccggtggtgcgccgcttgacccggccgggctggtcgtcgtggtggtgtgcccacgggttcgggctgttcgtggcggtggccatctgcgccaacatctcctgcggtcacgttaacccggacgtcaccttcggactttgcccttcgcggccagatcaccatgcttaccggccgctttttact

SEQ ID NO: 4574 - DNA, 831 bp, Oryza sativa
  Clone ID: PAT_MRT4530_11445C.1
atggccgtgggcgtcctcgacgcgccgcttccgccgccgatctgccggccggcgtcctgccacgccgcttcatcccctccgtcgcttccgtctggtgccaccgccgccacgtcgccgccggcgctctccatggacgagttcaacgagaagttcttcgaagagtacggctgcgacctcaccgagctgctcttcaccgaggaggaagtccgggttctgatgctcgagtacgaagccgagaaggcgcacctgctctcccatggcgaggtgaaggagacggcgcccgccgagcaggtgcccgatgcaccgcgccccagcaaaaaggcgcgcggcgagaatggcaaggcggcagcggccgagaatgtggaggtccagacgccgccgccaccacttgtcgccgatgcaccgcgccacagcaagaagaggaaggcgccaccgccgccgtcacctccccgagaagaggaggccgaggacgcggtgttccagactacgccgccgccgtcgcacaagaaggtggcggagcgcatcctgaaccggcggttcttcccgccggacccgtcgcacgggggcacgatcctgtggtgcctgtgccgggagctcctcccgcgtggcggcccccgctgcgcgctgcaccagaaggcgccgttccggtcgtggatgtcggagcagggctacgtcgaggaagccggcggcgcgggcggctgggctctggtgcccaagctgtccgcggaatgcgggcgcagcctgttccagcggtacgcgcggtggcgccgccgcgcgtggatgccgacccgcttcttcctggagaccacccagccgccgaccaggacgtga

SEQ ID NO: 4575 - DNA, 368 bp, Oryza sativa
  unsure (1)..(368): unsure at all n locations
  Clone ID: PAT_MRT4530_11446C.1
aaggcaaatggcattgatcaatgctggtgaacaaggatcaagtcaaatggcaacccctntaaggcctccaanagctgcaaanaagatccctccaaanaaagggaaaaaataagtgattntaagtagtattttcatttgtggncgattttntagtggcaaacataggctttnttttgcaatatgaacctgtgtgacttggttatgtaacctcttatatttggttatgtaatntggatggaattntcaaatttggttatttanacttgtttggcttnttgtacgaacaaccgtattatggntacatgctgccaaaatttaagtgacnttttttagtaaaaaaaaaaaaaaaaaaaaaaaaaaaaaaaaaa

SEQ ID NO: 4576 - DNA, 951 bp, Oryza sativa
  Clone ID: PAT_MRT4530_11447C.1
atggcgtccaagctgggtatggttgtgctactgatctcgggcctctttgctgcccgttgcgcggccgtggtgaccaccggcgaacccgtcgtcgccggcctctcctgggggttctatgacacgtcgtgcccgtcggtggagggcatcgggtgcgacgcgtcggtcctcctgacgggttcccaaagcgagctgggtgagatacccaaccagacgctgcggccgtcggcgctgaagctcatcgaggacatccgcgccgccgtacactccgcctgcggcgccaaggtgtcctgcgccgacatcaccacgctcgccacgcgtgacgccatcgtcgcctccggcgggccctacttcgacgtgcctctggggcggcgcgacgggctggcaccggcgtcgagcgacaaggtgggcctcctgccggcgcccttcttcgacgtgcccacgctcatccaggcgttcaaggaccgaaacctggacaagacggacctggtggcgctgtccggcgcgcacaccatcggactaggccactgcggcagcttcaacgaccgcttcgatggctccaagcccatcatggaccctgtgctggtgaagaagctgcaggccaagtgcgccaaggacgtgccggtgaactcggtcacgcaggagctggacgtccgcacgcccaacgccttcgacaacaagtactacttcgacctcatcgccaagcaggggatcttcaagtccgaccagggcctcatcgaggacgcgcagaccaaccgcaccgccgtccgcttcgccctcaaccaggccgccttcttcgaccagttcgcacgctccatggtcaagatgagccagatggacgtcctcaccggcaacgccggcgagatccgcaacaactgcgccgctcccaaccgccgctcctccgacctcctcaacgctgccgacgacgaccaaggcttcgccgccgacgcctaa

SEQ ID NO: 4577 - DNA, 484 bp, Oryza sativa
  Clone ID: PAT_MRT4530_11448C.1
ctggcgatgcatctctttgtttgccgcccgtcctttttttttttttggatcaagctaaacgaggggggataagattaattatttatatgagtaacatctttttcattggggaagacgatgtgccttataagtgttgccccaacccatgtatccaaggttggcatcaaaactttgatttgtggaatccatggggaacaatccatggaaagcatctaaaggctgggccagccatagggtacttaaaggcagcatttttcccacacagcctgcggttgaccgcggagaagggctcgagcttgtatacggtgttgttgcgctcctttgggtccaagaaactctggatgaccttggggccattcagacggtatctgatgggcttgtcatcactcccggctgggtagactacatcctccaagatgcgcttatgaggcggatttgggttcttgtgccagggcgctgaacagtcgggggcttcctgggaggc

SEQ ID NO: 4578 - DNA, 1505 bp, Oryza sativa
  Clone ID: PAT_MRT4530_11449C.1
gcacgaggtatgcacgtagtaggagtatacattatattccacttttccacaagatagggtccagtccagtatatatatagggcatcgggccctggccggtgcgcacggggcagaggtcgagctgagagtgatcgatctttgttagctagagtgttgagcaatggcgtccaagctgggtatggttgtgctactgatctcgggcctctttgctgcccgttgcgcggccgtggtgaccaccggcgaacccgtcgtcgccggcctctcctgggggttctatgacacgtcgtgcccgtcggtggagggcatcgtgaggtggcacgtcaccgaggccctccgccgcgacatcggcatcgccgccggcctcgtccgcatcttcttccacgactgcttccccgcaggggtgcgacgcgtcggtcctcctgacgggttcccaaagcgagctgggtgagatacccaaccagacgctgcggccgtcggcgctgaagctcatcgaggacatccgcgccgccgtacactccgcctgcggcgccaaggtgtcctgcgccgacatcaccacgctcgccacgcgtgacgccatcgtcgcctccggcgggccctacttcgacgtgcctctggggcggcgcgacgggctggcaccggcgtcgagcgacaaggtgggcctcctgccggcgcccttcttcgacgtgcccacgctcatccaggcgttcaaggaccgaaacctggacaagacggacctggtggcgctgtccggcgcgcacaccatcggactaggccactgcggcagcttcaacgaccgcttcgatggctccaagcccatcatggaccctgtgctggtgaagaagctgcaggccaagtgcgccaaggacgtgccggtgaactcggtcacgcaggagctggacgtccgcacgcccaacgccttcgacaacaagtactacttcgacctcatcgccaagcaggggatcttcaagtccgaccagggcctcatcgaggacgcgcagaccaaccgcaccgccgtccgcttcgccctcaaccaggccgccttcttcgaccagttcgcacgctccatggtcaagatgagccagatggacgtcctcaccggcaacgccggcgagatccgcaacaactgcgccgctcccaaccgccgctcctccgacctcctcaacgctgccgacgacgaccaaggcttcgccgccgacgcctaattaacttatggagtaattagtgatcgttttatgtttatgttttgtgctagtaataataattaagaggatgccatctgcgcgtggtgtttggtttccatgcattctctgcttagttagaatggttttgcttcataaaaagtaaagttactactcgattcctcggtcgggacagagtaactgcatgtcaaatgtatcatcatcatcagttagtgctacatcatcacaactgtctttgtcacagcataaacccaaaaaaaatgtttccatcgttcggcatagcacgacacttaatcagataaaaac

SEQ ID NO: 4579 - DNA, 2852 bp, Oryza sativa
  Clone ID: PAT_MRT4530_1144C.1
atggccgacggcgtggggcgtgatcgctccggcctcgggctagggaagaggaggaagatgggtggctatgccggttcgggaggagaggaaaccgacctcgagcggcactggggcgagagagcttcgaggggaagggatgggttcacgggcgtggtcaaaaggcaggggagacagctggcgcggctgctcctctgcgtccatggcacgggacccgaacggaggaagcaggggccgggccgagaggggaaagggagaaacggagggggagaaagggagctcgcgctatgccgatttgggaagggagagagatgggagcgggaggtgcaacctccggtttttggatggatgcgggcggcgcggctctggcacgcgcgcgggctcgcggggcagggcgcggcagagcagcggctaggcggcgcaggcgcggcacgggcggcgaccgcgcgggcgcgcgcgcgaggcaacggagcaattggtcaaaggctgacttgccttgctcaaggtcttcacaaagcttcacgtatcttcgagaaaacccgcgatcgacaaaaatccggggcgggcccggtcaacgccacgcgggcagccacattggatggaggaaagggagccaggatccaacggctcgcggcggccgagaggcgccgacgaacggcggcgaaccggaggaagcggctggcaccggtggcgagaggaggaggaggggaagccattccacggcttggatcggggagaggatgcgcgacggcggctggcggcggcggcgaagctcgccggatgccggacgcggatgcgcgagagaagggacgagggggcgcggggtcgggcttagccgaaccaattcgtagttgcgacacgggggcgcgggacccaatggtcgccgcgttcgaactcgcggcggcgctatgcggcggcggaagaggcggcatggcgtgggagcgggtggggaggccggcgactggggcggcagtctgggaaggttcaagaggacacggggagggtcgcggcgcaaggaatcggcgagagaagggccgacggcggcggattgcggcggcggccatcgccggcggagaaaaggggaaaactcgccggggcaacaggagtccaattcaccggggaaagagcttctacacggctccgggaactcgtttcaagcgacgggcggcgacgagggggggggggcgctcaccgacgagagaggagcggcgtcggcggcgggcgcggcgcggcgagcgacaggggaaagtggttcggtggggagctcaccgacgagagaaacggcgtcggcggcgcggatggagtcgcggcaaggcggacgcgacggcggggcggcgtggcaccgagggtgcgcggtcggggtagaagggagggagaggtggcgatggggcagcccggagctcctcgtcacgcgtccacgcatgcaccggctcctccggtgctcggcggcggacggtgacggagagagcggggcgagcagcaacaatggcgcggcggtgatggaagttcggcggcaaaggcgcggtatgcccgctactctggtcacgcttgaccttggctacaatgcactggatgatgttatcactgcagaacacttgagtcatctaaacagattaaaacacatagatttatcttacacctccttaaagattcagattgtctcggaatggcaacctccctttcgactggagtcagcatcttttcaattttgccagatgggtccacgatttcctgcttggcttcaatcccaaaagagtattgattcacttgacatgtcaagtacaggtcttagtggaccattaccatcaaaccttccaaacctgtctgaagtggtacttttctccaataacatctctggccgtattccgaaatcaatttgtcaatcacaagatttggctaccttagacttagccaacaatcgtttgaagttagttttcctggatcttggatggaatgagttccatggaagattgcctgtttggattggagatttagtgcgcttagaagtattggctctggaccacaataagtttttcggtggtattccagataaaatcactaatatttcgtgccttatacacttgaatttggcagccaataatatatcgggtgcaatgcctcggcatttgtcaaattttacaagtatgtcaggtagtattaatggttgtggtgatatacctgataacaattctccttctgagaaagataatgtgtccgtggtcacaaaggggaaagatctttattatgatgatgctgaaattcttgacatggtaaccattgatttatcctccaactatttgactggagacattccacaagagataacctctctccttagtttaagatgcttgaatttgtctgggaatcacttgagtggaaaaattccaaacaagattgggatcctgcagtcattggaatcacttgatttgtcaagaaacaacctttccggtgaaatcccatcgagcctctcaaatctaacatttttaagtgacctggacttgtcatttaacaatcttagaggaacaataccatcaggatcacaacttgacagcctctatacggagcaccctcgtatgttcgatggcaacggcggtctttgcgggccacctcttggaaagaattgctatgtaccgcagaaaggtcacatgagaagaaaagaaaatttttctaagatacagccatttcatgttggaattttactgggcttcattgcaggtctctgggtggttttctgcatcatgctcttcaaaaaatcatggagaattgcctacttccgcctgttcgatagtatgtatgacaaagtatatgtgcttgttgttgtttcttggggcaagtttgcccaggaaaactactaa

SEQ ID NO: 4580 - DNA, 281 bp, Oryza sativa
  Clone ID: PAT_MRT4530_11450C.1
aacagcccgaaattgcaaccgacgacacgaacgaggaaacaccaacaacagcggcagcagcggaaccaacggactaacacccaacaccacaggcgacggctgggaaccaggacgaaaccctaatgttcactttacttcatcttcaacttccgggcggaggaactatatatatttatatagagcaagggtgagtacagtccagctgcccagcagcacaacaatccgcttccactcaggaagcctagtctatgatgcccgtagacatcccgaatcacacagat

SEQ ID NO: 4581 - DNA, 301 bp, Oryza sativa
  Clone ID: PAT_MRT4530_11451C.1
acggggccaaatcacaaactttttacacaactttttttttttttttttggacatttgtttcgaaaaaaatttgtacaggtttgcgcaacaacaggaccaacgggtccttttttttttaggggatgaacagcaacaatttcgatcaggataacctgtaaaatcaattttcaaccctttccaatgttttttgtaccaatttggggaaaggaaccgggcccttttttgccgggtttgaaaaaatatctttttagcagccaatgtcgaatttatttttctcggataaaaagagaggagctttttt

SEQ ID NO: 4582 - DNA, 2883 bp, Oryza sativa
  Clone ID: PAT_MRT4530_11452C.1
atgatgatgatgtgcgcaggtggtgcggcggcgatcatctttctgacggcgctgtcgtcggcggcgtccgcgctcggtgtcgccgccgccgccgccgccgccgcctgcgtcccgagcgagcgggcggcgcttctcgccatcaaagctggcttcaccagcgaccccgacggccgcctcgcgtcgtggggcgccgccgccgactgctgccggtgggacggcgtcgtctgcgacaacgccaccggccacgtcacggagctgaggctccacaacgcgcgcgccgacatcgacggcggcgccggcctcggcggggagatcagccgttcgctgctcggcctcccgcggctcgcctacctcgacctcagccagaacaacctcatcggcggcgacggcgtgtcgccgtctcctctcccgcggttcttgggctcgctctgcgacctccggtacctcaacctctccttcacggggctcgccggcgagataccgccgcagctcggcaacctcacgaggctgcggcagctcgacctgagctccaacgtcggcgggctctactccggtgacatctcgtggctgtccggcatgtcgtcgctggagtacctcgacatgagcgtcgtcaacctcaacgcctccgtcggctgggccggcgtcgtcagcaacctcccttccctgcgagtcctcgccttgtcggactgcggcctgacggcggcgccgtcgccgccagcacgcgcgaacctgacacggctgcagaagctcgacctgtccaccaacgtcatcaacacgtcgtcggcgaactcgtggttctgggacgtgccgacgctgacgtaccttgacctgtcgggaaacgcgctgtccggtgtatttcctgacgcgctcgggaatatgacaaatctccgtgtgcttaaccttcagggaaatgacatggtaggcatgatccctgcaaccttgcagcggctgtgcggcctgcaggtcgtcgacttgacggtgaacagcgtcaatggcgacatggcggagttcatgcggcggctgccgcgctgcgtgttcgggaagctgcaggtgctgcagctgtcggcggtgaacatgtctggccatctacccaaatggattggggagatgtctgaactcacaattcttgatctgtctttcaataagctttcaggggagataccgttggggattggtagtctatcaaacctgacaaggttgtttctgcataacaatctcctgaatggaagcttgtctgaagagcattttgctgatttggtgagtctggagtggatagatttgtctctgaacaatctgtcaatggagatcaagccaagctggaagcctccttgcaaattggtctatgcttattttccagatgttcagatgggtccccatttccctgcatggatcaagcaccagccaagcatcaagtaccttgatatctcaaatgcaggaatagtggatgaattgccaccatggttctggaaatcctattcagatgcagtctacctgaacatatctgtaaatcagatcagtggagtgctgccaccttctctgaagttcatgaggtctgcgctcgcgatatatctcggatcgaacaacctcactggcagtgtgccattgttgccagagaaattgcttgtcctggatctctccaggaactccttgtcagggccatttccacaggaatttggtgccccagagctagttgagctagatgtctcctccaatatgataagtggaatagtgccagagactctttgccggtttccaaatttgttgcatctggatctttcaaataacaatcttacaggacacctcccaaggtgcaggaacatatcatcagatggccttgggctcatcactctcatcttgtacagaaacaattttaccggagaatttccggtgttcttgaagcactgcaaatccatgacatttcttgatctggctcaaaacatgttttcggggatcgttcctgagtggattgggaggaagttgccatctttgacacatctgagaatgaaatcaaacaggttcagtggtagcatcccaactcagctaacagagcttcctgatctgcagttcttggaccttgctgacaacaggctatcaggctccatacccccttctctagcaaatatgacaggaatgacacagaatcaccttcctcttgctctgaatcctcttacaggctacggcgcatcaggcaacgatcggatcgtggatagtctgccaatggtgacaaaggggcaagatcgtagctacaccagtggagtcatctacatggtgagccttgatttgtctgacaatgttcttgatggaagtatccctgatgagctgtcatctctaactgggctagtcaacctgaacctgtccatgaaccgtcttaccgggacaattcctcggaaaattggagctttacaaaagctggaatctctcgacttgtcgattaacgtgctttctggtgaaatcccttcaagtttgtcagatttaacttcattgagtcaactgaacttgtcctacaataatctatcaggaagaataccttcagggaaccagcttcaggctcttgctaatccagcgtacatctacattggcaatgctggactttgtggccctcctctgcaaaaaaattgttcatccgaaaagaacagaactagccagcctgatcttcacgaaggcaaaggtttatctgacacaatgtcgttttaccttggtcttgctttgggatttgttgttgggctttggatggtgttctgcagcttgctgtttgtgaagacatggaggattgtttactttcaagctatcaacaaggcatatgacactctgtatgtgtttatcggtgtcagatgggcaaaattcagggtagacaaaacaactactacatccgtcccaaaataa

SEQ ID NO: 4583 - DNA, 285 bp, Oryza sativa
  Clone ID: PAT_MRT4530_11453C.1
agcgtcccacccgtgctaccacgcgttcggaaaacgcatacacacactgatacaatgtcctgggtgaacacattacagagctgatcagcgctcgagggagcagatatcaatggttccaagatcggacgtgggaggggatcaccaaccttctggtgctggacatcgacgataatggacgggagcctatgtctagagagcgaccagaaccctgaagccttcatctctgctgagaggtcggagaactcctccatgctcaggtacgacgatctcaaggcctacctccag

SEQ ID NO: 4584 - DNA, 2807 bp, Oryza sativa
  Clone ID: PAT_MRT4530_11454C.1
atgcacgagcacatccgcgccagggcgtgggaggcgacggtgcgcaaggtggtgcagcagcagcagccgcagccgcagcctgggggcagcaggcgccgcgtgtccccgatgctggccgccgacgaccccgagacggcgtcctcgtcgtcggcgtccacggccggcggcggcgacgacggcgggtacgtcgagcgcggcctccccaacggtgacttctacacgggccagtggcgcggcggcgcgccgcacggcgccgggaagtatctgtggacggacgggtgcatgtacgagggcgagtggcggcacgggaaggcgacggggaggggcaggttctcgtggccgtcgggcgccacgtacgagggggagttcagggacgggttcatggacggcgccgggacgtacaccggcgccgccggggacacgtaccggggctcgtggtccatgaacctcaagcacggccacggcaagaagagctacgccaacggcgaccactacgacggcgagtggcgctccgggctccaggacggcgccggccgctacatctggcgcaatggcaccgagtacacggggcagtggcgcggcggcctcatccatggccgcggcgcgctcgtctggtcgaacggcaaccgctacgatggcgggtgggaggacgggtgcccccgcgggcagggcaccttccgatgggccgacggcagcgtctacgtcggctactggacgcgcgacgccgccaccggcattgtccagcagaagggcgtctactacccgtccccggcggcgtcctccccgacggcgcgcgacccccgcgacgtcgctgaatcactccggcaacagaggcggcgccgcggcggcggcgggcaatgcgcggtcgagctccgcgtcggggctgagcaacagctccggcggcgacaggaagtcgacaagatttgcatttgggagtccgacggggacatcacctgcgacattgtcgacggcgccgcgttggccgacgaggcggtgggccccaggaggagcatcaaggcggccgccgccggtgatgggctggtcctcgcgccgccgtcgccggcgccgcgcatcgccaagtgggtgccaccgcgggaggcgaagcggcagggcgagaccatcgccaagggtcacaagaattacgagctcatgctcaacttgcagctcgggatcaggcatgcagtcgggaagcaaggtccagttacgcttgatctgaaatcctcggcttttgacccaaaggaaaaagtatggacaaagttccctccagaaggctcaaaatacacccctccgcacaattcttgtgatttcaaatggaaggattactgccctcaggtgttccggacgctgcgcaagttgttcaaggtggatgctgctgattatatgttatccctttgtggaagtgaggctctgcgtgagctctcttctcctggtaaaagtggaagcttcttttaccttacaaatgatgatcgatacatgataaagacaatgaagaaatcggaagtaaagatgctgcttaagatgcttcctgcttactataatcatgtccgttcattcgagaacactctagttaccaaattttttggtctacattgtgttaaattagctggggcaaaccagaaaaaggttcgctttgtcatcatgggaaatctgttctgctctgatcattccatccataggcgttttgatctaaaaggctcgtctcttggccgaacaactgacaagccacaaactgagattgatcagtatacaactctgaaggatcttgatctgaatttcatatttagactgaagaagcaatggttccatgagttccaaaggcaagtggacagggattgcgatttccttgagcaggagaagatcatggattacagtcttctggtgggtgtacattttagaggcaatagagagaagcttctgagcgaaggttccaccgattacgatatcaacaaaatatctactcctcgtctttcaagaggaaatgtggatcagtgtctcactgatccaaacaggtggcctaaaatcaagctcggagcaaacatgcctgcaagagctgaactgactgctcggaagaatgatttggaaccacagcttattggagagccaactggggagtattatgatgctatattatattttgggataatagacatacttcaagattatgatatcagcaaaaagctcgagcatgcatacaaatctttccagtatgacccaacctcaatatcagcggtggacccaaggcagtactctagacgttttaaagattttatatacaaagcatttcaagaagacaggctagatagctgaaaatgtgttgaagctcaagaaacctctgcctccaggtgtagatgaactttaaactgtccaaagaaagatcaggctgtcacaccatgcaaaatgcagttgggcactctacttgtgtgctgtcaattgtatgtatgaaaatggatggcagcttcagtggaagtgatcttggtggtagagctgcttgaactcatggttttccaacagaggtagtctggctgtagcgtaaatataaatagctttatacacacatatatagagctcactaatattttgtagggtagatgttaactcaatgattcaacttacagataggaaatttgtagccatgcacaaaagtgcgcaagccagtccggagttgtaaatgtttttacctgagggtaacatgtatcaggtactattcttttgtaactgtcttgatcaatacccataggaaatccttggataatccctctaaaaaaaaaaaaaaaaaaaaaaaaaaaaaaaaaaaaaaaaaagggggg

SEQ ID NO: 4585 - DNA, 378 bp, Oryza sativa
  Clone ID: PAT_MRT4530_11455C.1
tctgattctcacagttcagttctaccacgtacaggaggatttgtttgagagggagatgatgacaaggcacgaggaggagcttagctagcctgccatggcgaggcgctctccttgcctcgacgtcgccatgctcctgcttggggcgttggcggtggcgagcgccttcattgatgaagcgctgcctgatggccgggagctcgaccatggtgcccacttcatgagcaagcagggttctgtgacatactagaagctgagctagccggatccgaagccaaagactgcggctgctcctatacccaggccacagcactatcactagccataaccggaggcaataccggcacctgtagctgagcctagacctgtaacaaagctccc

SEQ ID NO: 4586 - DNA, 1451 bp, Oryza sativa
  Clone ID: PAT_MRT4530_11456C.1
atggcgcgggggttccgcggcgtccgggacgacctcaccgagctaggccgccacatcctcgacatcgcctgcttcctccacccgctcctcggccccgcccacctcaccgtcgactccccgcccgccacccccacccaccgccaccaccaccaccgccgctccccttccccgcgccccgccacgccgccctccccctccatcctcgccggcatcctcgccgacctcgccgagatcggcggctccttcaccggtggcttcgcccgccgcgccgccctccccgaacctgccttctcctccgcctccgcctccgcttccgccaccaccgcggagtccccgcgcgccgcttcctccacggcctcctctccttccccttcccctgctgccgctgccgctgctgatgtcgctgatgacgtcgtcggggcggcgcaggcccttgcggcgcggcccgaggcgtggattgacttccccgtgctcgcgctcgatgagaattctataatctccgatatccaaagggatcatatggaagccattgaaaaacttgtacctgacttagcatctctgagagctaggctctgcccttcttacatggatattgatgtattctggaagatctactttacgctgcttgagtcgaaccttactgaacatacttcagaggtagatgagaatgtaccaggttctgttcatcacgtcaatgagatagagtctgattctgcgcctaatgtttgtgaaattgaaagtgtgaaaagcactcaagagggttatcaatcgccagatgatcgtgtgttgataaaaacaagatccaatcaaagcattgaccaatgggtgtttgcaaagtcaaaatctgagcaaagcatggatcagtggtccgaaataccttcggatgtggaatcttctagagatggtagaagatacattagcggtgaggagcttagcgacgctgacagtgcccatattgttgtcatggacaaatacatggattcacttctgtcagatcggaggagcctccactatgctagctcctcagtccggcgggattcagtaagaagaaaacctgcatcttctactgactatagccaccggcctccacaaccaactccacctgcttcactatccaagaaggaatcatgggatgtcattgaggattcagagtttgagatacttgacagttaataacagagatctctgggatctctctggctatttatcctttttattatttttctctctattcccttacccttcacctgcttgtaaatgacgaccttcaggtggtgtcagtgttcgtgggaaaatttctctaccattatattattacagtgtgcatatcactatgtaagttgggtatatcccctcattccatatggtgtaacataaagaaaactgtgatggatcacctgccaagggtgagactatgggtaagtctcccactgtacaaaaaaaaaaaaaaa

SEQ ID NO: 4587 - DNA, 897 bp, Oryza sativa
  Clone ID: PAT_MRT4530_11457C.1
atggctgcccatgcaaaccttcccaagagtaggggtgaaatggggcagggcaagggcggattgggttggaacatccccatccctggccctgaaccaacgaccaggagaataatgtcccccgtccccacacccatcaggtccccacactccgaacggtgctcgtgggtttgtggaagaagatggaagagagacgacgcaccaggcatggtgggaaaggaaaatgggctggggctcatcgacgtccttgtttgctgcgagtctcctcgtgcacgtgccggcggaggccgaggaggagctatggcaactatgactctcctcgcgcatgcgccgacggaggccaaggaggaggcacaccctagaggtggccgaggaggagctctttgccgccgcatctgccggtgcgtgatggaggtgtatctggagttggggatggagctggtggtggatacggggagtattgccgttggcgctgcccgtgatgcaaacgccgcagcgctaccatcgccgacagctatgaatatgcgggatcgcattgctgatggcaagctgaggagcgtggcactagcagtgacggcgaagatgccatggctatgggcaatgacgattatgccatttctgccatgtacgctcgccaccggaagcaagtctgtcgagctactgatgggcagggagacgcatcatggaggccatcatcgtctcttagctctaagcaaatcaacacggtctcctcgaatcctactccatgagaactgggacgggccgggaattacagatgtagatacagagctcggatggttgtccaccaacctacataggagtaggggtgacaacggggtagggcagaggtggattggaacgtccccgcccctagccccaaaccaacgaccaggtgaataa

SEQ ID NO: 4588 - DNA, 389 bp, Oryza sativa
  unsure (1)..(389): unsure at all n locations
  Clone ID: PAT_MRT4530_11458C.1
gcgggacacgcacctagaaagaaagagatagcgccacagccacaccactgcgagagaaattcctctctctctctctcgctcccgcgcgcgcgccccgcgccgcccgcgccacgaacacccaagaaaagaaacgccacgccacgccatctctgcttcgccattggtgtggattggagcttgctgcgatatcgaggagagtcgcgtgcagtaatactactgataaatttggttgacggggttaaagataggagtagcaaagaacgtggaacgatttcttgggccgcgggagggagcgatcttggtggatggcggcgccgccgacgccaacgacgccgccatccgcgtngtcgtcgncgacccacccggacgccccttcgggcgcgccgcga

SEQ ID NO: 4589 - DNA, 246 bp, Oryza sativa
  Clone ID: PAT_MRT4530_11459C.1
atgcgcgtgcgcgcgggcgacgccaacgtcgcgcctgggaagaaggtcgcggcagcgtgggtgtcggggacgtgtgtttccgccgagactggcagcgaggacggtggcggttttggtgttggaaggcgacatcccggcaatgtcggctgttccaaaattagtactacaacgcttgtttatggaacttgtcgacaggttataaagggaacaatggaacttgagggatccggcgagatcatggtctag

SEQ ID NO: 4590 - DNA, 492 bp, Oryza sativa
  Clone ID: PAT_MRT4530_1145C.1
atgtcgtcgtcgtcgaggccggggcgggccagcatctccccgttccgatcccgccgcacgtcggcggcggggggcggggcgggggtggcggcggcggcgcatcctcctccggcgaggacgtcgtcgggggggcgaccctcgacgccttcctcctcctcctccgccgccggcggtggccggcccactaccccgtcgtcgtcgtccgccggtggccggcccaccaccccctccgcggcgttcgcgcggtccaccaccccgtcctccgggaggccgacgacgccctcgtcggcctcctcgagggcggccgggagggcgccgcccgtcgcggcggtggacgcggccaatgccaaggagaacatcatggtcaccgtccgcttccggcccctcagtcctagagagatcaacaagggggacgaggtggcgtggtacgccaacggcgacaacatggtgcgcaacgagtacaatccgagtatcgcctatgcttttggttag

SEQ ID NO: 4591 - DNA, 453 bp, Oryza sativa
  Clone ID: PAT_MRT4530_11460C.1
atgacgaagtccaccaatcatgaagatgaagaaaatagtcggcgacgacaaatgcaaccgatggatgttgatgaagatgacgatgtcggtgatccagtcaatagcgttgtagcagccgacgataatgatgagatcctctatcggaaagcttgcaaagtaaaggcaatagagtttgctggtgctgaagacaatgaagatgaagccgctccaccatggcgacaaagttgcatagccgtgatgaagcgaacacaagtcggcggcaacagaaacaaaccggtaccgaagacgcgcagccgtggaggcgaacaagccaccgtgaagacgatagcaccagttggcgtcatacgaggtggccggtcggagaagatgcagacgtcctacaatggcggcataataagccagccgtgcaggcggaaacaccagtcgacggcggacgaggcggccggtcggtga

SEQ ID NO: 4592 - DNA, 749 bp, Oryza sativa
  Clone ID: PAT_MRT4530_11461C.1
tttccatccaccgcgccacgccacgccacgacacgccgcgccgccgcgccgcgccgcgccgcccgccccccgccggcgaccatgtccttggcggcgaccttcgtgttcctcctcgtctcggcgctgcagatgctcgaccaagtcctcgatctcgtcaagaagaggggatcgattactgatgaccagctcaagctacggctagaaatcacgcagattctcaaggaggctagtgcactatccacgccctcaacgtttgcacaagccgcaaaactcaagcggctggctgctgctaaagaaaaggaactggcaaaattgcaacagcaggacatcaaagggaagcagtctttatacaaccaatacggacgagttatgttgttttccaaggttctaatctacggcttgctcattctgtgggtttggagtgctcctgtaactactgttcccaaacatcttctgcaaccggttggacggatgttttcctggagaggtgttgatgctgccacaggccgtgttgtggttggaattatcccatggctacttttaacctctcgtgtcagcaagttatggtgccagaaacttgcccctatatttctgcacccatagctccttttgaagagttcgatttgctcactgtggttttcagttttgttcttacagttttaaactgtagactttctacatgtagctatgcaacatcatggttcctatgatgccacttcctgtaaaattttgttgcgcctatctgcatc

SEQ ID NO: 4593 - DNA, 1544 bp, Oryza sativa
  Clone ID: PAT_MRT4530_11462C.1
gcacgaggccttgcactcagcttgcagcttatagtgcaccgcacactgtcctctgttcatacaccccaccaaacacctttttttcctccttgacatgtagctagcttctttctgacttgctcgcagctggtagtaccctctctagcttattgcagggccatatcctctgctagcttagcttctctcgcaaaccccttaattccatctcatagacagccaaaagggtcaagaggaaattgggtttgtgctctccccaaaatcctccatatatagtgcacaggaggcatcattctgttcatacatatctctcccttgcttgctttgctcctggatatatagctagcttctttctttcttcctctctccctgtgtggcacgcgcctccaatcgatctcttcggtgagtagacgcatcgagatcggggggaaatgtcggtccagtttacatcggagcatgtttgctatgtcaactgcaactattgcaacactatccttgtggtgaatgtgccaaacaattgttcctacaacattgtgactgttagatgtgggcattgcacaatggtgctctccatggatcttgctccttttcaccaagcacgcactgttcaagatcaccaggtacagaacagaggatttcaaggtaataactttggaagctatgacatagcttccagaaatcagaggacatcgacagccatgtacccaatgccaaccagtcagcagcaagtgtcacctatacgtccccctgagaaaagacagcgtgtcccatctgcatacaacagattcatcaaggaggagatacagaggattaaaaccagcaatcctgagattagccacagggaggcattcagtgctgctgcaaagaactgggctcatcttccccggctccattttggcctcagcgtcgccgacggcggcggcggcggcggcagcaactaatcgcggcggcgcggcctgccggccggccaccgatcgccggcgtgcacgccggcgcgcggcggcggccggtcgagaatgcgcgcgcaggagggacgacgacgatatattattatcgcgtgtgcccctctctcttcgccgcgtaattaattaatcagttaattaattacgtacgacctactgtgttatgctatcgatccgtgttaattaattacctacgtatcttgattaattagtctcgtattatacgtactattatacgtacgtgctgtgctatgtacgtagacaacaaaaaaaaatgtgcgtgatgagttctactacgtacgtacgtactgtgttctagtgttttaatttgtatccgaaccaaggagttgtttaattaactgcatgcacatgcactggacttgaatctggagtattatgtaagtgtgcatgcatgctggattatgcaaaataaacgaattaatgaatagaactgtttttgttaaataaaaaaaaaaaaaaaaaaaaaaaaatcgagagaaaagacagcgtgtcccatctgcatacaacagattcatcaaggaggagatacagaggattaaaaccagcaattctgagatagccaca

SEQ ID NO: 4594 - DNA, 1417 bp, Oryza sativa
  unsure (1)..(1417): unsure at all n locations
  Clone ID: PAT_MRT4530_11463C.1
atcaccaattgcatgcaatcaaaatgaccattcaaagctgccatatgaagtgctgtaacaccgcccacagcaggtntgttgatatatctcaaacgagcagattcattaaatttcagtcccaaagaagaacaaggactgctcccactattcgtctgacattcncccaccatccaccgtcgaagaagcaccatcctctaagggagcacttgggacaaagtccgcgagtaaaagacgaacgcaccgaacaagtccatcatgtgctgcgaaatgcaatgctgttcggccactcaagtaatccgccctggtaacattgcatctgaagagcagaagcatctgaaccacctcccagtggccatgccggcatgcgtgcatcaacgcagtctgcccgcagtagttccgtacgttcacatccgcgcccttctccagcaacagcgtcacaatgtcgaggtggcccttagcggcggcgaagtggagcggggagttgaggccgccgaaggtggagtaccgcgccagcgccgggctgagctccagcagcatccgcgcctccaccgcgtccccgtcccgcgccgccgacaccagcctctccccggaggcggagcaccccagagagttccccatcgccgccgcctccgcctacgccgctcgccggcgacggcgagagccacctcacgaggctaacacctccggcgacggaccgccggggctcaggatcgcgctggggctcgccggcggcgagggggcgcgtttgaaattgccggaatttcggggtctcgaattttccgcacgccggaggagaggaggggggaagtgggagaagagagaacaccttttttgtaaaatcaaactgtttatgattcttattctgtgatgaataattggcatctgtaattattggttttgatatttggatattattgacgaagtggttttggagatgatttcatctgcgcgttcagaacaaggttactgtttttgtcgggtccggtcagaccgggcatgtgatgccggtcaagtttaatgcacgtggttggtgaagattccatatggcatacgatggatgtattgtgtgcgtatgggatgcggagtcgaatttagaaggagtccaaatttgatatgattggagtttgtaaagtttgtttcttgtacgagaaggtttcctaggtggattaggacttctagtatgagtttggttcgtggctttaggctacctacctcatgtataaatagagagggagcgtctaaccagcgaaacaccggcggtcagaccagcggcgtatctgtggtcagaccggaggcggctttaggcgacggcagctaatctcggcggtccaaccggatgatctacttcggtcagaccgacggtttccaggcggtcagaccagcgcgactacttcggtccaaccgcgatccactttta

SEQ ID NO: 4595 - DNA, 530 bp, Oryza sativa
  Clone ID: PAT_MRT4530_11464C.1
aaaaaaaacccccaaaagggaaaagggttaaaaaaaaaggggggcccggaaaaaaaaaaaaaaaaaaagaggggggggaaaaaaggccggggcccaaattacccaaccccggttttggttcccgggaacccaaaaaaccccccccggggggggggtttaatttaaaaaaaggcccgggttaaaatttgggaaaaaaaggttttgaacccccaaaaaaggggcccttggaaacccaaccccccccaaaaccctaaaattggcaaggggggggggcccatggggtttttccccccccccaaaaaaaaaaaaagtcttggaacccctggagggaagggcttaaaaaggccccctggcgaaaaaaaaaaacccctgggtaggaccaaggggaacccaaaaaggggccctccccccggggaaaaaaggcttttggcccctaaccaaatttcccggtttggccccccaagccttggaggggccttgggggaaaaccccgcccaaggaaaaagaaaaaaccccccggttttgtgggg

SEQ ID NO: 4596 - DNA, 659 bp, Oryza sativa
  Clone ID: PAT_MRT4530_11465C.1
tcgccaaaatctcccgtctcgtcgtcgccgcctccgctccttgcgccatctcgcggctgaacaggggaggggcgccgatctccattggcgagcagagcagggcgcgggaggggaggggatcctgaaaacacttggtttcccaaatgaagcacatattcaagataattgctatgctggtggcagtctcagctatttggattgcccttcttgaaaccgcgactgttcctcgaagttatacttggttgcttcccatctacttggtagtggcacttggatgctatggcctttttatggttggatttgggcttatgttcttcccaacttgcccgcaagaagctgtactactacagcaggatatcttggaggcaaaggaattcctatcaaagaaaggtgttgatgttggctctgaataatgtcaagatcgatgatagatgacttgaggctagtttggggacaactttgtgctcccttatatgagttgttttgggggctttatagctaggtatatgtcacttcgtaatgatcattttgctaacacaatttttcatggtgagtccttgttacatactgaatttaagacctttttcttttaggaaatattttttatggaaaatgaaatatgattgtgaagtaggaatggtctgttgccaagtgccttt

SEQ ID NO: 4597 - DNA, 314 bp, Oryza sativa
  unsure (1)..(314): unsure at all n locations
  Clone ID: PAT_MRT4530_11466C.1
catgaccgtgnggtgcccaagtgttcncggtggtcattaccttttgcgacggacaggtttactgncatgtgtgtttaaagttccatgtccgtgaagtttctagtgcattttgtgtttatagctgaattgcagcatttgattgtagtgctagtgccaactcttttgcntcaaacaatgatgcctatgtgcctatgtctagtgtggactccctattattatgctttctgatgtaagattagtgctccaatgaactgnaatnttaataggctatcatcgcagctaatgctttaaattgtntaaaaaaaaaaaaaaaa

SEQ ID NO: 4598 - DNA, 176 bp, Oryza sativa
  Clone ID: PAT_MRT4530_11467C.1
tttcttattttcgatatcctatcatctccacggggggggttcattaataatatgggggcttacactttcagaaggatctctaggctcgagcacaccggggcccttcgacgctaggtggcttagcattgctctctcaactatccctacatacccacccactacattacctacatgtg

SEQ ID NO: 4599 - DNA, 180 bp, Oryza sativa
  Clone ID: PAT_MRT4530_11468C.1
ccccacagtgggaataaccagggattacctgttctccaatggataaggccactgtggtttcccccagacactagttggcccactgaaacgactgacttccaaattgcattccgaaggccttaggcctgaagcgaggtcaggttaggtgttgagccggccgaaggagaagatcaacttggg

SEQ ID NO: 4600 - DNA, 263 bp, Oryza sativa
  Clone ID: PAT_MRT4530_11469C.1
cctcttactttggccgaccggcggaagacatacacacgtgagcagtatgcctggggcaacacgtatgtggaaagataaacacccgtgcactgctatgatcacaacgctatcagtattctccttgcgaaggggggggcccacaacaccattgattcccaatacacctcgacacaaccgagccctctatgacccttacaccctaacaccttcataatcacacattacctgagtacaccaacatacctcggggccatccacacagg

SEQ ID NO: 4601 - DNA, 1077 bp, Oryza sativa
  Clone ID: PAT_MRT4530_1146C.1
ccggccgggatatgacccataggcaggcgacaccgcgtgcataacctccgcctccccaatccgtcccgtctcctcgcccgccgccctcgactcccgtctcctcgcctgccgctggcgccgatctccatcctgctagcagaggtggcgccggcgtcctcctgctcccgcctcattcgctcaccggtgagcatcctaatccatcccatccggcctcggcctcgaatttcgtctcctcgcccgccgcttgcgccgatccccatcctgcgagcagaggtggcgcccggcgtcctccttcttccaccgcatcgtcgctcgccgggtttctttgcaagctttagcccctcgacgttcattgagagaacatgcctaaaataaagacaagccgtgtcaaatatcctggaggatgggagcttattgaaccaactatccgtgagttggatgccaaaatgagggaagctgaaaatgacacgcatgatgggaagagaaagtgcgaagccctctggccaattttccgtatttcccatcaaagaagtcgctacatatatgatctttattacagaaggaaggagatatcaaaagagttgtatgagttttgcctggaccagggttatgcagaccgtaatctgattgcaaagtggaaaaagccaggctatgagcgcctttgctgtcttcgatgcatacagacacgagaccacaactttgcaactacatgtgtctgccgggtccccaagcatctcagagaggagaaggttatagaatgtgttcactgtggatgcagaggctgtgccagcggtgattgagatatcgtcattatcttgtttgaatatgtcaaactaagcagacatgatgtttcttgagcgaaatttcggctaaaaacgtttacgaaaacgttttgtaaacctgcctaccgggtatgacgttatttaagtacctgagattgtggttacggtctgcattaatctgccgcatggtcattgcttgatcatcggcctcaacaccctgcatgtgtgtattctaaagttgtttaatggaaacatctgttactcgatgctaaaaaaaaaaaaaaaaaaaaaaaaa

SEQ ID NO: 4602 - DNA, 729 bp, Oryza sativa
  Clone ID: PAT_MRT4530_11470C.1
atgcattacgagcggcagcccgagccctgcgccaacgccggcgccgcggtggaggatgcgaacaaacactgggcgccgcacggcgcggtgctgacggcgttcgtcgtcgggatcaacttgctcatggtcctcctcgtgttcttctacttctggcggttcttctccggtaagcgtgggccaccgtcgtcgtcgtccatggccggcggcgccgatgacgaggaggcgtcgtcgtcggacacgtcgcatctacgtggcacgtccacctcccagtgcgcgtaccacctgcggccgcgggccccgacgccgctgttcgcgtcgacctggcgcgcctcctcccgcggtgcggccaccggttccacgttccacgccgactgcgtcggcgcgtggctgcgtctccactccacctggccgctttgccgcgccaccgcgctccccctcgccgcctccaccgccaccgccttcccgttcccgctggtgtcgccgagcccgagcccgacgtcggaggcggagtacacgcctacacggacacgagcagtgacgagtgacgacgcgatgtcatcctcttgctgtcagcaccccgccggccactcccgcagccgccgccacgacgccctcggagaggccgctggcgacatgtccgacgacgacgcctcctcgtcatcggggccgccggccatggacgacgacgacggtggcccacgcttaccggagaagaaccgccagaagtag

SEQ ID NO: 4603 - DNA, 812 bp, Oryza sativa
  unsure (1)..(812): unsure at all n locations
  Clone ID: PAT_MRT4530_11471C.1
gctgcagctagaatattgaatccaaacgtttggtagaaagttttgactgatttggtcgagggccttgagnaggcttctgtgacagtggagataagattgaagattgatcagaaacatgcagatttgaaaggggggtccttccgtgattacggagaagctgtcttgaaacatttggagaatgcaatcagtaaagatgaatatctgtgcaaagcaccgaagaactatgaaggcgtaagagtttcaggatatggtggctggttcttattgcggttatccctccatgacccagttcttccccttaacatcgaggcgccgagcaaggatgatgccattaagcttgggcttgcagtgcttactgccgtaagtgaatttccagcattggacataacggcattgaacaagtttttgcagcagtgatggaagtattgcggcggcgacgataatctgcagccatcacatgcctttgttgagctgggatgagagaaacgcaccacagtactatacatagacgtacttgcattcaggcttacacataatattacatggttttgacttttcggctttacttggtctttgtttggtatggaaatgtcaaacaaggaagactaattttcgtgttttaaagaaaatatacaaagtagttgtcaggaatcttatataccatcgtcaatgtgttttcggattgcttatatcgtcatcagagtgctgtgaaggcagtcggttttcggaacgatgttatcatcaaatgaaaatatttcatgtttctgttgtcttgctcgtataaattttcatggttattggtataagttccc

SEQ ID NO: 4604 - DNA, 183 bp, Oryza sativa
  Clone ID: PAT_MRT4530_11472C.1
atggcggtgcagatctggccgtggctgctgtgcacgaggaaggagggaggagtcggcggcgttaggatggaggtcgccatggtcatggcacttcgacggttggccatggcgggggcaactcacggtgtcactgccgggaattttctgggcgttggtgttggctcatgctccactggtggatag

SEQ ID NO: 4605 - DNA, 519 bp, Oryza sativa
  Clone ID: PAT_MRT4530_11473C.1
tgttgtgctcgctcgaatcggatcgaaccctacgagcgctgtcggaggcggagctcatcgccggagtagcggcggcgcgcggcgccatggaccagagggagttccggcggatgctcgagctcttccccgtcgttcgatctcgcgactactgcgtaatttgcatcccctcccctgcctccctttctcataccctactctctcgtttccagcacgtgtagggcgggggcgaatcggcgtttcggcggcgatctaacagttcaggtgcttgagtcgggggagcaagaggggtctcgattttagggcatgggttggtcgatttgggtggctgatgatttgtggccttgggctgatgcgcgtggagactggattacgcattatgttgagataatctcactttggttatactgatccgtcgaattgcgtcatgaacctgtcttctagcctgagttgttgcgcagcacaagttgtatagatgatagtgcactggtaattgcctgagtgcatgcagttaaaatgaga

SEQ ID NO: 4606 - DNA, 323 bp, Oryza sativa
  Clone ID: PAT_MRT4530_11474C.1
agagcgcgtccactatgcgagcatatcaacctgccaggccgtgacagcgataacatcgaaggccgccgccgagtctgcaccggagtacaacaacgtgccctactaatacgctatgcgacataatcactcgcgggatgtctaccattactgaggcgccgatgatgtgctcgtcgaggacaacgagccgacgacgaacaagtctaggaagactgctgactgcagctaggacgcgacggctaccggtgttgcacgtgcggggcgctcgatcacatgctatcaggcaattaccgagagctcgagaccacagacgccggtcacccaat

SEQ ID NO: 4607 - DNA, 330 bp, Oryza sativa
  Clone ID: PAT_MRT4530_11475C.1
atggcctctccatcttcggtgaaccttgcttcagctctggggatacatgttgcggtgaccgccgctcctgcaactttgtgggcttttcaactggcaatacctctaactttggaaaatcttgtggcagtatggatgaagactgctgcacttgcagcttcttggccggagggcggcccaagcgcatgcgagagcgctgccgcggtggcagcgatatctgccttggcagcatacaaggaagaggcaaaatctatcttcactgaccctggacgaagctataacggcttctccatttcccaccagttcctagatcccactctggtgccgaattaa

SEQ ID NO: 4608 - DNA, 330 bp, Oryza sativa
  Clone ID: PAT_MRT4530_11476C.1
atggcgctggaagcgcatcctcgccgacatccgcgcgcaggcagcgtcgcccacatgtccgacccggtgctcatccacgacatcaagtgcgtcgtcaccatcccagtcatggccaaggcccgcattgagcactttgtggaggcccggatcttggaggccatcggcgaggcacaacttccgcgtcctcttcgtctgcggctgccgcgaccttggcgaggcgctccgccgcatccgcgaaggcgccgccataatccgcaccaagggcgaggcgccgctgacatggccaacgcaggggaggaaggggtgcggggatggagagaaaagagatga

SEQ ID NO: 4609 - DNA, 235 bp, Oryza sativa
  Clone ID: PAT_MRT4530_11477C.1
cccgcgcgggcggatcgagctcatcctcatcgggtgggccgagggccgtcggggggctgacatcatcaagcccttcttcatcaacacctaccccatctttcccaacaacaagcttaccggtaccgacagtttgtaccctggtggtatgaggttagacccgctcggctggagcaccagttcgccacataaaaatcaagaacttgacaccaaggagattaagaacgagggggttggt

SEQ ID NO: 4610 - DNA, 965 bp, Oryza sativa
  Clone ID: PAT_MRT4530_11478C.1
gcacgaggagtcagtgcgacccaaaacccaagctcctcctcacaccattgcagttatttgcaccagccgcgcaagcaccacccatggcgatggcctccaccctcccgctcctcctcgtgcaccgctccacccctccgactccgaggcctaccgcgccgccgctcctccactcccgccgcctcacccttccttcccgcctcgcctcgctccccgcgacaaccgccgtcgtccacccgcgcaagggcgtccgcctctcgaagctccatgccgcctcctgctgcgattccgcctccgccgccggagtcgccgccggaggaggagctggtggtggtggagcaaaaggagaaatggattggcgtctcctgctggcttggtacctgctggctcttgataagcatcccatcaccactaaggctgttacctctgccgtcctaaccctgaccggagacctcatctgccagctcgcaattgataaagtgccaaagctagatttgaagagaacgtttgtattcacatttttgggactcgtcctggtggggccaacattgcatgtctggtacttgtacttgagtaaattagtgatgatcaatggtgcgtcaggtgcaattgctcgcctcttacttgatcagttcattttctctcccattttcattggagtgtttatgagtttactcgtcaccttggagggaaagccttctcttgtagttccaaagctcaagcaggagtggttatcatcagtgattgcaaattggcaattgtggataccttttcagttcttgaatttttactttgtcccacaaaaatttcagcttgacttccccaaagccacacaaaccacctttttgtaccttttgcaatttaaaatgatgttgattggtgctaaaggtgccgtttgttcttttgttactcatgaggaacaaccagtagtgtctctggaggcaaaagaaatggataaagtcaaatga

SEQ ID NO: 4611 - DNA, 2007 bp, Oryza sativa
  Clone ID: PAT_MRT4530_11479C.1
atggaccacgagagcatcgtcgccagcgacctgtccatctaccctctgccgcccgggacgcgcaccctggccactccgcgcgtcgtcctcgcgccgcctcccgtcaccgtcgtcaaccagccgcacgccgactggcgggggctcccggacgccgccgtctcccgcgtcctcgaccgcctccccgtcgtcgacctgttccgcctcggctacctcttctccccgcgctggctccacatctggcgcgcccggccgctgtatctccacgaccgccagttcaccaccccaccgatccccgccgccaacgtcgccaacgcaatcaccaacgtcctccaccaccacgtcggcgagggcgtccagctcctacccgtacaaggtggcggcggcggagggggaggccaaggtgaaggagcgctcgtgggcggcggcgatgccgatgaggccgtgaccagcgacgacgagatctacgaagacgaaggcatcatccagaacgccggtcacgagatcggccgcgtgtactgcttgcgagtagagaccacgcggtggagcctcgatcacctcgtccgctggtgcgccgagctccagcgcggcggtgctcgtgtgctcatgctcgccaacctcgccataccagagcaccccgaacttcctcaagccatcctcaactgtggcgccagccacctgggactccacgtcttcttcttcaccgtggaagcctaccacatcgcggccctcgtcgagctccgcgccctcgggctgtacggctgcatcgagggccacggcatgatcgaccgagtcctccaccccgaatcaccgattcggaagctggcaatccacggcggcatggggcgaactttcgccgtcgccggcgccacgcgcctccggtctctggtcttgttcgacaaccaggtgggcacggtcgccgtggacggcgccgcccgattccggaatctctacatgagcgatacgaagccatccaggatccgcatcggtgccgcgcccaggttgcgaagaatcctctcccttgacatcttcaacaccgtcttggtgatccaaggcttagcgattcagattgggatgatggagccgcctccacagatccgttctgtcaggcatctctgcttacgggtgaactacacagagatggacgtcaggttgccccgcttgatggagcagatcctgaagagtttcccacgcgtaaaatcactggatatcatgagatgcgatgacgttacacaagcagaagggctcctccagtggaacgatgcacactatgacgggaacaatttcttcgatggccttgagagtttcaactatcacctgaggtggatatatcttgaagatttcagaggaggcaagtgtgaagttgctctgatgaaagccatgctcgacaaagctagtgtcctgagacagttaatgatacaatactcgacaagcagcgtcccccagctcaccctgaatcagctcgacttgtctctccagaatttcaagctgcacactctaaatgaggctccccctgctgccgccatcgccgtcgacggctcctcctcccctcccccggtggagatccggggtgggttcacgcataggaggtggcggctgcgcgcgcagaggctcgggggcgagggcggcggcgcgggcgagatgaaggggtcggccatcccggcggtcgcgatcatgccctcgccgctcttcctctggcggttcaaggtcttctcagacttggaacgttcagtttgtcgcatggtcaatcggcaggtatattactgggtgttagccagcaatcttgtgctccgctgtacatggacgtacaagctttcagcacatcttcggcacaactacctgacagtgtttacaatagcagcgctggaaatattgaggcggtttcagtgggtgttcttccgtgtcgagaacgagtggaacaagatgacagccaagcagagtctggaaatgtcatctgacatgccctctgaaggagacaggcttttggattcaaatagtcatacagtatga

SEQ ID NO: 4612 - DNA, 1549 bp, Oryza sativa
  Clone ID: PAT_MRT4530_1147C.1
gcacgagggtccgtctcctcgcccgccgccctcgactcccgtctcctcgcctgccgctggcgccgatctccatcctgctagcagaggtggcgccggcgtcctcctgctcccgccgcattcgctcaccggtgagcatcctaatccatcccatccggtctcggtctcggcctcggcctcgaatttcgtctcctcgcccgccgcttgcgccgatccccatcctgcgagcagaggtggcgcccggcgtcctccttcttccaccgcatcgtcgctcgccggtcaggccgtcgtcgggagggggggagaggagaggcgcatggcgaagctggggccggggcaggggctggggtgcgaggcggcggtggggttgctggcgccaagcaggaagagggagtacaaggcgtgcaacaagctcaccgaggggaagcggccgctctacgccatcggattcaacttcctcgacttccactactacgaggtcttcgccaccgtcggcggcaaccgcgtgacaacctacagctgcctcaaggatggtaattttgctatcctgcaagcatatattgatgaggataaggatgaatcgttctacacactgagttgggcttgtgatcttgatggcacaccgctgttagtggctgcaggaagcaatgggatcattcgggtcatcaactgtgccactgagaagttactcaagttcttggcaaacttcaatgaaaattcatttttgagaatctatgctcttttgttatccgacatacccatgattgaagctatgcttcagataatagttgcttctttgacttttgttggccatggcgattcaataaacgagataagaactcaagcattaaagccttcgctcatcatttctgcaagcaaggatgaatctgttaggctgtggaatgttcacacagggatctgcattttgatttttgctggagcaggaggtcaccggaatgaagtattgagtgttgacttccacccatctgatatctaccgcatagcaagttgtggcatggataacactgttaaaatatggtcaatgaaggaattctggccatatgttgagcaatcctttacatggactgaccttccatcaaaatttccaacaaaatatgtgcaatttccggtcttggttgctgtagtacattctaactatgttgattgtactagatggcttggtgacttcattctgtcaaagagtgttgacaatgaaattgtgctgtgggagccaaaaacaaaagaacaaagtcccggggagggtagcattgatattcttcagaagtatcctgtgccagaatgtgatatctggtttatcaaattctcatgcgattttcacttcaatcaattggcaataggcaaccgtgaaggaaaagtctttgtctgggaagtacagtccagtcctcctgttttaactgctcggctgactaatccgcaatgcaaatctgcgataaggcagactgccgtgtcatttgatggaagcacaatccttgcctgcagcgaggatggcagcatatggcgatgggatgaagtggaccatccaaaagcatga

SEQ ID NO: 4613 - DNA, 149 bp, Oryza sativa
  Clone ID: PAT_MRT4530_11480C.1
gtcatagctatcgagtggtccacgtagagtttgatcgtctcacacgtgtctgcagagccctaattcactaacgaggatcctgcggacacagttgtatttaataaacgaatcgccgcgactgcagacatgaactgtctaactgccgaagg

SEQ ID NO: 4614 - DNA, 1014 bp, Oryza sativa
  Clone ID: PAT_MRT4530_11481C.1
atggtgcggtcggcgcacgacaattcactgccccttgcagcatcggaggtcacggctcacctggtcagaagggcagcacccaagcggagggtggcggaactagacgtcgaagcacaacaggcaagtggaggaaggcgaggtggatgtaggcgccgtggtggtgggcatgcatatggatacttgtctgatgcggagtggcatcccggcggttgcttcgtccctgagtcggaggaccagacgtgtggcagcgtcaatgactcagagctgccaccagacggtggcttcgtcccagactctgaagacgaggcaagtggcggcgtcgacgactccgagctgccacccgacggctgcgttgtccctgactccgaggacgaggcaagtggcggcgtcgacgactccgacctgccacccgacggctgcgtgcctgactccaaggatgaggcaagtggcggcgtcgatgactccgacctgccagctgatggttgcgtcgtccctgactccaaggacgaggaaagtggtggtgtccacgactctgagctgccacccgaaggctgcgtcgtccctgactccgaggacaaggaaagtggtggtgtccacgactccgagctgccacccaaaggctgcgtcgtccctgactccgaggacgaggaaagtggtggcgtccacgactccgagctgccacccgaaggctgcgtcgtccctgactccgaggacgaggaaagtggcggcgtcgacgactccgagctgccacccgaaggctgcgtcgtccctaactccgaggacgaggaaagtggtggcggcgtccacaacttggagcagaaaccggacaaagacatctccgccaacttggaggagcagcacatggatgacattgagcagcttgtcggtggggaggaggtgactggcctacaagatgatgctggtgtagctgccagagatgagggcgtcgacaaatttgctgaaattcgcgaaattaccctcatcatcgaacctagggtttgcaactgctgctaa

SEQ ID NO: 4615 - DNA, 618 bp, Oryza sativa
  Clone ID: PAT_MRT4530_11482C.1
agttgggaacaactgaacatagagtcaagaaactatagcttcttattgtcgagtaaccatcacttgagtaaagatatgcgttgaggatgttcgagtagaaatcttgaggattggagcaccacttgtagtagattagcacgacgtcatatttggtggcgcatgctgagtgaagtagcaaagctggtgaagtagaggcgatcggaattgctggtgatgaagatggtgaagatgaagttgtctaataatgatggcgaaggcgctcacccgtggaagtgagagcaccagtcggtggcggcgtaaacaagctggtggtgaaaacacacaaccgtgggggcgaaggcaccagtcgacggtgatgaaggcaagctggcggtgaagacgaagacgaccatcagcggtggcataatcgcacagccgtggaggtgaaggcaaaggcaagccggtggtgaaggcgaatacacccattagcggcggcataataggccagccgtgaaggtgaggacatcagtcggcggcggcgaaggcgactgacggtggtgttctgactgatgcattcctgaagcataagagataagcttatagacatgaatccctactatgcatatctggatttggatc

SEQ ID NO: 4616 - DNA, 2263 bp, Oryza sativa
  Clone ID: PAT_MRT4530_11483C.1
atggacggcctcgacgacgagtgggacgacgacaagttcctcgccgagctcttccgcgcccaggacgaggccgtcgcctcccgcaaccctaaccccactccccctccccctcctcctcctcccgacctcatctcctacctcccgccgccctccacctcatcgtacccttcctcctccgccgccgccgccgcgcttccgctctcctacatcacccccgggccccatgtcttctccgccgcccctgttcacttcttgcctccccgcgagctctcccagcatccgcagggattcgacgtcgggctccgtgacttctcccctccgcgcgagctctcgcagcgcccggcggcggaggtgagcagccgcgagatcgtcgcggtgtcgtcgggcatcgccggtgctgatcgcttcagagggggcgggggcgggggcgcgcggagggagagggatgccagggaggcggctgatcggagggaggtcgagaggctcaagagggagctgaatcgtgtctcgaagcaaatgaacgacgtgaaaaacgaatgcagtgagctgaagaaagacaggacaaggaaagaccttgaaatcaaggctaaagaagcagagattcaaagtttgagaagggcaaatgtgggttctgctaacaaatatgccggcagtatggctatggatattgatcagtctgttcatgcccctgcaaatggggctttgcatactggggattcttgcttggcatccacgagaagagcagagacattaaatggtagaaacaaggagctcagttcccctcaagacggtctctgtttgaaccaaaggaatcaaacatatgcatctgaggtcttggaggaaagtgttcgctttgaatcaaaaggcagcaaacacaaggaaatcaagactgtaggggttcagacagatcttccagggaataacgaatatcttgagcacaagaaagtattggttgaccgtatctctagcaatctgtgtgcagtgtggggcatgccaactaacagtttgatggggaggagtctgatatcaaagatcctggtttcttgctcagaagaaattttgacacttgtccagtctacgggatcgctagacaagtgtgaagcctcttctgaagcgagctcatcggtcagaaatgctatttcccaagtatatgatatcatcataaagacgagcagtgatacaatacctatacaaactcttctcgaagcattgctaaatttggctgctgttggtaatgatgctgttgttagtagagccctgcggatgttacatagtgtcttgcagcacttgctgaataacagaacgatgtctaatcagaggcattcggaggagaatattcgtgttgatgcattatctataatgattatcattgcaaggacaagtgatcccaaagtggagcgggaaaaattcggatttacttctgtaatggaaaaattgcatcaactgttgcagaaggaaaatggattgcttgttaagaagcattctgtggatctacttttcttgctattgaattgcccaacgacattgaagttgctatgcaatggaggtaaagatagccctgagcagattgaagctataagatgtgaaaatgatagatcacaagaagctataagctcaatttttaaggacctatctgaatgcttgagttgtagggcaacaagttctctggggatcaagctttgtcgggtagttgtcactctgttagcatatatagcttcaagtggcaaattggggtatgaagtgcttctaggtccagttactgtccgtggtgccaatttcttggagttgatcatggaagtccttgcgtcacagatggaatatgacacagccctttcaaatggagaacatgagctattgaaagaaaggtatttgctaatgagagaggttctaatccttctaaaccgactagcttcgcatgctaatttttcaaagccaacactggaagtgctcacaagcagcaagctctgtgcaaccttgacaattgatgtcgcaaatcagttgccgcaaaggagcaaatacccattgagacaccttggtgagatcaacatccagatggcgaacgatctcgctgaactagcccagaagttccgcacgcgagtacacagtttcttggaagagcaacattcaacagttgatcattccaatccaagtgctttgcacgagagttgacagcttccaggatgtgcaaaatcccgacggctaactgttctgcccccaattagctgggtgcaaataacagctaaagcagctagggggactattt

SEQ ID NO: 4617 - DNA, 493 bp, Oryza sativa
  Clone ID: PAT_MRT4530_11484C.1
cccacgcgtccgcccacgcgtccgaagtgttaccgtcaatggtgagaatcaaatccttccatcccaaaaattgtttgtcatgttcatcactaatggttaatcgatgccgtattggtccttggtaacagtctgagatgtgtttagttcttcaattcaaagttagtttagtcaaaacacgagtaaaactctgtccagatatagtggaccattttggttctgagaggttaatagcagcacgctgttttactctgtatgaatggctctgcacaataaataagatggtgctatgctgcaacctcattaatagatctgtacctgattattacagcaagacattgcatatttttcagtcattgcagcaaggttgtcagctttgtgcttaactcttactggtctttcagagatcactttttctttgacactataatttagctcctgtgaaatcccttctatggcataaccccactaagcaaatgatcccttgcaaagggaa

SEQ ID NO: 4618 - DNA, 342 bp, Oryza sativa
  Clone ID: PAT_MRT4530_11485C.1
ccctggtctaaccaaaaaagaggaaaaatttttttaacatccaattccccattcataggcacaagttggctccaaaacattgaccttctaaaaaagcaaagggacaagggtccctgcagggaacaaaaaccaccctttggggctgatgtccaacgcaaacccccataaaccaaacccccccattttttggcaataagcggggccctgggggagaactcccctcttgaaacaaaacaaaataaacctttaccgggggaaaaactttccaatttaaaaaataacttttccacccctgagattttaaaaagaaacaggaggtccctgtgcgaaactggcaaacgg

SEQ ID NO: 4619 - DNA, 2128 bp, Oryza sativa
  unsure (1)..(2128): unsure at all n locations
  Clone ID: PAT_MRT4530_11486C.1
gaaagttgggtaacgccaggnttttcccagncacgacgttntaaaacgacggccagtgaantgttttttcgtctctctctcccccccctttttttttttcccccccgggctttttttttttttttttttcacttggactagattgatttattcttcttgttcacaagtttacctctgctaaacatcttgtactgttttgttgttacgacgcagtagcaaaatcacacaccacaggtagaatagaatgggagatatgatcacctccttcacatggcaagagaaccttctggtgccccggaagccgccgacgccttcttctttggcttctccacaacgatggcttgcgtggttagtaccattccagccaccgaggctgcgttttgcaacgcacatcttgtcacctttgcagggtcaatcacaccagcctgtaccaagttctcgtgtctgtcagccatcgcattgtagccaacctcccattcactctccttgatcttttctacaatcacttccccttcaactccagcattgtgtgctattagtgctgccggtgccactagagccttttgaatgatatcagcaccaaggcgctcttcagggtcatccaacttctccttgatggctggtacaaattttgacaggtgaacataggccgcaccacctccaggtactataccttcctcaatagcagcaaatgttgcattcttggcatcctcgatacgaagcttgcgatcctcaagctctgtctcggttgcagctcctacctttataaccgcaactccgccagaaagctttgcgattctctcagccaacttctcagagtcatatgctgagtctgtctgagaaagctctctcttcagctgtgcaattcttgcctggatctcatctttggtggcaacatctgctataatggtagtggatgactgggagattgtcactttccgggctatgccaagttgctccacggttgtactctccaccagtaaaccaagatctttggcttgaaattcagcacctgtaacgatggcgatgtcctgaagaagagccttacgcctttcaccaaagccaggtgctttaatcgcagctacattgagaattcctctaagcttgttgacaactaaagttgccaaagcttcgccagctacatcctccgcaattatgaggagtggtgctcttagttgagttgtttgttccagcaaaggaattatttcttttattgaagaaatcttctggtcagtgacaagaattctagcattttcaaactcaacaagtgacttctcaggatttgtaacaaactgaggagagatatatcctctgtcaatctccattccttcttcaacttcaacggtggtctcaaaagatgatgatgactcgatcgaaagaacaccatcagggccaaccttgtcaatagcctcagcgatcatggtaccgacgaagtcatcatttccagcagatatggcagcaacagctttaatatcaccactgcccttcacaggccttgacttcttctcaagttcctcaactaaactgtgcacggtcttatctatgccctttttgatagatactgggtttgcccctgaagtaacactcagcaggcccaattttatgatctcacgagccaggacagatgcggttgtagtcccatcacctgctgagtcatttgtcttgctggcaacctcacgaatcaaagcagcaccggcattctccattggatcagcgagctcaatagctcgagcaatggtaactccgtcattgaccactttggggctcccaaactcatccaagacgacatttcttcctctgggaccgagggtgacggcgacggcggcggcgagcttctcgacgccggcctggagggaggatcgcgatccctggtcgaaggcgatctccttggcggaggcgcgcacaacccccaaacggcgggcgggtccggggaggctggcactcctgctgctcctcctgtccctgcggaggaggaggaagagggaggaggaggaggcgcaagtgcttggcatggtggccatggtcgctcgtctagggtttccgtccgagagatggcgatggcggcggctgctgtgatctctctcttgttttcagatttggactttttttggttgacnanacncgtccg

SEQ ID NO: 4620 - DNA, 847 bp, Oryza sativa
  Clone ID: PAT_MRT4530_11487C.1
tttgtgttcaacatcaactgaatattgggtaggaattaatgtatgtgctccatttgccacaggatttcaagtctgccactctctaggaggaggaactggttctggtatgggtaccctgctcatctcaaagatcagggaggagtacccggacaggatgatgttgacattctcagttttcccctcaccaaaggtttctgataccgtggtggaaccttacaatgccacactatctgtccatcagcttgttgagaatgccgatgagtgcatggtacttgacaatgaagctctatatgacatctgcttccgcactctgaagctcgccacacccactgggatcccagcagtaccgcgccctcactgtcccggagctgacccagcagatgtgggacgccaagaacatgatgtgcgccgccgaccccaggcacggacgctacctcacggcgtcagccatgttccgcgggaaatgagcaccaaggaggtggacgagcagatgctcaacgtccagaacaagaactcgtcctacttcgtggagtggatcccgaacaacgtgaagtcgagcgtgtgcgacatccctcccaacggcctgaagatggcgtccaccttcatcggcaactcgacgtcgatccaggagatgttccgccgcgtgagcgagcagttcacggccatgttcaggaggaaggccttcttgcactggtacaccggggaggggatggacgagatggagttcaccgaggccgagagcaacatgaacgacctggtggccgagtaccagcagtaccaggacgcgacagccgacgacgaggaagaggactacggcgacgaggaggaagacgaggttgctgcctaa

SEQ ID NO: 4621 - DNA, 233 bp, Oryza sativa
  Clone ID: PAT_MRT4530_11488C.1
attacatgcacgtactatgtcatggcctgtgacaggcacacttatgtatgcacccactgagagggtatgctcggactaactagacaggttgtgtgatgctctagtgtcaatcagggtggaaacagcagagttctaaagagtgctagtaaatgtgaacaactttggactaacgagtgatgctctcccgcgccatctagtgatgaccgtctgatggactgagccggactccaggg

SEQ ID NO: 4622 - DNA, 1728 bp, Oryza sativa
  Clone ID: PAT_MRT4530_11489C.1
cgtagtggaaaaaataatgatcacgcaacacacgatattactggcaaacagtatcaattccaggatctagtaatttaagtccacagttaaagctagtatcacaattcgcatcgacaacacaccattaatcaacacaaggaaaaaaaagagtaactagagcatcaaatcacctaaaataaacatcttacgacccagatcgacagttgcaatacagtactaggtaataataacacaagggagcacatcctcaatcatcatctacgatggatgacgagagcgagaggaatggcaggcaggtaggtggcttaggcagcaacctcgtcttcctcctcgtcgccgtagtcctcttcctcgtcgtcggctgtcgcgtcctggtactgctggtactcggccaccaggtcgttcatgttgctctcggcctcggtgaactccatctcgtccatcccctccccggtgtaccagtgcaagaaggccttcctcctgaacatggccgtgaactgctcgctcacgcggcggaacatctcctggatcgacgtcgagttgccgatgaaggtggacgccatcttcaggccgttgggagggatgtcgcacacgctcgacttcacgttgttcgggatccactccacgaagtaggacgagttcttgttctggacgttgagcatctgctcgtccacctccttggtgctcatcttcccgcggaacatggctgacgccgtgaggtagcgtccgtgcctggggtcggcggcgcacatcatgttcttggcgtcccacatctgctgggtcagctccgggacagtgagggcgcggtactgctgggatcccctcgaggtcagcggtgcaaagccgaccatgaagaaatggagacgagggaaggggatcaagttaaccgccagcttgcggaggtcagagttcagctgtcccgggaagcgcaggcagcatgtaacaccactcatggttgcagaaataagatggttcagatcaccaaaagtgggtgtggcgagcttcagagtgcggaagcagatgtcatatagagcttcattgtcaagtaccatgcactcatcggcattctcaacaagctgatggacagatagtgtggcattgtaaggttccaccacggtatcagaaacctttggtgaggggaaaactgagaatgtcaacatcatcctgtccgggtactcctccctgatctttgagatgagcagggtacccataccagaaccagttcctcctcctagagagtggcagacttgaaatccttggaggcagtcgcagttctcggcctccttgcggacgacgtcgaggacggagtcgatgagctcggcgccctcggtgtagtgccccttggcccagttgttgccggcgccggactggccgaagacgaagttgtcggggcggaagatctggccgaagggaccggagcgcaccgagtccatggtgcccggctcgaggtccatgagcacggcgcgcggaacgaacctgccgccgctggcctcgttgtagtagacgttgatccgctcgagctggaggtcggagtcgcccgagtacttgccggtgtggtcgatcccgtgctcgtcgcagatcacctcccagaacttggccccgatctggttcccgcattgccccccctggatgtgcaggatctccctcatggcggcggcggtggcggcggcggcggcggaggggttggattccggcgaggtttaggggagggagggaggaggatttggg

SEQ ID NO: 4623 - DNA, 1005 bp, Oryza sativa
  Clone ID: PAT_MRT4530_1148C.1
atggcgatgcctcacctacctgtatcgactgatctgcctcctgccctgtccgggggtgttgaggccgatgatcaagcaatgaccatgcggcagattaatgcagaccgtaaccacaatctcaggtacttaaataacgtcatacccgtcgccggatggaagctgtggcgcgcgggggagcggcgatccagagggggcgcgcgtcgtccacgccgttggcctgcgctgcgctccgctccggtcgagcaaagacggccgaagaggagacgggcgggcttcggcggcccatcacgcgcgtggggcgcccctagcagcgtgccgacgggacagggcacacctgcccccactccgcctgacacagggtggaacgtgggggcactgccctccgtcccgtcgcctgtgaccggtcacaggccgcatagctcctgcctggccacccccaggtttgctctcgcggctcttccctcaccggtgcgccgcaccgtccaccgcccgccggagtcgccgtcgtcgccgccgagaagagggacgcagctgccgtgcgcggccgagtggatgtggtgtgaggcggtgaggtggagggaacacggggagctgggcgcacggcgcttcgagaccgccgcccgggcgcgccgcaccgcctcgctcgcgctctccaaccgcaaggagttcaccaccccgcacaacggcgccatcaactccctccagaatgcaaccgaatacgaagccgggttcattgccaagcacaggagcattctgcttgtggacaagcagcatgaaaatggccacaagttcgtggtatcgatggccgtatggtatcctgtggacactgggctgttcgtgacagcttcttttgatcagtatgtcaaacgcagcaatgtccccaattgcaacaacacatatgctgatcgctactggaagtgcggatgttcaggatcctttgaactctttacaaccttcatcttcttcaaagatttactctgcacagcagaggacaggcaagagtaa

SEQ ID NO: 4624 - DNA, 614 bp, Oryza sativa
  Clone ID: PAT_MRT4530_11490C.1
atggacaagttctatggagaagaggagcaatgcgagggaagtgcaggcaactgtgacatgccaaatgaggatgtcggctgtgagcaagaggaccaaacatgtgtcgatcacagtgaagctaatctagatcagatgatgcgcgacggggagaaggctgacactgatgataggaaatatcgcatgttcaaaaccatggtggaggactcaaaagctccaccttacaatggattatgcaaggcttctcggtataattgtggagacagggatgatgacggtggaagcaatagtacaatgaagaagaaaagagttccaatgaagaggataccacaagaacgtgtttctgctagaggacaccgcaaaaaaaagagcacctgcttgctcccgtgccatggtcgaaaggggaaggctgacccaagccctgctatgccgctagagcaaggagatggccaacgttaccactatcccggagtcgcatggagtcggggcgaggaggaagagccatccacgctcactgacaccgtactcaccgctgccagacataaaagctgaagatggcccggaacttcctggcaggcagcccgaaacatccggagttcagggacaggaggttccgg

SEQ ID NO: 4625 - DNA, 754 bp, Oryza sativa
  unsure (1)..(754): unsure at all n locations
  Clone ID: PAT_MRT4530_11491C.1
acggcacgaggctatacctatcatcacaccaggaagcaaacaaacaagtcgacttgacttcgccaacgttgccaacaaatttcaccaactttcaaaccacaaatacatccaaaatgtctcttcactacctccctcccgttaagccttcggccattgccctcggtaccgtcttttgccagactgctgagcttgccgtcctcacccccatctttggcgctacctacaaccgcgccaaggctgccaacactaaggaggagttccttcgctcaaaggaggcctcctctgctggaattgcttggggaacctcgctggtcggctctgctcttcagtcgtatggtgtcggtgccctcatcaacgcccctgccacccttcagctacaagggttcggcatacctncggtgctctgattctttatggctaccttctgcccctggctacatctcgcaagtcttcttggagaagcgcccgcttgagaccgtcggtgtcagcgtcgtcgctaaggtcatggagactgttggcctcgcctgcgtcctgacctggtggggaactcgcaccaaccccttcgaataagctattttagtcgcacagtttgatatgaggtggatgaatatgaaggcgcaataaaggcgtcaaggctggctagagtcgtcaattgtgttaattgcaaccacgcgttttgtttcgttttctcttaccgtagttcacaaataatcaataccgaaacaaaccagataccaaaaaaaaaaaaaaaaaa

SEQ ID NO: 4626 - DNA, 223 bp, Oryza sativa
  Clone ID: PAT_MRT4530_11492C.1
cgtcaaggtcacgaacgccaatgccctgtaagcgcgtagctgtttgtattgctaggcccgaggaagagggggttgagatggcggcgccggatgtcaaataccgctgcttcgtcggcggcctcgcgtgggccacgcgctaccgctccctccaggcagccttttggacttacggcgagatcctctacttgaagatcatcaaccacagggagacagccaggtcacg

SEQ ID NO: 4627 - DNA, 743 bp, Oryza sativa
  unsure (1)..(743): unsure at all n locations
  Clone ID: PAT_MRT4530_11493C.1
cggacgcgtgggcggacgcgtgggcggacgcgtgggcggacgcgtgggcacccgacaaagccgccaactcccccctccgctctcctccggctcgccggcctcgccagtcggcagccgccgcctcttcccgcccctctaatctccggcgctcgatgccgggggacgcggaggacctgccgccggcgataacgaagctggggcggcacttcaggctcacggaagcgcacatctgggatggctggtacgccgctggcgccgacgtgagccacaggagctggcactccgatgatatcgattccggcggctgttgtcaaacagataaagtccaaaacaagccaaccaaacagacagatgaaggcgatttgtttgttgaagatttagaattgtccaacctgatgggttctttggggcttcctgtttcattcagcacaagtaaagagaaaaagaatgcacccaataaggtaaagaagaatggaaggagagtctcctacgaagcagcaaatactctaatcgacgatgattcaaggacatgcacgggtactaaagaaactgaaagtattgttcagttgatggcttgtgtggagcanactaacccatgcagttcatctaggatcactgtgggttacagtgaagtctgccaaggtgatatcgagaagatggacanagacattgtntatgctaatgaacaggaaagagtctgtgatctctgctcttctaaagtatatcaagtagcaaagcctgag

SEQ ID NO: 4628 - DNA, 327 bp, Oryza sativa
  Clone ID: PAT_MRT4530_11494C.1
atgggctggccggctggccggctgagctactactgtccgaggcagctgcggctgagctgcacagtggcgctcagatatgtctgggaggaagcgaacaaatgttgggctaccttccctggcaccaagatccggattcccgggtacaagagctatggggcacagttccccatcccctgcgcccgtcgtcatcgtcgatctgccaccgccttcattgcgtgggatgtcaagccgggtaccgcgtgggagcgcgatcgaaggcctccaccatcacattccagcctccactctaccgcctctttccttgtgcggattcaaatgatagttcgt

SEQ ID NO: 4629 - DNA, 2461 bp, Oryza sativa
  Clone ID: PAT_MRT4530_11495C.1
atgccgggggacgcggaggacctgccgccggcgataacgaagctggggcggcacttcaggctcacggaagcgcacatctgggatggctggtacgccgctggcgccgacgtgagccacaggagctggcactccgatgatatcgattccggcgggacgaatatgaacattgcaaaagggttcagcttgggctgttgtcaaacagataaagtccaaaacaagccaaccaaacagacagatgaaggcgatttgtttgttgaagatttagaattgtccaacctgatgggttctttggggcttcctgtttcattcagcacaagtaaagagaaaaagaatgcacccaataaggtaaagaagaatggaaggagagtctcctacgaagcagcaaatactctaatcgacgatgattcaaggacatgcacgggtactaaagaaactgaaagtattgttcagttgatggcttgtgtggagcaaactaacccatgcagttcatctaggatcactgtgggttacagtgaagtctgccaaggtgatatcgagaagatggacaaagacattgtttatgctaatgaacaggaagagtctggtgatctctgctcttctaaagtattatcaagtagcaaagctgaagataactatgaacatgagacttgtcagtttcatgctaacatgaacaacccagtaaaagcagattctcctgttcgagaaaatgaaactgcagaagttgtcttgaaattgaacaaggagatgctggggcaaaactctgttgataatgaatctagattctcctctgctgagatttgtatggaaggaggattatcaacaataaaagatcaactatctggggaaactccttcaacatcccatgataataaggatgttgatcatgaaacttgtctaagttcagcagagccatctcctgtggataataatcctgcccaaaagtctgacagcagcttttacttcgaatatggtgattggagagtcctgtgggatccattctacagtcggtattacttctataacatcttgacacaggagtctacatggtatcctcctcacggattggaggattttgcatcacattctaacacatgtatacctgaagacctggacgaatttggctcacaaaataaaagcacaccggcacaagaacatgatcaggctggtggtgacaagcatttggatgagcaggggcaagcttgttacagtgaattgagcaatttatcagatattcctgatggagagagaataaatcaatgtatggtaactttcaccgatgaagcacgccacactgataatattcatcatcagaatgatagttcaatgagtgaaatttcagagatgaatcaggagattggtcgtaccaaaaagaaaaagagagtaaggagatctaagtcatatcattcatgtcaagacttggcagggaacatctccaatgacattgccaagtactgggctcagcggtattcacttttctccctttttgatagtggtataaaaatggatgaagaaggatggttttcagtgacaccagagctcatcgcaaagcatcatgcatctcgcgttggtgccggcattgtgattgactgtttcacaggagttggcggaaatgccatccattttgccaacaagtgcaggcatgttatcgctattgatattgatccccaaaagattgattgcgcgcagcataatgcaactgtctatggagtacatgatcatatagacttcgttagaggtgattttattcatgtggcgcctcgtctgaagggagaaactgtttttatgtcgcctccttggggtggaccagactatgccaaagtagatgtatatgatatcaaaaccatgcttaagccttgtgatgggtattctctctttaaacttggtacatcaatcgcttcgagggtggtgatgtttcttcctcgtaacattgaccaaaatcaattggcagacatgtgcctgtcagttgatcctccttgggcagttgaggtagagaagaatttcctcaatgggaagctgaaagccataacagcatattttgagcagcaggatggttcagatgtgcaggacgctagtgatacaaacccccaaaacccagaataccatgcttagtgaaaaacgcctgtgctcaatcatcaaaggtcagcgtaatcacaaggtgccactcaggccatcgtgtaagggcgcgttcggctgtcgtgtgcagcggtaccctgcagcctacacccagttcacttggtgcagcaacaagctgtaacatggctgtgaaacagcgctgtacaagcagccgaagaggcccctccctaagtagttgattttggttcttacttgctagcatgaagtttctgtaattatgtccagtgtatctgtttgtgtcatcaacctctctgttattgcaccgtccactgtacgatatatagcaattgcggcatcccagcaagcatcatggtgctgcttccctagc

SEQ ID NO: 4630 - DNA, 417 bp, Oryza sativa
  Clone ID: PAT_MRT4530_11496C.1
ggtggaaaggagaaagatccatttcccgcacaacggaacaaaatttactggctgaacaagatccatgatgctcctcagtttttgataggtgactatcacatactgggtagtgctactgctaatgccaaattagaacatacataaatccggttaccaacaagggttacagtctcccacaaaacagcattccagcaatacaattttctccttgaaacattttgtccttccgctcctgttcgaacagcgacgaagcccttgcaccacttgatgaattgccaaatcctggtattgcattgacctacccttgccactgtggatgcgtggccacactcgcttgacacgatccgtaccatgcgggctgctggattcatatgccactgggccgcacgatcccgtcgtcccgatgtttggtagggg

SEQ ID NO: 4631 - DNA, 684 bp, Oryza sativa
  Clone ID: PAT_MRT4530_11497C.1
atggcgagggagaggagggagatacggaggatagagagcgcggcggcgcggcaggtgacgttctcgaagcggcggcgggggctgttcaagaaggcggaggagctggcggtgctgtgcgacgccgacgtcgcgctcgtcgtcttctcctccaccggcaagctctcccagttcgccagctccaatatgaacgagatcattgacaagtatactacacattcaaagaacctggggaaaacagataagcagccttctattgatctgaatttagagcacagcaagtgtagcagtttgaatgaacaactggcagaagcaagtcttcaacttagacagatgagaggtgaggagcttgagggattgagtgtggaagagctgcagcagatggaaaagaacctcgaggcaggactgcagcgggtgctctgtacaaaggaccagcaattcatgcaagaaatcagtgagctccaacgaaagggcattcagctggcagaagagaatatgcgcctcagagaccaaatgcctcaggtgcctactgctggcttggcggttcctgatactgaaaatgttcttactgaagatggacaatcatctgaatctgtgatgactgcattaaattcgggaagctcgcaggataatgatgatggttctgatatatccctgaaactagggtgagtttccgctggaaccctt

SEQ ID NO: 4632 - DNA, 573 bp, Oryza sativa
  Clone ID: PAT_MRT4530_11498C.1
ccggccgggatctcactcgcaaatccaataaaccaaagcaaaattaattagctggtcgattgccatggcagtcgagaggaacgtcaccgcggctgcggcgatggcgtcgctggtgctcctgatgctgtccaccacggcgacggcgcgccgtgcgcggcatggtccgcccggcgagctcccgccgatccgcacacccccgccgccgtcggtgataagcgggccgcgtgtctccccggtgctgagaagcgttcccaccggaccgaaccccatcacctccgacccaccgccgccgccaccaaaccacgaacgcttccaagctgacgaggacaagggggtgttgtttccgtccaagccgcgggggcatgtgccgccgtccggtcctagcaagccgccgccatcttaccatctttcctaagttttttttttattaagaacgaccatctttaataagtggaaagcttatatgctccctccgtttttttaatagatgacgccgttgactttttcttaaaaaaaaaaaaaaaaaaaaaaaaaaaaaaaaaaaaacataaaaaaaaaaaaaaaaaagcggcc

SEQ ID NO: 4633 - DNA, 727 bp, Oryza sativa
  Clone ID: PAT_MRT4530_11499C.1
tagtggatccccgggtaaagcctctcagcctctcccacgcgccgccgccgccgccgccttggctcctccgcgcggtaggctgcaacctgcagctcgtcgacgccggctttgattccgatcgtctcaccctctcctctcctcgccgcaccagatccgcatcggcatcgttggctaggcatggagaatggggagggaggaattgtactcgtgcctgtcggtgcctcggggtggagtaggattaatcagagttggggggtgctcctcgtatcgttgtcggctactcggccctctgactttagcagttgaaggtgctgccggcggcgaggtggtcgaaacctcctcggcggtcaatgctcccctccaccacgcccagagatgcgcatctctaccgtgagggaggagggcacgccagctgaggagacagggacggcgaccgcaacggccatcctggtggaggtggtagtgtacgaaggagccgtgcagcaccatatcctcactgtccctgcagttccccacacgagcctgttgcctctattgctgtcctgcgacgccaagacatgaaaagaggcgccgacaccctgcgatggctacttctccgtctgagtctgcgacctgcctcttgctccactttggtaccaccaccaccacattcccatggccagtgctggcctctcatcctccctacctgccactgctgctagagtgctcggagcgcaatcaacaatag

SEQ ID NO: 4634 - DNA, 3281 bp, Oryza sativa
  Clone ID: PAT_MRT4530_114C.1
aatagtatattaagtaagtatagtatgaattgactattacattgtatatagatgatttatagctagtagtggactatattattaaacttgctctgttgagtttttttttgggacggggtagttacaaatggtacaagctggttttctgcaaagtacgtacgcaaccgggcagaaaaaaaatcccaaaacaacaatttcctatttttggttgacgaaaaatgttactgccactgtgaaccatatagccgtaaggctgttctattccctatgtacatggttcagtacaaaaatcagctcgacttcgacgatatagcagcaacaatttcatcccgtgccttctcgagcgcacccggcaagttctccggcttccgtccaccggcttgggcaaaattgggcttgccgccgccgcctccgccgcagagtttggctatgccgccgacgaacttccctgcctggatacccatcttgacgacgccggggctgaaggccgcaaccaagctgaccttgccatcgcccgggcttgagcctaagatcaccgcggcagggtcttcaagggtgtccacgagatactccgcggcgctcttcagaccatcggcgtccacatcacccatgttctcaaccacgaccctcgtgttatcgatagttgtagctttatttgcgagggatgctgctttgagcaccgcgattttgctgcgtagagatgatacttcgtttctggttgttcttagctcttcaagaattgtttctactctgccattcacatcttcagccttgaccttaagggatgagcacaagcaccgcatatagttgtcacgggcacaaacatactcaacaaatgcatcacctgcaacagcctcaatccttctgactccagaagctattccctgctctgagataatcttgaaaccacggatctcagcggtgttactcacatgagttccaccacagagttccatagacaccccagggacctctacaactctgacctgctcgccatatttctctccaaacattgcaattgcaccagcattttttgcatcttgcagatccatcacttttgtctcaagatgagtagcactgctaacccattggtttacaagtgattcaattttcatcaattcctcttcagaaagggggcggtggaaattgaagtcaaatcggagacggtcaaatgccacaagggatcctgcctgtgatgtttctgaaccaatgatacttttaagagcagattgtaggagatgtgttgcagtatgatgggccttagccccctgcctcaattttgcatcaacagcagcatcgatttccttcccaacttctacggacccctgtttaattgtgcctttgtgaacaaagatattccccagggatttttggacgtcattgatttctatgactgccttctgttttgcatcttcttctccatagacatacaagaaaccattatctcccacttgaccacctgattcagcataaaatggtgtccgatctaaaaatatttctacatcagaaccttctgaaactacattcactgagtttccattaactaaaagacctttaacaacagcagtggcagaaagagagtcgtaccccagaaattcagtatcggggatactcttgacaatctcagtctcatttcctacagaaagtttaactacattatgagcagcctgagattgtttcctttggttttccatttccatatcaaatcccttcatgtcaacaattacacctcgttcacctgatatttcagctgtaatctctactggaaaaccatatgtatcatacaaaaggaaaacatcttttccagatagacaaggtttaccaccattattaccagcacttgataatgcctcatccagaagttcgtccaataatttttcacctctttccaaagtctgcacaaatcgcagttcttccctttgaagttctccaagaattgatttccttctagattcaacatccggatctatctcagtgctaagactgattgctacctcagctagtgaaggtaaaaaggcaccttctgaatttccatgcccatcacctcttatacctatcagtctaccagttcgaactactcttcttataagccttcggacaacatatcctctcccaatatttgagggaatgactccatctgatatgagataaacaactgctctcatgtgatccccaattattttaagatttgtcttcatagcatcatcagctgtggtgtacgacactaatgccatgcttgctgccttttcaataattgggaaaatcaagtctgtctcatagttgtttggaaccttttgaagaatacgtgccatacgctcaaggcccatccctgtatcaatgttcttttgtttcaatggttcaagagatccgtcatcctttttgttgtattgcatgaagacaagattgtagaattcgatgaatcgactatcatcacccaaatccgcatctgaggatcctctctcaggatagaaatcatagtaaatttcagaacatgggccacagggtccagttgcaccactagtccaaaagttatcatcctcgcccaatctctttattcgctcctttggtactccaacctcattgtgccaaatggaaaatgcttcatcatcatcttgaaatacactaatccatagtctttctgggggtaacccaaactccttggttgttagctcccatgcccatgtgattgcttccttcttgaagtaatcaccaaagctgaagttcccaagcatctcaaagaaggtttgatgccggctcgtacgccccacattttcaatgtcatttgtccgtatgcatttctgggaggtagtagcacacggtacacgcctaggttccttgccaaggaatataggcttgaactgaagcatcccggcgatagtgaggaacacggtggggtcatctggcacaagcgacgagctaggaaggatcttgtggccacgggcagcatagaaatcaaggaaacgtcggcgtatggcgtccccgctccactcccccgaactcgctgcgcccacctcctgggttgccgattcgactgaggctgatgagctgctggtcttcacgagcaccccgcgctcacgagacgaacccatactcctcacgacgcaatctcccgcacagcccaacgacccgcggggtcgaggagaggagcggaggcacaggcggcggcggcggccggagagaggcaggagaacgtggaggcggtgggcggcgggcgcggtggagaggagggggagaggggagcgagaggtggcggtgggggataggagtgcggccgcctccat

SEQ ID NO: 4635 - DNA, 420 bp, Oryza sativa
  Clone ID: PAT_MRT4530_11500C.1
ctcctattgtactctgctgcctacgtctttcttgagctaatactatatatccatctggcggggacggcgacgatcatggagaccggggacgacgtggaccacgcctggggactgcgctactcctactcgccgctcgccgccggggacggcgactccgacgacctcggcgccgtccgtcgatccgggaggcgcccgctctgcggcaacctgttacttggctccgactcagtgatcgacagcttcatcgagcagttcatcttcgatctgtcaccgaggctgccactggcgtctaccatcggaggtctattcataatcggtagcggttccttgaatggaggagctgcatatctgtttgaagctgactgtgccaatgaggagctcactgaagctgataagaagggatcatggccgctgagcgcc

SEQ ID NO: 4636 - DNA, 237 bp, Oryza sativa
  Clone ID: PAT_MRT4530_11501C.1
ctacttcgatcaaggctcaagcttcaagcacacaagctatggttgggcacactaaactgtgccgtcaaatgatggcaggtgatgctgacacacaagctgacaaacactggctgcccactgtagcattcctaccgtcgtgtatctggtattgaattgtacaagtatagtagtacaggagagaaaaataaagtcatgcatcatcgtgtgtaacaagtggaaacaaaaaaaaaaaaaaaa

SEQ ID NO: 4637 - DNA, 102 bp, Oryza sativa
  Clone ID: PAT_MRT4530_11502C.1
atgtcgggtgatcaagccgacgacgttcgcaaggaattatccgttgggcgcgacgactctgcatttgtcgagatcgttctcaataatagggtaagaaaatag

SEQ ID NO: 4638 - DNA, 2910 bp, Oryza sativa
  Clone ID: PAT_MRT4530_11503C.1
atggccgtcggtgcaatgcttcctactgtaaccatgttgccgagaggggtacgccaggacatagtgcgtggctcgactactgatgttgatgatgcagcgttcgctcatgccacacacaacacctctaaggccggttggctgcaccaagcccatcatgtcaacaaaatcagagagacgaatctacatgcaaatcagcctcgcttacacgattggcctattatgtcgccgttgttgggcgtctacgtcttcaccgccggcctgcctccgtctgccgccgactggtgtcctcgcctgcacggcaggcctattatgccgtcgttgttgggcgtctacgtcttcaccgccggcctgcctttgccgccgccgaccggtgtttccgcctgcaccgctggcctattatgccgccgttgttgggcgtctacgttttcaccgccggcctgcctttgccgccgccgaccggtgtttccgcctgcaccgctggcctattatgccgccgttgttgggcgtctacgtcttcaccgccggcctacctttgccaccgccgaccggtgtttccgcctgcaccgctggcctattatgccgccgttgttgggcgtctacgtcttcaccgccggcctgcctttgccgccgccgaccggcgggacgttacactgcctttgccgccgccgaccggtgtttccgcctgcacggctggtcttttatgccgccgttggtgggcatcttcgctttcaccgtcgaccgcctcgttcgccgctgactggtgtcctcgtctgcacggcttatgaagccgttgttgggcgcctacgtcttcaccgccggccgcctcgtctaccgctgactggtgtcctcgcttgcacggctggcctattatgccgccgttgttgggcgtctacgtcttcaccgtcggcctgcctttgccgccgccgaccggtgtttccgcctgcacggctggcctattacgccgccgttggtgggcatcttcgctttcaccgtcgacaacctcgttcgccgctgactggtgtcctcgcctgcacagctagcctattatgccgccgttgttgggcgtctacgtcttcacctccggcctgcctccgtctgctgccgactggtgtcctcgcctgcacggctggcctattatgccgccgttgttgggcgtctacgtcatcacggccggcctgcctttgccgccgccgaccggtgtttccgcctgcaccgctggcctattatgccgctgttgttaggtgtctacgtctttcaccgccggcctgcctttgccgccgtcgaccggtgtttccccctgcacggctggcctattatgccaccgttggtgggcatcttcgctttcaccgtcgaccgcctcattcgccgctgactggtgtcctcgcctgcacggctggcctattatgaagccgttgttgggcgcctacgtcttcaccgaccggctgcctcgtccaccgccgactggtgtctccgcctgcacggctggcctattatgccaccgttgttgggtgtctacatcttcaccgccggctgccttcgtctccgccgactggtgtcaccgcctgcatggctagcctattatgccgctgttgttgggcgtctacgtcttcaccgaccggccgcctcgtccgccgccgactggtgtctccgcttgcacggctggcctattatgccgctgttgttgggcgtctacgacttcaccgctggcttgccttcgccaccgctgactggtgcttccgcctgcacggccagcctattatgccgccattgttgggcgtctacgacttcaccgccggcttgccttcgtccgccgccgactggtgtctccgcctgcacggctggcctattatgccgccgtcgttagacatctacatcttcaccgaccgaccacctcgtatgacgccaactggtgctatcgtcttcacggctggccacgtcgccgccaccgctaataggcgtcgttatcttcaacacaagttgtctgcgtctgctgccgactggtttcttcacttccatggctgcatgattatgatactattgattggccttatagtcttcaccgccagtcgtcttgtctactgattgactggtgtcctcgcctctacggctggtttataccgctaccactactgatggacgtcatcgtcttcattgctggctgccttgtctgacgccgactggtttgttcgcctccacagctacatgtcttcgtcaacattgactggtgtcatcgtcatcaccagtttgcctttgccgccgcccatggcgtcttcactttcatggctggcctattttgccgcggttaaagaacgtctttgttttcatcatcactctacttcttcgagcaacttcatctttattatcttcggcaccggcaaactctattgcctttacttcgcaagctttgctacttcgccgaccacgacgtctacaagagcctcaacatctcggcatgcgtcaacaagtataatgccgtgttattttactataacaagtggtgttccaatattcaagatttttactcggacatcttctatgcgtatcttcactcaagcaatgactactcgacgacaagaagctacaattctcgactctatgttcagttgtttctcaactaaccaaagagtcgggggctacacaaatacaagactctcaaaattcgacaagctttatgtcaagatgaagcaatcaatcaatcagccaacgagttctatggaatctacttcgggagtcatcagtttggtcttcacttcagagcagacgttctacttcagcaactcttattattacaccggcaattttggcttcttcacgccgccacaatctgctccaaatttttccaagtatcaaagtttgagattctatctacatgtccgggagtttagagttatcaaccaatcagctcagttt

SEQ ID NO: 4639 - DNA, 1172 bp, Oryza sativa
  Clone ID: PAT_MRT4530_11504C.1
cgttcgctcatgccacacacaacacctctaaggccggttggctgcaccaagcccatcatgtcaacaaaatcagagagacgaatctacatgcaaatcagcctcgcttacacgattggcctattatgtcgccgttgttgggcgtctacgtcttcaccgccggcctgcctccgtctgccgccgactggtgtcctcgcctgcacggcaggcctattatgccgtcgttgttgggcgtctacgtcttcaccgccggcctgcctttgccgccgccgaccggtgtttccgcctgcaccgctggcctattatgccgccgttgttagccgttgttgggcgcctacgtcttcaccgaccggctgcctcgtccaccgccgactggtgtctccgcctgcacggctggcctattatgccaccgttgttgggtgtctacatcttcaccgccggctgccttcgtctccgccgactggtgtcaccgcctgcatggctagcctattatgccgctgttgttgggcgtctacgtcttcaccgaccggccgcctcgtccgccgccgactggtgtctccgcttgcacggctggcctattatgccgctgttgttgggcgtctacgacttcaccgctggcttgccttcgccaccgccgaccggtgcttccgcctgcacggccggcctattatgccaccgttgttgggtgtctacatcttcaccgccggcttgccttcgtctccgccgactggtgtcaccgcctgcacggctggcctattatgccgctgttgttgggcgtctacgtcttcaccgaccggccgcctcgtccgtcgccgactggtgtctccgcctgcacggctggcctattatgccgctgttgttgggcgtctacgacttcaccgccggcttgccttcaccactgccgaccggtgcttccgcctgcacggccggcctattatgccaccgttgttgggtgtctacatcttcaccaccggcttgccttcgtctccgccgactggtgtcaccgcctgcacggctggcctattatgccgctgttgttgggcgtctacgtcttcaccgaccggccgcctcgtccgtcgccgactggtgtctccgcctgcacggctggcctattattccgttgttgttgggcgtctacgacttcaccgccggcttgccttcgccaccgccgactg

SEQ ID NO: 4640 - DNA, 3566 bp, Oryza sativa
  Clone ID: PAT_MRT4530_11505C.1
atggccgtcggtgcaatgcttcctactgtaaccatgttgccgagaggggtacgccaggacatagtgcgtggctcgactactgatgttgatgatgcagcgttcgctcatgccacacacaacacctctaaggccggttggctgcaccaagcccatcatgtcaacaaaatcagagagacgaatctacatgcaaatcagcctcgcttacacgattggcctattatgtcgccgttgttgggcgtctacgtcttcaccgccggcctgcctccgtctgccgccgactggtgtcctcgcctgcacggcaggcctattatgccgtcgttgttgggcgtctacgtcttcaccgccggcctgcctttgccgccgccgaccggtgtttccgcctgcaccgctggcctattatgccgccgttgttgggcgtctacgttttcaccgccggcctgcctttgccgccgccgaccggtgtttccgcctgcaccgctggcctattatgccgccgttgttgggcgtctacgtcttcaccgccggcctacctttgccaccgccgaccggtgtttccgcctgcaccgctggcctattatgccgccgttgttgggcgtctacgtcttcaccgccggcctgcctttgccgccgccgaccggcgggacgttacactgcctttgccgccgccgaccggtgtttccgcctgcacggctggtcttttatgccgccgttggtgggcatcttcgctttcaccgtcgaccgcctcgttcgccgctgactggtgtcctcgtctgcacggcttatgaagccgttgttgggcgcctacgtcttcaccgccggccgcctcgtctaccgctgactggtgtcctcgcttgcacggctggcctattatgccgccgttgttgggcgtctacgtcttcaccgtcggcctgcctttgccgccgccgaccggtgtttccgcctgcacggctggcctattacgccgccgttggtgggcatcttcgctttcaccgtcgacaacctcgttcgccgctgactggtgtcctcgcctgcacagctagcctattatgccgccgttgttgggcgtctacgtcttcacctccggcctgcctccgtctgctgccgactggtgtcctcgcctgcacggctggcctattatgccgccgttgttgggcgtctacgtcatcacggccggcctgcctttgccgccgccgaccggtgtttccgcctgcaccgctggcctattatgccgctgttgttaggtgtctacgtctttcaccgccggcctgcctttgccgccgtcgaccggtgtttccccctgcacggctggcctattatgccaccgttggtgggcatcttcgctttcaccgtcgaccgcctcattcgccgctgactgccgttgttgggcgcctacgtcttcaccgaccggctgcctcgtccaccgccgactggtgtctccgcctgcacggctggcctattatgccaccgttgttgggtgtctacatcttcaccgccggctgccttcgtctccgccgactggtgtcaccgcctgcatggctagcctattatgccgctgttgttgggcgtctacgtcttcaccgaccggccgcctcgtccgccgccgactggtgtctccgcttgcacggctggcctattatgccgctgttgttgggcgtctacgacttcaccgctggcttgccttcgccaccgccgaccggtgcttccgcctgcacggccggcctattatgccaccgttgttgggtgtctacatcttcaccgccggcttgccttcgtctccgccgactggtgtcaccgcctgcacggctggcctattatgccgctgttgttgggcgtctacgtcttcaccgaccggccgcctcgtccgtcgccgactggtgtctccgcctgcacggctggcctattatgccgctgttgttgggcgtctacgacttcaccgccggcttgccttcaccactgccgaccggtgcttccgcctgcacggccggcctattatgccaccgttgttgggtgtctacatcttcaccaccggcttgccttcgtctccgccgactggtgtcaccgcctgcacggctggcctattatgccgctgttgttgggcgtctacgtcttcaccgaccggccgcctcgtccgtcgccgactggtgtctccgcctgcacggctggcctattattccgttgttgttgggcgtctacgacttcaccgccggcttgccttcgccaccgccgactggtgcttccgcctgcacggccggcctattatgccaccgttgttgggcgtctacatcttcaccgttagcttgtcttcgccaccgtcgactggtgcttccgcctgcacggctggcctactatgccgccgttgttgggcgtctacgtcttcaccgagcggccgcctcgtccgccgccgactggtgtctccgcctgcacagctggcctattatgccgctgttgttgggtgtctacgacttcaccgccgacttgccttcgtccgccgactggtgtcaccgcctgcacggctggcctattatgccgctgttgttgggcgtctatgacttcaccgccggcttgccttcgccaccgctgactggtgcttccgcctgcacggccagcctattatgccgccattgttgggcgtctacgacttcaccgccggcttgccttcgtccgccgccgactggtgtctccgcctgcacggctggcctattatgccgccgtcgttagacatctacatcttcaccgaccgaccacctcgtatgacgccaactggtgctatcgtcttcacggctggccacgtcgccgccaccgctaataggcgtcgttatcttcaacacaagttgtctgcgtctgctgccgactgctacatgtcttcgtcaacattgactggtgtcatcgtcatcaccagtttgcctttgccgccgcccatggcgtcttcactttcatggctggcctattttgccgcggttaaagaacgtctttgttttcatcatcactctacttcttcgagcaacttcatctttattatcttcggcaccggcaaactctattgcctttacttcgcaagctttgctacttcgccgaccacgacgtctacaagagcctcaacatctcggcatgcgtcaacaagtataatgccgtgttattttactataacaagtggtgttccaatattcaagatttttactcggacatcttctatgcgtatcttcactcaagcaatgactactcgacgacaagaagctacaattctcgactctatgttcagttgtttctcaactaaccaaagagtcgggggctacacaaatacaagactctcaaaattcgacaagctttatgtcaagatgaagcaatcaatcaatcagccaacgagttctatggaatctacttcgggagtcatcagtttggtcttcacttcagagcagacgttctacttcagcaactcttattattacaccggcaattttggcttcttcacgccgccacaatctgctccaaatttttccaagtatcaaagtttgagattctatctacatgtccgggagtttagagttatcaaccaatcagctcagttt

SEQ ID NO: 4641 - DNA, 947 bp, Oryza sativa
  Clone ID: PAT_MRT4530_11506C.1
atggccgtcggtgcaatgcttcctactgtaaccatgttgccgagaggggtacgccaggacatagtgcgtggctcgactactgatgttgatgatgcagcgttcgctcatgccacacacaacacctctaaggccggttggctgcaccaagcccatcatgtcaacaaaatcagagagacgaatctacatgcaaatcagcctcgcttacacgattggcctattatgtcgccgttgttgggcgtctacgtcttcaccgccggcctgcctccgtctgccgccgactggtgtcctcgcctgcacggcaggcctattatgccgtcgttgttgggcgtctacgtcttcaccgccggcctgcctttgccgccgccgacggtgtttccgcctgcaccgctggcctattatgccgccgttgttgggcgtctacgttttcaccgccggcctgcctttgccgccgccgaccggtgtttccgcctgcaccgctggcctattatgctgccgttggtgggcatcttcgctttcaccgccggcctgcctttgcaacttcttttccggaagccaatctccaaagaactccagggttaagcgtgctgggcctggagcaatttgggatgggtgaccgaccgggaacccggaaggcgggacgttacactgcctttgccgccgccgaccggtgtttccgcctgcacggctggtcttttatgccgccgttggtgggcatcttcgctttcaccgtcgaccgcctcgttcgccgctgactggtgtcctcgtctgcacggcttatgaagccgttgttgggcgcctacgtcttcaccgccggccgcctcgtctaccgctgactggtgtcctcgcttgcacggctggcctattatgccgccgatgtagggcgtctacgtcttcaccgtcggcctgcctttgccgccgtcgaccggtgtttccgcctgcacggctgg

SEQ ID NO: 4642 - DNA, 282 bp, Oryza sativa
  Clone ID: PAT_MRT4530_11507C.1
atgtggcaccaatctcagacatttcgtgtcatcggtgttgctggcttgagctcaatgccttgcaggttctcactatcatgtatttctgaatttgtgcaggttgatgtgatggaaaaggactgcagtttggatccaaactttggatctaaacacagcctaaatgtgaaactaattctatcttacaggcaacaaactcaggaaatcgagatgcacacttcaaatgatctggtagaaatccccaccttaaatcctttatactctacaaaccacaactatctttaa

SEQ ID NO: 4643 - DNA, 990 bp, Oryza sativa
  Clone ID: PAT_MRT4530_11508C.1
atggaagtgaagaaaccagtcggcagcagacgcagacaacttgtgttgaagataacgacgcctattagcggtggcggcgacgtggccagccgtgaagacgatagcaccagcggaagcaccagtcagcggtggcgaaggcaagccggcggtgaagtcatagacgcccaacaacagcggcataataggccagccgtgcaggcggtgacaccagtcggcggacgaaggcaagtcggcggtgaagtcgtagacacccaacaacagcggcataataggccagctgtgcaggcggagacaccagtcggcggcggacgaggcggccgctcggtgaagacgcggaagcaccagtcggcggtggcgaaggcaagccggtcggtgaagacgcgaggacaccagtcagcggcgaacgaggttgtcgacggtgaaagcgaagatgcccaccaacggcggcgtaataggccagccgtgcaggcggaaacaccggtcggcggcggcaaaggcaggccgacggcgcccaacaacggcttcataagccgtgcagacgaggacaccagtcagcggcgaacgaggcggtcgacggtgaaagcgaagatgcccaccaacggcggcataaaagaccagccgtgcaggcggaaacaccggtcggcggcggcaaaggcagtactgccctcacagaccaacacatatcttttctgcacactttgtcctcactcatgtgcacccgggttcccggtcggcggaaacaccggtcggcggcggcaaaggcaggccggcggtgaagacgtagacgcccaacaacggcggcataataggccagcggtgcaggcggaaacaccggtcggcggtggcaaaggcggaaacaccggtcggcggcggcaaaggcaggccggcggtgaaaacgtagacgcccaacaacggcggcataataggccagcggtgcaggcggaaacaccggtcggcggcggcaaaggcaggccggcggtgaagacgtag

SEQ ID NO: 4644 - DNA, 3366 bp, Oryza sativa
  Clone ID: PAT_MRT4530_11509C.1
atggccgtcggtgcaatgcttcctactgtaaccatgttgccgagaggggtacgccaggacatagtgcgtggctcgactactgatgttgatgatgcagcgttcgctcatgccacacacaacacctctaaggccggttggctgcaccaagcccatcatgtcaacaaaatcagagagacgaatctacatgcaaatcagcctcgcttacacgattggcctattatgtcgccgttgttgggcgtctacgtcttcaccgccggcctgcctccgtctgccgccgactggtgtcctcgcctgcacggcaggcctattatgccgtcgttgttgggcgtctacgtcttcaccgccggcctgcctttgccgccgccgaccggtgtttccgcctgcaccgctggcctattatgccgccgttgttgggcgtctacgttttcaccgccggcctgcctttgccgccgccgaccggtgtttccgcctgcaccgctggcctattatgccgccgttgttgggcgtctacgtcttcaccgccggcctacctttgccaccgccgaccggtgtttccgcctgcaccgctggcctattatgccgccgttgttgggcgtctacgtcttcaccgccggcctgcctttgccgccgccgaccggtgtttccgcctgcacggctggcctattatgctgccgttggtgggcatcttcgctttcaccgccggcctgcctgtaacatcccggcctagggcttaataggattaatagaatactcatatcaacaagttgcaactttttttccggaagccaattgtgcagaaaagacatgtgttggtctgtgagggtagtctatgacctatgaaagctatcagacgtaagcgggcttggcctgggggaaggcgggacgttacaaaatggtatcagagccgactctcgcggtttcacgggctcgtgtgtcgcagttgcgcaggcatggtgcgcatggctggtgttgatccagagtggtcacacagcatgccacatgcgctggcactggacatacggacgtggccaagaggggacgttcctggcctggggttgatcgacgggggcgtgttggtctgtgagggcagtctatgacctatgaaagctatcagatataagcgggcccggcctgggggaaggcgggacgttatatgacctatgaaagctatcagatataagcgggcccggcctgggggaaggcgggacgttacactgcctttgccgccgccgaccggtgtttccgcctgcacggctggtcttttatgccgccgttggtgggcatcttcgctttcaccgtcgaccgcctcgttcgccgctgactggtgtcctcgtctgcacggcttatgaagccgttgttgggcgcctacgtcttcaccgccggccgcctcgtctaccgctgactggtgtcctcgcttgcacggctggcctattatgccgccgttgttgggcgtctacgtcttcaccgtcggcctgcctttgccgccgccgaccggtgtttccgcctgcacggctggcctattacgccgccgttggtgggcatcttcgctttcaccgtcgacaacctcgttcgccgctgactggtgtcctcgcctgcacagctagcctattatgccgccgttgttgggcgtctacgtcttcacctccggcctgcctccgtctgctgccgactggtgtcctcgcctgcacggctggcctattatgccgccgttgttgggcgtctacgtcatcacggccggcctgcctttgccgccgccgaccggtgtttccgcctgcaccgctggcctattatgccgctgttgttaggtgtctacgtctttcaccgccggcctgcctttgccgccgtcgaccggtgtttccccctgcacggctggcctattatgccgctgttgttgggcgtctacgtcttcaccgaccggccgcctcgtccgtcgccgactggtgtcctcgcctgcacggctggcctattatgaagccgttgttgggcgcctacgtcttcaccgaccggcttgccttcgccaccgccgactggtgcttccgcctgcacggccggcctattatgccaccgttgttgggcgtctacatcttcaccgttagcttgtcttcgccaccgtcgactggtgcttccgcctgcacggctggcctactatgccgccgttgttgggcgtctacgtcttcaccgagcggccgcctcgtccgccgccgactggtgtctccgcctgcacagctggcctattatgccgctgttgttgggtgtctacgacttcaccgccgacttgccttcgtccgccgactggtgtcaccgcctgcacggctggcctattatgccgctgttgttgggcgtctatgacttcaccgccggcttgccttcgccaccgctgactggtgcttccgcctgcacggccagcctattatgccgccattgttgggcgtctacgacttcaccgccggcttgccttcgtccgccgccgactggtgtctccgcctgcacggctggcctattatgccgccgtcgttagacatctacatcttcaccgaccgaccacctcgtatgacgccaactggtgctatcgtcttcacggctggccacgtcgccgccaccgctaataggcgtcgttatcttcaacacaagttgtctgcgtctgctgccgactgctacatgtcttcgtcaacattgactggtgtcatcgtcatcaccagtttgcctttgccgccgcccatggcgtcttcactttcatggctggcctattttgccgcggttaaagaacgtctttgttttcatcatcactctacttcttcgagcaacttcatctttattatcttcggcaccggcaaactctattgcctttacttcgcaagctttgctacttcgccgaccacgacgtctacaagagcctcaacatctcggcatgcgtcaacaagtataatgccgtgttattttactataacaagtggtgttccaatattcaagatttttactcggacatcttctatgcgtatcttcactcaagcaatgactactcgacgacaagaagctacaattctcgactctatgttcagttgtttctcaactaaccaaagagtcgggggctacacaaatacaagactctcaaaattcgacaagctttatgtcaagatgaagcaatcaatcaatcagccaacgagttctatggaatctacttcgggagtcatcagtttggtcttcacttcagagcagacgttctacttcagcaactcttattattacaccggcaattttggcttcttcacgccgccacaatctgctccaaatttttccaagtatcaaagtttgagattctatctacatgtccgggagtttagagttatcaaccaatcagctcagttt

SEQ ID NO: 4645 - DNA, 716 bp, Oryza sativa
  unsure (1)..(716): unsure at all n locations
  Clone ID: PAT_MRT4530_1150C.1
gaactagtggatccccgggctgcaggttcattttctctcctcctctcttccctttcacttggccgtcgtctcctccccccgaccccgccgccgccgacctctctcctccgcgccgccgacgaaccgccgccgccgaatccccctcgccggcggccacccggatctccccagccatgtacggcggcgatgaggtctcggccatcgtcatcgacgtggggtcctacagctgcaaggcggggtacgccggtgatgacacccccaaggccgtcttcccctcggttgttggttcaattgagcaaacgggagaaactgatgaagcaaaggcagacaaggaggctgaagctgcatcagattctaagaatggagccaaacctatggatgtggacaaagccaagacaaagcgcaaattgtatgttggtcaagaattggagttcaggagggatcatatggaggtgatttcaccaatgaaagatggaacagttactgattgggatattgttgacaatatatggaatcatgctttcaggcagcggctattgatcaatcctgaggagcatcctatgttgatagctgaaccatctacaaacacagggcagcaaagagagaaagcagcagaacttatgtttgagaagtacaaagtgccggcactgttcctagcgaanaatgcagttctcacatcttttgcatctggacgtgctacatcgttggtagttgac

SEQ ID NO: 4646 - DNA, 388 bp, Oryza sativa
  Clone ID: PAT_MRT4530_11510C.1
ggcacagaaatagtttcctttgaactcttatatttgtaatacacaacacccatggtgttgatatcaagttttttttccccttctcgcctcttctgcacaattatttttttttctttcggcgagagaggctgagactttttccctcagatatcaaaatacacaaataatacacagagatagagagttacagatcgaatcgagctacggggggaatcgcgtcgatcggcggccggcgtgtcccttcgccgccgaggaggaagaagacgaaccccgcgcgagtgagtcccgagtcccgacgaaggaggcctgcccggagtcggaacgcgagaggcgggcggagtagaggaaggcgccgagtcgaggcgatggcggggaggggggggggggc

SEQ ID NO: 4647 - DNA, 376 bp, Oryza sativa
  Clone ID: PAT_MRT4530_11511C.1
gttggctgaagccccacaaggcctttattcacatagggaaaaacatatgacaggaaaaggtagcaaaaacgctttcagtccctaatcatgacctgacctatcatttaatttcacaccggagagaacaaaagcctggttatacaacggatttagggattttaacccagacaggggaatccacagttggctgggccgaaattttttcctttggggggcccgaaggatgcaataaaaccaatttggctttttggtaactccctaaatttgggagggcttgggctgttgggggaactcctggcggaggactttcctcatgacctttgctggaggctgttctggggggcgaggggccccccacatctgaagaaaccttgaa

SEQ ID NO: 4648 - DNA, 409 bp, Oryza sativa
  unsure (1)..(409): unsure at all n locations
  Clone ID: PAT_MRT4530_11512C.1
tccnatctagaactactatttatatatttttagccggcccttttttcttttaaaaataaaactctgtcttcccctataggggggatgtgcaaaaaaaaactctatgcttcccaggctataccacacacaaaaactgtgaaaatctttaaagcaacccgctccgaactgcctacgacactaacacaaacatatgccgcgaatttattggtagcccctacgctccgaaaataaatcttgaagcaccgcactagcgataggtgtgacaccacacgcaaaatactcaagaacacagcaaaggagacacaagacactcgagagagcgccgcgaaacctggagagacgtttatacaaaaccccccgaaaaaactcgtggagaacaccatgcaagacgcgctctgagcccacaaca

SEQ ID NO: 4649 - DNA, 696 bp, Oryza sativa
  Clone ID: PAT_MRT4530_11513C.1
atggcctccgacctgcgcccgccggagcaccaggtggcggggcaccgcgcgtccgccgacaagctgggcccgctcgtcgacggcgaggggctcttctacaagcccctccaggccggggagcgcggggagcacgaggccgccttttacgccgcgttcaccgcgcacccggccgtcccgccccggtgcctcgccaaggaccgcgagaccaccagcgcgctcctcggcttccgcgtctccggcgtccgggtggtcgatgcccggggcggcgccgtgtggcgcccggaccggtcggagctgaaggggatcgacgccgccggggtccgccgcgtgctccgccgctacgtgtccacgggcggcggcgacggcctggactgcgcgctcgccgccgcggtgtacggaggggagggcggcgtcctggctcagctgcgggagctcaaggcgtggttcgaggagcaaaccctgtaccacttctactcggcgtcgattctgttcggctacgacgccaatgcggcggcggcggctgctcccggaggtggaagcggcggtgtaagggtgaagctggtggacttcgcgcatgtcgacgatggggacggggtgattgaccacaacttcttgggcgggctctgctcgctcatcaagttcatcggcgacattgtcgccgaggttaccgagaaggcgtcttcagatcattcttga

SEQ ID NO: 4650 - DNA, 1108 bp, Oryza sativa
  Clone ID: PAT_MRT4530_11514C.1
atggcctccgacctgcgcccgccggagcaccaggtggcggggcaccgcgcgtccgccgacaagctgggcccgctcgtcgacggcgaggggctcttctacaagcccctccaggccggggagcgcggggagcacgaggccgccttctacgccgcgttcaccgcgcacccggccgtcccgccccgggtccggggcgccttcttcccgcgcttccacggcacccgcttcctcccggccccagccagccccggcggcgcgccctacccgcacatcgtcctcgacgacctcctcgcgggcctcccgtccccctgcgtcgccgacgtcaagatcggcgcctgcacgtggccgccgcgatccccggacccctacgtcgccaagtgcctcgccaaggaccgcgagaccaccagcgcgctcctcggcttccgcgtctccggcgtccgggtggtcgatgcccggggcggcgccgtgtggcgcccggaccggtcggagctgaaggggatcgacgccgccggggtccgccgcgtgctccgccgctacgtgtccacgggcggcggcgacggcctggactgcgcgctcgccgccgcggtgtacggaggggagggcggcgtcctggctcagctgcgggagctcaaggcgtggttcgaggagcaaaccctgtaccacttctactcggcgtcgattctgttcggctacgacgccaatgcggcggcggcggctgctcccggaggtggaagcggcggtgtaagggtgaagctggtggacttcgcgcatgtcgacgatggggacggggtgattgaccacaacttcttgggcgggctctgctcgctcatcaagttcatcggcgacattgtcgccgaggttaccgagaaggcgtcttcagatcattcttgaaaattttgtcagcttggagatcagatgattaacacggtaaagcaatgcccctctatgtttattgttctttttgttttgttagatttggatgacaatgttagacattgagtcagtaaacaaaaggaggatgtaaagcaaaacggcaaatctcttgtgtcttggattatgttctatactgatggaagaagattaaagtataaacagaaaaaaaaaaaaaaaa

SEQ ID NO: 4651 - DNA, 1017 bp, Oryza sativa
  unsure (1)..(1017): unsure at all n locations
  Clone ID: PAT_MRT4530_11515C.1
gctgcctacctagtcgctgatggtgctttggacgatgatgacgaaggagcagtaaaccagcgcagcacaggccctcatgctgaggaggaaggaaggaagcacagcgtggaggggagggggagcagcggaagcggtgcaccgggaggggaggagggacggtggagcaggcgcaccgggagggacggaggtagcgcaacaggacggcgcatccgccgccagaacaaggatcaaactgagctgcggcgatcgtactcggaatactcgaacaccaccagagcggcggatcatctcgtcgccggcgccggagtagtggcagtggcttcctccggcggtgcctccggcggcggcggcggcggcagcggctcggacgtggagacgacggtgcggtgcgcgtgctgcagcgtgacggaggagtgcacggcggcctacatccgccacatccgggcggcgcactacggagactgggtgtgcggcctctgcgcggaggccgtgcgcgagcggatgcgcggcggcggcggcggcggcggcgtggaggcggcgctgcggtggcacatggaggtgtgcagggacttcaactcgacgacgaggctgaacccgaagctgtccctcgccggctccatgagggacatcgccaggaggagcttcaaccggcggacgacggcgtcgacgtcggcggcggcgacgtgccacgaccagctccgggcggcgaagacgatggcgaggacactcagctgccagcaaagtgcccatcacctgttcaatgaaatgtctagccgatatggggtgtccgagggagatgttcttcacgtcatgaacgaggagatgttaaccagggatgaggcaatccattggttactagaggactttgagctgatggaatcccagcgcagatttgatgataaacttgatcgggcaaccaccaccttcgaccttgcctactttagtgcccacccagtgttcgacgccgggaccaagntacgctaccaccaaggcagtgctcaatggcactcctactaa

SEQ ID NO: 4652 - DNA, 444 bp, Oryza sativa
  Clone ID: PAT_MRT4530_11516C.1
cgggggtgggcacaaaacagagttccggtaaaggccaccggtggtattaagggtggttcgcacacaccccattttgacaagacactcaccagatgtgaaaccgccagggtacgtaaaaaagacccccgtttcccaaagaaaaaggcgcaaggggtcagtactaagaaccggaaggggcccaatttcgcaagccgcctccgccggggggtggccgattcattaatgcagttggcccgccgggtttcccgcctgaaaacgggccaccctcctgttacacgaagcagtacaaaagagtcccgtaattctatcgaaagtggagacacaaagtttacggtgagtcgtattacaattcactggccgtcgttttacaacgtcgtgactgggaaaaccctggcgttacccaacttaatcgccttgcagcacatccccctttcgccagctggc

SEQ ID NO: 4653 - DNA, 152 bp, Oryza sativa
  Clone ID: PAT_MRT4530_11517C.1
atgccgttggcatctgcaggcgctccgtatcccccgccgtcgtatctctgccgccgcaccttagccttcgagcgctccgccctcgccgccggtcgtgccaccctcacctccgcctccatgcagggcgcacttgcgctcctcctccatggcga

SEQ ID NO: 4654 - DNA, 844 bp, Oryza sativa
  Clone ID: PAT_MRT4530_11518C.1
cgtaatacgaaacgcgtgggcggggcggtgggcggacgcgtggctcgagaggccggccggggaagaaaaaccgcatcccgcaactccaccgctcccaatctcgatcgaaacgcgagggtttcgcatctccgccgacgcctagaggaagaagggatccgccgccggtagccaagccatgccgaagaacaagggtaagggagggaagaaccgcaagaggggtaagaacgaggccgacgacgacaagcgcgagctggtgttcaaggaggacgggcaggagtacgcccaggtgacgcggatgctcggcaacggccgctgcgaggccatctgcgtcgacggcaccaagcgcctctgccacatccgcggcaagatgcacaagaaggtgtggatcgccgccggggacatcatcctcgtcggcctccgcgactaccaggacgacaaggccgacgtcatcctcaagtacatgaacgacgaggcccgcctcctcaaggcctacggcgagctccccgacaccctcaggctcaacgagggcgtcgacgtcgacgggcccgaggacggcggcgaccacgacgactacatccagttcgaggacgaggacatcgacaagatctaagctcttttcttctttctccgcagctacaatttactgctatgttctaattaatagctatgtgtggtactatgtgggctggctgttatggattgtttggttgccggtttcatcttgtgatatgagatatttgtcatggtttgaggtggttaaataattgttggattccgtaactttaaaaaaaaaaacatgatggttatgcgtaaaaaaaaaaaaaaaaaaaaaaaaaaaaaaaaa

SEQ ID NO: 4655 - DNA, 2136 bp, Oryza sativa
  Clone ID: PAT_MRT4530_11519C.1
atggcgaccatggcgtcggcggcggcggcatccgcgtccgcgcggcggtggcggtggaggtggaagtggaggacgcgggacgcggtgctggcgctgctcatcgcctcggtgctcgcgccgcccctcctgctctacggcggcgcccccatcgcccccttctccggccccatcctgatggggagcgccgcctccggcctcgatctgtccaatctggacgcatttgctgcggtgaaggagcctattcagacggttgcatctgacgctgccgcactcaaggccggtttgattcaacacattgttgatcagagcagtggtatagatagagggaccaaggataatggtatggttgcttctgtgaataagaagggcggtgttgaattcacaaaagagaatggcctaatcgatgatggtaaattgcgggagaacaaagttcgtgcaatgcgcaattctagtggtttgaatattacactgaacaaggtaaaaggcagctatgctgtttccactgaggaatatgcatttcatcaaactatccctccgttaacagatcttatgtttggtacatttcctcctgccctcctggatcatactgctgacaggccacctgagaaaactacagacactacctcagaggactctgatataagggcaatcagcaataatactagtcattccacagcttctccagatagtacaatccgtgttcttagggaccagttaaaaagagctagaacatatattgggtttctatcttctagaggcaatcatgggtttattaaggatctcagaagaaggatgagggatatccagcaggcactcagtggtgcaaccaatgacaagcaattaccaaagaagtactatctctctcatcgttatacaaagttcttcacagttggcatttccgatgatgatttgtgtctggtgtcaggtgttcatggaagaatcagagaaatggagttgacattaacaaagatcaaacaagtgcatgagaactgtgcagctattatcagtaagctacaagccacacttcactctacagaggagcagatgcaggctcacaagcaagaggctaactatgtcacacaaatagcggctaaagctctacccaaaagacttaactgtcttgcaatgcggcttacaaatgaatattattcttccagctctagcaacaagcattttccatacgaagaaaagttggaagacccaaaactacagcactatgcattattctcggataatgtactaggagctgctgtggttgtaaattcaactattatacatgctaagacaccagagaaccatgttttccatattgtgacggataagcttaattatgctgcaatgagaatgtggttcttggaaaattctcaaggtaaagctgctattgaagttcagaacatcgaagactttacatggctaaattcgagctacagtccagttcttaagcagctggaatcccaattcatgatcaactactatttcaagacccagcaggacaagcgtgataacaaccccaagttccagaacccaaaatacttgtccattctcaatcatctacggttctatcttcctgagatcttcccaaagcttaacaaggttttatttcttgatgatgatattgtagtccagcaggacctaagtgcactttggtcaatagacctcaaaggtaaggtcaatggtgctatccaaacctgtggagagactttccataggtttgataggtatctcaacttctcaaaccctcttattgccaagaattttgaacggcgtgcatgcggctgggcatatggcatgaacatgtttgatttgtctgagtggagaaagcgtaatattactgatgtttaccactactggcaggaacaaaatgaacatagactactgtggaagttaggaacactccctgctggtcttgtgacattctggaaccaaacattccctcttgatcacaaatggcatctactggggctaggatacaagccaaatgtgaatcaaaaggatatcgagggagcagctgtgatacactacaacgggaatcggaaaccttggctcgagattgcaatggccaaataccgcaaatactggtccaaatatgtcaattttgacaatgtgtttatacgtcagtgcaacatacatccctga

SEQ ID NO: 4656 - DNA, 898 bp, Oryza sativa
  Clone ID: PAT_MRT4530_1151C.1
gcacgaggctgccttcgatgaagtggcatatgcaaacgttcctacaacttcatatgagcttccagatggacaaaccattgaagttggtgcagacagattcaagattcctgatattctgtttaatccatctctttctcagactattcctggagttgatggatttgcagattcaatgtcagttcgtggccttccacgaatggtcattgatagtgtaaataggtgcgatgttgacattcgcaaggaactgctaagcagtattctgctttcaggtggttcatcatcaattctgcagttgaaggagaggctagaaaaagaagtacttgaggaatcttctggtaatactcgtgtaaaggttttggcaagtggaaattcagtagagaggcgattcagtgtttggattggagggagcattctagcatcccttgggtcgttccagcaaatgtggttctccaaagcagaatacgaagaacatggagtatcctacatccaaaggaagtgcccatgaagttgtggagcatcgctacgatttgtgaccaaatttgggtgcatgtgggcaatcgtattacagccaccctgttgttgatctatatcgactattatccgacgatatttatcattatattatgactagttagtttgtagattttgagagggcaacataagaagcaatccagcttaacctgttatgttcttgatggtagattctagttcatgtgttgaatctgttctccctgctgtagaatgtatcgagttgctgctctctactctgtacttttagaataccttttcaatcatttggagtcagctgattgttgtactacttatacgccacctgattagtcatgtcaacaattaaacttgagcactggtaaaaaaaaaaaaaaaaactcgagggggg

SEQ ID NO: 4657 - DNA, 440 bp, Oryza sativa
  Clone ID: PAT_MRT4530_11520C.1
ttgtttttttttttttttggatagagaaagagagattagaatcgacaaacacgggtcacatccacttatctatctccattagattaagccttctgcatccttcttcttcttctgctgctgctgttgctgcgatggtgtggtggttggttgctgctgctagacgcttaggccatccacgccacattgcttgtatgtcagtgactgcctcctcggactgatggcgatcgcgcaatccaccgacacctggacttttggggaggagaagccgagcacgaggatcttggcgccgacgtcgccggtgatgcggaggtcgacgcggtcgctgatcgcggcgtcgcggacgaggtcctgggcgtcggcctggagcacgttgaagcggtcgacgatgacgcgggtctggagcaggcgggtgctgtgcgccggctgctcgaacccgggca

SEQ ID NO: 4658 - DNA, 1218 bp, Oryza sativa
  Clone ID: PAT_MRT4530_11521C.1
cgggccggaattcccgggtcgaccacgcgtccggacgcccgcacacaagaaacacaggagtgagggagaagaagataagggaagagagagcgagagagagagagagaggggggtagcaaagcaacttagctagctttgctagccatggcgaggagctctccttgcctcgccgtcgctgtgctcctccttggagtggtggtggcggcgattggagcctttgctgatgaagaagcggcgagcggttggggactagggcatggcgcccgtttcctcagcaggcgaggccgtgctgcgtatgagaagtcgtcggagccagaggcaaagcctgcgtcgcagcaggagccgaagtcggattcttactcgcaggcaaagcctgggccaaaagatgagcccaagccggagccagaggcaatgtctgcgtcgcagccggagtcgaagccggcaacttactcggagtctaagcccgaatcaaaggcagagcctgaatcaaaaccagagccaaaggcagagtccacgccacaaccagaagcaaagtcagagcctaagtctgagccaaagccaaagtccgagccatacgcagaaccaaaatcagagcccaagtccgagccacagtcagaaccaaatcccgagactaaggcggagccaaagtctgaacccaagtatgaacctaaatcagagcctaccccacagactgaaccaagggcagaatcgcaaccagaaccaaagacagagccaaagtctgagtcgaaggctgaaccgaagccagagcgaaagtcatactcaaagtcaaaaccagaaccagaatccaagccagaagcaaaagcagaacgacagccagagtctaagcccgagccaaaacccgagtcagccccaaagaaggaaacgccttcgtcggcctacccatgatggagatccatggagatcgagggcatcttgcttgctgcacgatttagctactgatgagattattttgctgaaggtcggagcactaggaaatggccattggccatttctggaataaataagtgacgacctagctttattctttgctttatttccctcattctttcatgtttttttccggatgtgccactgcgccagctggtgtaattcacttatttcttatgtatctatatctatgccattttttttctaataatacatacatatatatatatatatatatatatatatttttttatgcccttttcaccccaa

SEQ ID NO: 4659 - DNA, 3742 bp, Oryza sativa
  Clone ID: PAT_MRT4530_11522C.1
atgtacgtggtgaagcgggacgggcggcaggagacggtgcacttcgacaagatcacggcgcggctgaagaagctcagctacggcctcagccaggagcactgcgacccggtgctcgtcgcgcagaaggtatgcgcgggtgtgtacaagggcgtcaccaccagccagctcgacgagctcgctgccgagactgccgccgccatgaccgcgtcccaccccgactacgcctcggtaacagccactgaacttcaccgttgttggtttttttgttccccattcggtagtaccttgtctcctcctgacatgtggattgctgttgtgaagctcgcggcgaggattgcggtttccaacctgcacaagaacaccaagaagtccttctcggagacgattaaggacatgtatggacatttcaacgagagatctgggctgaatgctcctttggttgcccacgatgtatatgaagtcatcatgaagaatgcttctcgcttggacagcgagataatttatgatagggacttcgattatgattattttggtttcaagactctggagaggtcttacctcctgaaacttggcgggaaggttgttgaaaggccgcaacacatgttaatgagagtttcagtaggtatacacaaggatgacattgagtctgctatcaagacctaccatctgatgtctcagcgctggtttactcatgcttcaccgacccttttcaatgctggcactccaaggccccaattaagcagctgtttccttatctgcatgaaagatgacagcattgagggaatctatgatactttgaaggaatgtgctgtcataagcaaatctgctggaggaattggtgtatcagttcacaatattcgagctactgggagctatatccgtggaacaaatggaacctccaatgggattgttcctatgctacgtgttttcaatgatactgcccgttatgttgatcaaggtggaggcaagagaaagggtgcatttgctgtgtacttggagccttggcatgcggatatttttgagttccttgatctgagaaagaatcatgggaaggaggagcatcgtgcaagggatcttttctatgcactctgggttcctgatctattcatgcaaagagtccaaaataaccaagaatggtcattgttttgtcccaatgaagctccagggttagctgattgctggggtgatgagtttgagaaactgtacacaaaatatgagagagagtttattgaagttggaaaagattacaataacatagctttgtactttcagggcaaggcaaagaaaattgtcccagctcagaccctctggtttgacattttaaaggcacagatagaaactggtacaccatatatgctttacaaggatacatgcaataggaaaagtaaccagcagaatttgggcacaattaaatcttcaaacttatgcactgagataattgagtacacaagccctactgaaactgctgtctgcaatctggcatctattgctttaccacgttttgtaagggaaaagggtgtccccatagagtcccatccatctaaacttgtcgggagcagtgattctaaaaatagatattttgactttgacaagcttgctgaggttacttcaactgtcacatacaatctcaacaaaataattgatattaattattaccctgttgaaaccgcaaaaagatcaaatatgcggcacaggccaattggcattggtgttcaagggttggcagatactttcatattacttggcatgccatttgattcaccagaggctcagcaattgaataaggatatcttcgaaactatttactttcattctctgaaagcttccgctgagcttgctggtaaagaaggtccctatgaaacatatgaagggagccctgtcagcaagggcattctccaacctgatatgtggaatgtagttccatctgacagatggaactggccatctctacggagtactatttctaaagttggattaagaaactctcttcttgttgctccaatgcctactgcttccactagtcagattcttggcaacaatgaatgctttgaaccttatacatctaacatatacagccggcgggttctaagtggggagtttgttgtggttaacaagcatcttctccatgatttgactgaaatgggtgtttggactccagctctgaaaaataagataatttatgaagatggttctgttcaaaagatgacagtgatcccagatgatctaaaagcaatttacaaaacggtttgggagataaagcagaaaacgcttgttgacatggctgttgatcgtggatgctacattgatcagagccagagtcttaatgttcacatggaacaaccaaactttgggaagctgacttctctgcatttccatgcttggtccaagggcctgaaaactgggatgtattatctacgaacacgagcagctgctgacgcaatcaagttcacagttgatactgcccttttgaaggccaatggagaaaacggcaccaaggctgcagaggaagaggacgtggaagctaaaatggctcaaatggagctgtacatcagtgtgtgcaacatgattactttttccgaaacagaccgtaagttcaatatgatggattcgtttgagctcagcaaagtggaccaagcccctgcaaatgttgatatcgagctagggttgcagggtggcatgtccagttctgcgcagcctggctttgaaggcttctttgaacaggtcagggagatcgagaagctacatgaaacattgacaaagttactgaaggaccttcagaactcaaatgaggagtcaaaaattgttaccaaggcatcagccatgaaagagattaaaaagcgcatggagaaggatgtcaatgaggtgacaaaaactgcacgtctggcaaaatcaaaagtagagaagttgaataaagacaatgctgcaaacagagaaaaaccaggcttcggtaagggttcgggagtggacagatcccggactacaaccactgtctcattgacaaagaggttgagagaacggatatctgagtttcaggatttctatttgaattgcactgatagccttactcttgtaatcatccattgtgtaaaattatccaaaacagtcactggcgagcgtgctgacgaagagacaattgacaagctgatagaaactggggacagtgagcaaatttttcagagagctattcaggaacaaggccgtggaagggtgcttgacactctccaagaaattcaggaacggcatgatgcagtgaaagagatagagcagaagcttcttgagctgcaacagattttcctcgacatgtccgtgttggttgaggctcaaggcgagatcctggacaatatagagtcacaggtttcaggtgcagctgaacatattcagactggaacaaacctcctccagaaagcaagatttctgcagaagaacacacggaaatggacctgcatagggattgtcatcctcctcataatcatcctcatcgtcgtcctctccttaaagccgtggtctaagtagaaaaacctgcatctcagaagcatcatgttcatgtcgattttggctggcaatgtttatcttttgtgcagttctacttctagttgtgtatatgccacggtgtggtagtgcgtcatgtacattctctgaaattttgggtgcgaacttattcagttctctgtacttcaaataatgaacatgcagcttgatcatacataattttgctcaaaaaaaaaaaaaataagtatagttt

SEQ ID NO: 4660 - DNA, 488 bp, Oryza sativa
  Clone ID: PAT_MRT4530_11523C.1
gcacgaggcccagtctatgcttccagtctaaattcagtagtcacatgatcaaaatgctcttcattcaaaaggcaagtcattttttttagcaagaatacagtgtgattgtttggtgcctgtctgcctgatatcctatccacaacagatttatgggtggatcatttgcaacaaaaatagcatctttcatgctaaaacagtgtgtgctaacgggtgcatagctcagcaattatttgtgcgactacacaaactgaacccgttcgtcccatgtataccaaatgctccacttaaattgaataattctactttttcggaaactcaatcggggcagcacacttcaggcttaagcagaggttggaggatggaatcgccctttatgtataacatttttcatatgaaactgacatgcagttactgcagaatattttaggagctttcatgtggaccattacgttgtgttttcaacattactatttttattgctttatatt

SEQ ID NO: 4661 - DNA, 2211 bp, Oryza sativa
  Clone ID: PAT_MRT4530_11524C.1
atgaagcctagcatatgtctgaccgggaccaacgtgccatctccaggagttaatgccttgaaccttcaagtgctagaggtccgtgataacacattcactggtgttgttccttctttctgggctttgcaaaacttgacccagttggaccttggtgccaacctatttgaatctgtagactggacatccttgtcctcaaaaataaactctaccaaactggtggcaatatatttggataacaacaggattcatggaatcttacctagttccattggcaatctcccaggaagcttgcaaacgttatatatgaccaacaacagaattgcagggaccataccttcagagataggaaacctcaataacctcactgttcttcatctagcagaaaacttaatctcaggggacattcctgaaacactttgtaaccttgtaaacttgtttgtcctagggttacatcgcaataatctttctggggaaatcccacaatcaattggaaaacttgaaaaattaggtgagctttatctccaagagaacaactttagtggggccataccttcaagcataggaaggtgcaaaaatttggtaatgctgaacctctcatgtaataccttcaatggaatcattccacccgagctcttgtcgatctcctcactttcaaaaggcctagatttgtcttacaatggatttagtggacccatcccatctaagattggtagtttaattaaccttgactctattaacatttccaacaaccaattatctggagagattccgcatacacttggtgagtgccttcacttggagtccctacaattagaagtgaattttctaaatgggagtatcccggactccttcacgagtttaagaggcatcaatgagatggatctctcacagaataacttgtctggtgaaatcccaaaattttttgagacattcagctctttgcagctcctcaacttatccttcaacaatctcgagggaatggttcctacatatggtgtatttagcaattcaagtaaggtgttcgtacaagggaatagggaattatgcacagggtcttcaatgctgcaattaccactttgcacatcaacatcatccaaaacaaacaagaaatcctatatcatcccaatagttgtcccacttgctagtgctgctacattcctaatgatatgtgttgccacatttctttacaagaagcgaaataacctgggaaagcaaattgatcagtcttgtaaggagtggaagttcacatatgctgagattgccaaagctaccaatgaattttcatcagacaacttggttggttccggggcatttggggtggtctacataggtagattcaaaattgatgcagagccagttgccattaaggtattcaaacttgacgaaatcggagcatcaaataacttcttggctgaatgcgaggtgctaaggaacactcggcaccgaaatctcatgcatgtgattagtctatgttcctccttcgatccaatgggaaaagagtttaaagctctaattttggagtacatggctaatggtaacctagaaagttggcttcatccaaaagtacaaaaacatcgacaaagaagaccattaggtctaggatcaattatacagatagcaacggacattgctgctgccttggattatctccataactggtgcacacctccgcttgttcactgtgatttgaagccaagtaatgtacttttggatgaggacatggttgctcatgttagtgactttatctgtaaccattcttcagcagggcttaacagtttatcaagcatagcaggaccaagagggtcagttggatatattgcaccagaatatgggatgggttgccaaatatcaactgcaggcgatgtctatagctatggagttattctgctagaaatgctcacaggaaagcatccaactgatgacatgttcaaggatgggctaaacattcacaaattagtggactgtgcatatccacataatgttgttgagattttagaggccagtatcattccacggtatacacatgaaggaaggaaccatgatttagataatgacgttgatgaaatgagcataatggagagatgtatcacacagatgctgaaaattggtctacaatgctctctggagtcacctggagatcgtccattaatccaagatgtttatgctgaaatcaccaaaatcaaagaaacattttcagcattggacagttga

SEQ ID NO: 4662 - DNA, 405 bp, Oryza sativa
  Clone ID: PAT_MRT4530_11525C.1
atggccgctgagccaggaacgaataaactgaagatgttgctgtactttcttctcctgatcgttgccactcttgtgattactgcagaagttggtgtcgttttagctgctgctgctcgggtactctcgccgtcgacgacagaagaagtaccggtggtaacaagtgtacgtctgcccgcccaaactgagatatcatcatcatcagaaggagaagcacggggaggcgggagcagccgggcgtcggcggcggcggcggcgaggaggatggcgatcgggtcgagggctccgacgtgcacctacaacgagtgccgcggctgccgccgccggtgcagcgtgcaggaagtccccgtcgacgccggcgatcccatgaacagcgcctaccactacagatgcatctgccacctctaa

SEQ ID NO: 4663 - DNA, 288 bp, Oryza sativa
  Clone ID: PAT_MRT4530_11526C.1
ggactgctatctgatgagaaagatgctccagaggacaagaaatcgaagattgatcaaagaaagaaccaatctcgtgtgaaaaagagggagtttagccgatggtgcttacctcaacgtactcgacggttgatgctctcggagggctggcggaggtcgacattgtcgatgacgaagattggtgtcgtaggggatcgcctttggatcgccggaaaactcgaggaggtcgccggagagctcaagacggcaaattggggaaagttttggctagagcggttaaaacggaagtga

SEQ ID NO: 4664 - DNA, 487 bp, Oryza sativa
  Clone ID: PAT_MRT4530_11527C.1
tttaagtgagaatacaagtgatggaaggctatcatccaaggtgcatcccctcgtatcttcctccttcgatgattcagttgaccagtcattggcaggaagctcaaagtgtaatggaaagcgcatatttccgcttgatctaaatacagtggatgcaggaaacgttgtaaatatatcggatgacgaggagatgcctgagcgtgatgcgccagattttgagctagaacttacggacaacaattctcccagaaagaccatgttttcatttctttcccctaaggttgaagaaaatcggagtaaggaacattcattgcctaccgattcaccaggttccctctccctctctcttgcctttccggcatctagggaacatgctggtgtgctgacaagtagttacatccagggggcagaactattgaactgcaaagaacagagttctggacgtaagtgttattttgcaggaaacagtgatatgcttttcaagacatag

SEQ ID NO: 4665 - DNA, 258 bp, Oryza sativa
  Clone ID: PAT_MRT4530_11528C.1
cgcccctcgcgctcgcttttcgatttggactttattggattttattcgaattctaatggaattcaaatcaattcttcgcacgtaattttagagtccaagggagttgcggatccgagcgagggtcaagacctgcaggactatgagcaaggcaagtcatcactattctttgaacatgttgatcccaattgcgaaattgttttgtttaaaaataaaattgcatgcaatgatgaacatcctacttgtgattatgccatgcct

SEQ ID NO: 4666 - DNA, 664 bp, Oryza sativa
  unsure (1)..(664): unsure at all n locations
  Clone ID: PAT_MRT4530_11529C.1
atggtcatcctttatctccatagggaagtcatccccacgtgcagctttttctcgtcatccccgcaccatcgacgagctaggccacctcctccctccgccggtgccggctcccctcctctcttctccagctctcctctcctccctccgccgtcgccagcctcccctccttcctccgcgggcctcccctcctcccttcgctggcgagaggacggagacgacgccgccgccgccaggtagcaactctcctctcctccttgtccgtctcgatctagtcggatccggagcggcggtgtttgaggaggccgaggcggcggcgtggatccagagcggtgatggcgaggaggccgaggcggcggcgtggatccggagcggcgacggtcgaggaggccgaggcggattgatctctcttctcctcccttgccggctcccctctcacctcacctctctggacgagcggcggcgaaggtggagaaagaggaggcgaaggtggagaaagaggaggaggcgaggtcgcgccgaatcgaagcaatgacttncacagtgcgagtttncttcgncacgcgccctcgntgcagcgagaaaacacgtctnccagtnagggggcgagcggncgagcgaaggtgcgggnctcagcgncatgtacgcgtgaatctgagctggcgca

SEQ ID NO: 4667 - DNA, 285 bp, Oryza sativa
  Clone ID: PAT_MRT4530_1152C.1
atgggtcatcagtcatgcttttgtggtagcgaactcttccatcttgccatccagaatagttttgagtgcctgagccatcccttccccctcttccccttgatcctgggttgttgtagttgttttggcccctccctcttccataaggtggatgtggataaaggccttgagatggaggagcagaatgtggattccatggtggtggaacgccagaatgtgggctccatggtggtggagcgccaggaggaggtcctcggtatcctgacatcggagcctggaactgcatag

SEQ ID NO: 4668 - DNA, 195 bp, Oryza sativa
  Clone ID: PAT_MRT4530_11530C.1
aagctttagagcgacatatacttacccaacaacaaactttgacctccaaaaaaaaaaagcttaagctttttttttttgtatgtccaaagtgtttattctaaaactgattatttgttgaatttgtcagtgcttggggcagtaaaaactggaggatttcttccagtgatactggcatttctatccgctctaaagctt

SEQ ID NO: 4669 - DNA, 1623 bp, Oryza sativa
  unsure (1)..(1623): unsure at all n locations
  Clone ID: PAT_MRT4530_11531C.1
ccggatttnattgctgcgtgcgtggagtactgtactgacagcggtttcttcccaagaatttttggggatttttggggattcagcttgagccttcatgctccaacttaggtgctgctcctnatgcgtcttatgagtgtcggatgccgccatggcgctgcgagggcgctgcaaccacttccactctgcagattgtctatctcatcatgtacgcaatctagccgagatgtcagcaatgttaacctcacggtggaggaagaagaggcggcgaggctgatcaagaattcgctctcaaaggcacgcaagtggagtgtacaggacttgattcagtgccttggagccgattgttcgggaatccggcttaccggaaacattgtggacaccttgctgttcaagtttggggatgactggaaatcggcattgggcttctttcagtgggcgcagtcgagggatgattacaggcacacggcttatgcctgcaatcggatggttgacctgcttgggaagatgaggcagattgaccaaatgtgggagctgttgtctgacatgcacggcagagggttggtcacggttgagacggttgcaaagagcatcaggaggctggcgggtgcgagaagatggaaggatgttgttttgctgtttgataaactggaggatatggggttggaaaggaacacagagacgatgaatgttcttcttgatgtgctctgcaaagagagaaagattgaagtggcacgtgaggtttttgcggtgcttagtccgcacattccgcctgatgcatacacgtttaacatttttgtccatgggtggtgcagtatccgtaggatcgatgaggcaatgtggacaattgaagagatgaaaagacgcggatttccaccttcagtcatcacatacaccactgttcttgaagcttattgtaagcagcgcaactttaggagggtctatgaagttcttgattcaatgggttctcagggctgtcatccaaatgttatcacttacaccatgatcatgacatcgttagcaaagtgcgaaaggtttgaagaagccttgagtgtgtctcatagaatgaagtcatctggttgtaagcctgatacactattctacaactccttgatcaaccttcttggtaaatcaggccatttgttcgaggcttcccaagtatttcgagtggaaatgccaatgaatggtgtgtcccataatctggctacctataacaccatgatttcaatcttttgctactacggtcgagatgatgatgctctcaatgtgctgaaagaaatggaagcacaatcttgtaagcctgacattcagtcatatcggccgcttcttagactttttttaagcagaagaggccaagctgataccgtccggcacttgttgagtgaacttaccagcaaacataatctaggtttagatcttgatacatacacccttctgatacatggtctttgtagagtcggtgataccgtgtgggcgtatcaactgtttgatgagatggttagtagtgaaatagcacctaggagtaaaacatgtgtgatgcttttggatgaagcacaaaggacaaacatggagacttatgttgaaagaatcgggaattacatgagttcctttggaatttctgtttaa

SEQ ID NO: 4670 - DNA, 1401 bp, Oryza sativa
  Clone ID: PAT_MRT4530_11532C.1
atgttgtgctctgcttcggagcaagcacagctgttgctgaacgacaacctgaggagggtcctgctgcggattcccccgttgctgatgctgcaactggaggcgctgctgctgaaccttatgcgcgtcatgatgtggatccccccgctgcttttgctcacttaccaaataacggcgctcctcatggagaagaagaagaaggtcaagccactgatggcgcttctcattcacaacctcaaaccatcgacggcgctcatcatgcagaagatcaaaccgtctacgactttccaattgcacaagttgctatcaacgaagaagttggaggagctcaaaatattcaccgtgatccgcatgaaaataaggaaggagctcaaggccaagttggagccatcaacccccaacttcatcaccacaccatggcactttgtgcgaaaccgagtagcaatagcaaggagagaacagtacgagagcagaatagatgcggtcaccgccgaagggaacacggttcttcacattgctgcaagtagggggcacgcccatgcccctggtccagatgggacgagccaacaagaggacctgatcacagtgctctacaaggcgcgctggcacctcctttcttctctgaactcggagggagagacacccttgcaccgtgcagccagggcaggccacgtccacgccgttcagcgcatcattgccggagtgaaggaaaatctggaaaagttagcagaaaaccagctcatggacattattgcaacaaggaactgtgccggtgaaaatgctttgcatctagcggcaatgcacggcgatgcccaagttgtgacgacgttgttgaaatatgcgcgggatgcgcgtttgtcgtctgtgttgaccgaagccaataacgcatcggccctctacttagcggtcatgagtacatcgtggccaccgtcaaagcactattcgctcacgaatgcaatgatacgtcagctcaaggtccaaaagggcagaatgctctacatgctgccgcagttctccagaatagaggacagtgaaggaagcacagcgttacatatcgctgcgctgatgggccatgtcaatgttgttcgcttgctgataaaagccagccctgattctgctgatattcgtgacaaacaaggcagaacgttcctgcatattgcatgtgcagacgaaggatggcaacgacctactgttcgttacgttgttaaaaacccaatgctacatgaccttttgaattcacaagataaggaagggaatacgccgcttcatttagcagcgaatcatggaaagttcgtagatgtttatgctctgatatccagcggaaaagtgcatccagatattatgaatgcagagggagaaaccgcatttgatattgccaagaataccgttagcttcttcttcatg

SEQ ID NO: 4671 - DNA, 1836 bp, Oryza sativa
  Clone ID: PAT_MRT4530_11533C.1
atggaacgagcacaaccagatcagccggtagcagcagctgctccgggtcatgttgtgctctgcttcggagcaagcacagctgttgctgaacgacaacctgaggagggtcctgctgcggattcccccgttgctgatgctgcaactggaggcgctgctgctgaaccttatgcgcgtcatgatgtggatccccccgctgcttttgctcacgttcatgctctggaccatcccgcagcttcaattgatgctgctttgccgcctcgcatgccgaaacatctttatctcgccgtattcaacggtgaaaaagcaaatgtcatcgagatgttacagttaccaaataacggcgctcctcatggagaagaagaagaaggtcaagccactgatggcgcttctcattcacaacctcaaaccatcgacggcgctcatcatgcagaagatcaaaccgtctacgactttccaattgcacaagttgctatcaacgaagaagttggaggagctcaaaatattcaccgtgatccgcatgaaaataaggaaggagctcaaggccaagggcactttgtgcgaaaccgagtagcaatagcaaggagagaacagtacgagagcagaatagatgcggtcaccgccgaagggaacacggttcttcacattgctgcaagtagggggcacgcccatgcccctggtccagatgggacgagccaacaagaggacctgatcacagtgctctacaaggcgcgctggcacctcctttcttctctgaactcggagggagagacacccttgcaccgtgcagccagggcaggccacgtccacgccgttcagcgcatcattgccggagtgaaggaaaatctggaaaagttagcagaaaaccagctcatggacattattgcaacaaggaactgtgccggtgaaaatgctttgcatctagcggcaatgcacggcgatgcccaagttgtgacgacgttgttgaaatatgcgcgggatgcgcgtttgtcgtctgtgttgaccgaagccaataacgcatcggccctctacttagcggtcatgagtacatcggtggccaccgtcaaagcactattggctcacgaatgcaatgatacgtcagctcaaggtccaaaagggcagaatgctctacatgctgccgcagttctccagaatagagaaatggtcaatatattattagaaaagaaaccagagctggcaagcggggtcgacgacatgaaaagcacaccactacacttcgcttcgtccgatggtgcctactcaattgtacatgccatcctatatccaaaatcgaaatcattatttggtgatccagcaggacagagtcttgttgccatgcaggacagtgaaggaagcacagcgttacatatcgctgcgctgatgggccatgtcaatgttgttcgcttgctgataaaagccagccctgattctgctgatattcgtgacaaacaaggcagaacgttcctgcatattgcatgtgcagacgaaggatggcaacgacctactgttcgttacgttgttaaaaacccaatgctacatgaccttttgaattcacaagataaggaagggaatacgccgcttcatttagcagcgaatcatggaaagttcgtagatgtttatgctctgatatccagcggaaaagtgcatccagatattatgaatgcagagggagaaaccgcatttgatattgccaagaataccgttagcttcttcttcatgctccatgatccatataccccagcgacctacaatgaccaattaggttttagtgttgaggtacggttgatggagggaggggtggagagttccttgcactacactggtcaaggtcacctgtga

SEQ ID NO: 4672 - DNA, 1590 bp, Oryza sativa
  Clone ID: PAT_MRT4530_11534C.1
atggatcaccggacgaagcgggtggccatcgtcggcgccggaacgagtggcgtcgcggcgtgcaagcacctcctggcgaggggcttccggccggtggtgttcgacgccggcgcgtccgtcggcggccagtggacgcgcacgctcgcgtccaccaggctccagtcgccgcacgtcgcctaccgcttctccgacttcccgtggccggactccgtcgactggtacccgcgccacgaccaggtcgtcgactacctcgccgcctacgcgcgccgcttcgccgtcgacgagcgcgtcaggttccggtccacggtcctcgccgcggagttcgtcggcgacgacgcggcggacgggtgggagcggtggaacggcaacggcgaggcgttcggcgacgggctccggcgcgtggcgcctcaccgtgcaccacgacgacacggacaccacgcaggtgaggtgtacgagttcgacttcctcatcctctgcatcgggaggttcagcggcgtgccgaacatcccggcgttcccgcccgccggcggccccgacgtgttccgtgggcgggtgatccattccatggagttctccgacatggacgacgcggacgccgcggcgctcgtcaagggcaagcgcgtcgtcgtcgtcggctccggaaagtccgccttcgacatcgccgccgagtgcgccgaggccaacggcgtcgagcagccgtgcacgatgatttgcaggagcccacggtggctactgcacgacaccaatgtctggggcaaggtggacatcggctacatctacttcacccgcttcgccgagctgatggtccggaagcccggcgccggcgtcgcgtcgaacctcctcgccacgttcctgtcacctctggggtggttgatctcgaagctgacagaggcgtactacaagaaggagataccaatggaggagcacgggatgtcgccggagtacgggctgtcgaagtcgctctcgtcgtgcctgatcggcatgctgccggagaggttctacgacaaggtgaaggaaggcagcgtcgtcatcaagaggtcggcgaagtccttcaccttccgcgacgacggcctggtgctggacgacgacggcggcggcggcggcgagcgcgtcgtccaggccgacctggtgatcctcgccacggggttccgcggcgacgagaagctgaggcgcatgttcgcgtcgcgccgggtgagggacatcgtcgccggctcgccggagaccgccgcgccgctgtacagggagtgcgtgcacccgcgcgtgccgcagatggcggtgatcgggtactcggagagcgcgacgaacatccagacgtgcgagatgctgaccaagtgggtggcgcggctgctggacggcgcgttccggctgccgccggtgcggcggatggaggcgagcgtggcggagtgggggaggtacatgaggcggagcgccggcgaggagcacttccggcggtcgtgcctcggcggcgtcggcatctggtacagcgacgagctgtgccgcgacatggggtgcgacccgaggaggaagaaggggctcctcgccgagtggttccagccctacggcgccgtcgattacgccgatatccagtaa

SEQ ID NO: 4673 - DNA, 1143 bp, Oryza sativa
  Clone ID: PAT_MRT4530_11535C.1
agcttattaggccggcgcgggctacggggaggcggcccaagagaggggcgcggggagagaggggggggaaggggagccgggtggaccgggctcacctcgcggggtcccgagcgggcccgcttgtcggtgaggcggtgcacggtggaaacggcgcacgcgggggcgggcgctagggtttcgggtgcgcgtggcttaggagcggtgcaccgggtggatggatggcggcgggcccacgtgcagccgcacggcttgccgtggaccgcgcgcacgggagggaagacggagggaggggcggctgaccggcttggcccggtcaaagctgaggtggcaccgacgtggtgcctatgtggcagccatgcgggccggcgggaggaggaagaaggggaggccgagatggacggcggacggcggccaagttcaccggagctcgtcgcgacgattcgagagagagggagtacaccggaacgatgggatggacgagaggaagtgagccaccagatcggattcgccggagggaggccggcgatgacgaatcgcggcggcgcacgccggaatccgtttccggcgccggatgggacagaggagcaccgaggagagccggcgacgagcggcggcctccgggagcggacggcaatggtggcgaggccatgccgggtggcggcggggctcggggcagcgtccacgcgtgtttgggaagtgtccgacggcataggcgtgatcacctcggtctcgggccggggaaagggagggagagagggcgaccggagtcctcttcggctccgcgcgcacgccggcttcccggcacacgtgacggcggaggaaggcgaggatggcggcagcaaggcggcgatggcactgtggcagctggcggtcgtgctcggagctagcggccaagcggcggcggaggcggtcacgggcgtgacgccggctaaggaaaaaggtgaaaagaggagggaaacgagctttgctcccttgctattttgggaggaaggaggatgtgagaacgagagagaggagcacgagctctgtcttctggttttggaaggatgcggcatgggggcatcggagccaggcgatgacagtggcgacgtcggcaaaaggcgagcggggccgggcagctgcgcggcgcaggcgcggcagggc

SEQ ID NO: 4674 - DNA, 291 bp, Oryza sativa
  Clone ID: PAT_MRT4530_11536C.1
atgagctcgtctctccggctggggagggagcaggtcgcgcccgcagggctcgttaccatccttcgctcgtctggacagctcgacgaccgccggtttgatctagaggccaccggagaggggagagggagaggcactgaggaggggagggggaaggggctcgaggttgaggcctacgtcaattcggagcccgacaagctcgacccgcagccctgccccgacaagccgtcgtcgccaccacagactcgccacctccgccgatgcctcgcatcgttcgcggttgagaacgcatag

SEQ ID NO: 4675 - DNA, 1482 bp, Oryza sativa
  Clone ID: PAT_MRT4530_11537C.1
atggcacctacgtggcagccacgcgggccggcgggaggaggaagaaggggaggccgagatggacggcggacggtggccaagttcaccggagctcgtcgcgacgattcgagagagagggagtacaccggaacgatgggacggacgagaggaagtgatccaccggatcggattcgccagagggaggccggcgacgacgaatcgcggcggcgcacgccggcggcgagaaaagggggaaagggcggaggggcgacgaggattcaattcaaggcggtgggagtatatatgggggtcggggaatccgtttccggcgccggatggggaggagaggcaccgaggagggccggcgacgagcggcgacctccgggagcgagcggcaatggcggcgaggccgtgccgggcggcggcggggctcggggcggcgtctatgcgcgttcgggagggctaccgagctaccacgcgagctggaggtggcgagagagagcgatgaaggggaacagaagaaggcactaccgagccgggacgggcgctgtgacgagcggcagacggcgcgggagcgagctctcaggcctcgggccggggaagaggaaggagaagggtggccggagtccgcgtcagctcctcgtgcgcacgccggcttcgccggcgcgcgcggcgccgcggcgaggccgcggtgggaggaaacgagtgggaggtcgagacgctgagggggctcgggtttttatagcggagggggagaggtcggtttggaggagggaaaccgacattggcggtcaagggatgcaggggcgacgagctggcggtcgtcgacgcgtgcagccaaggcggcggcaggtgatgacgctggcggtgtcgggcaaaagtggaaaaggaggggaaaaaaagggggctctgctctttgccgagttggggagggagagggatgggagcgggagctcggcctcacggttttggcaggacacgcgtggagcggctcgggcatgcgctgcagagctcgcggcaggcagcggggccgagcggcagcgcggcgcaggcgctgacggtggcggcgaccgggcggtcggccacgaccggcgcgtgcgcgggaaccgaaggcggtggcgggttcaaatggcggcggcgggaatcgataacaacacaactcttgttattattcgtggagaccccatattgcagaatttcaatcacttggtactaccggccactactcccagccaaggctccgagcatcaactactcgccaagagcttcagtcacctgcccagcactgcgcagcccagatatcatcatcaagtaggtgaccatgtctggctgtccggggctataccattcgccaccatccaacacacaacctcattggcagagtcaaaacaatcactggaggcgtacaacccgacgagcatcgtgcacgccgagtcgggcgaaatgccatccgcagccgtagcgtccagcacggcgagcagtgcgcccgggtgggaagcgtaa

SEQ ID NO: 4676 - DNA, 543 bp, Oryza sativa
  Clone ID: PAT_MRT4530_11538C.1
atggggatccccgggagcgtggcggggtgggagcatctccggggttcaaggaatccgtttccggcgtcggattggacggaggagcaccgaggacagccggagacgagcggcggcctccgggagcggacggcaatggcggcgaggccatgccgggcggcggcggggctcggggcagcgtccacgcgcgtttgggaaggcgggatcacctcggtctcgggccggggaaggggagggagagagggcgaccggagtcctcttcggctccgcgcgcacgccggcttcccggcacacgcgacggcggaggaaggcgaggacggcggcagcaaggcggcgatggcactgcagcggtggagactgaagcggcagctggcggtcgtgctcggagctagcggccaagcggcggcagaggcggtcacgggcgtgacgccggctaaggaaaaaggatgcggcatgggggcatcggagccaggcgatgacagtggcgacgtcggcaaaaggcgagcggggccgggcggctgcgcggcgcaggcgcggcagggctga

SEQ ID NO: 4677 - DNA, 303 bp, Oryza sativa
  Clone ID: PAT_MRT4530_11539C.1
atgtccacagaggttgtgggggagcatgaggaggggctagctctgcgactctactcccgagacttcttgccgaaggagcagggacaacaccatagctataggtccctcgtgctggcccgcctccaacgtgactcggcgtgcgccgtggcgatgtcggcccgcgcggcgatagcggcggacggggtgaccacgttcaacctgatgctggcaaacgtcatggtattcgaggcattggcgactaagcagtggagataccgggtgacgatagagttgtatgtattgatgttgtacaacaatggttga

SEQ ID NO: 4678 - DNA, 240 bp, Oryza sativa
  Clone ID: PAT_MRT4530_1153C.1
atgggcttagtaattagccggatattgctcctgcgagatggggcaaagtatcgacctgggatccgcccaaagtgggtgcacgccgccgtcagcgggtccaagtcgatcgggtcggcgtcgaggaggccaactcgtggggtgtcttcgccatcgcagtggataccggcgatcctggccgaagttgacggcactgcacggcaccacgcccaggcgctcactcatcgatcggcaggtggttga

SEQ ID NO: 4679 - DNA, 847 bp, Oryza sativa
  Clone ID: PAT_MRT4530_11540C.1
agcggcgcacgcgggggcgggcgctagggtttcgggtgcgcgtggtttgggcgcggcgcgccgggtggacggatggcggcgggcccacgtgcagccgcacggcttgccgtggaccgcgcgcatgggagggaagacggagggagggggcggctgaccggcttggcccggtcaaagccgaggtggcgccgacgtggcgcctacgtggcagccacgcgggccggcgggaggaggaagaaggggaggccgagatggacggcagacggcggccaagttcaccggagctcgtcacgacaattcgagagagagggagtacaccggaacgatgggacggacgagaggaagtgagccaccggatcagattcgccggagggaggccggcgacgacgaatcgcggcggcgcacgccgacagctagaaaagggggaaacttcaccggagcaacgggggttcgattaaaaggagtgggagcatatccggggttcaaggaatccgtttccggcgccggatgggacaaaggagtaccaaggagggccggcgacgagcggcggtctccgggagcggacggcaatggcggcgaggccatgccgggcggcggcggggctcggggcggcgtccacacgcgttcgggagtgccaccgagctatcacgcagactagagggggcgagggagagcgaggaaggggaacgggaggaggcactaccgagccgggacgggcgctgtgacgagcggccgacggcgcgggagtgagctctccggcctcgcgccggggaaggggaagaagggagatggcaaaggggagagatgggctggggatccaactggacaaatcctcgaatctctcgtaatc

SEQ ID NO: 4680 - DNA, 1188 bp, Oryza sativa
  unsure (1)..(1188): unsure at all n locations
  Clone ID: PAT_MRT4530_11541C.1
gccatacacagctctctcgccgtctggtctcttctcgctcgcgcgactgaaaagcgcctcgactcgcatctcgccgccgcgcagctaagctagggttttccgccaccgccgatctcgcccccgcccccggccagccatggacgcctctctcatgggcgccccctccgccgcagcgggagacaatcccacctccggggagcaccggatggggaccaccatcgtcggcgtctgctacgacggcggcgtcgtcctcgccgccgattccagaaccagcaccggaatgtatgtggcaaaccgtgcgtcggacaagattactcagctaactgacaatgtgtacatctgccgctctggatctgctgctgatacacaagtaatttccgattatgtacgctattttctccaccaacacacaattcagcttgggcagccagctaccgtgaaagttgcagccaacttaattaggttgttggcttatcagaacaagaacatgttgcaagctggcatgattgttggtggatgggataaatatgagggaggccaaattttctcagtcccccttggtggaacaattctgaggcaaccatttgcaatcggaggttcaggctctagttacctctatggattgcttgaccacgaatggaaggagggcatgtcccaggaagaagctgagaagtttgtggttaaggtagtttcccttgctatagcccgtgatggtgctagtggaggggttgttcgtaccgtcactataaacgcagatggtgtttcgaggaaatttcaccctggagacaaactacaactgtggcatgaagagctggagccccagaactcgttgctggacatacttgcagctgggaaccctgatccgatggtccaatgaatctgccctccagccatacacctcccttaagcaactttcttctgtatctgactttcactagatttactgaagaactggactgcagaattatgttcagctgtgcgcaattatctagtgcaagatgcttcttgtgctgtatgtaatttcttttcgttaaggaagttcaaaaatatcatttagactttgaaaaaaatccttttgtggttttgatgcatatggcttgccccctcgtattggcagtcacaccgacttgttgttactctttattattttaacttagtaaattatcgccccctcggtaaaaaaanana

SEQ ID NO: 4681 - DNA, 761 bp, Oryza sativa
  Clone ID: PAT_MRT4530_11542C.1
atggttccagttgtgtgtttggtttatggtatgggatggttatagaagggaccgttagggccgtctgctcgtgagaatggggacagaggagctcgtcggcgcgagcggaggagaggcggaggtgggtcgcgaacgagcggcggcggtcggagcggcggcggtcggtcgcggacgaggcagcggccggtcgtggaggcggaggtcggatgcagatggaggcggcggcggccaatcgcggaggcggaggtcggacacggacggaggcggtggcggtcgcggaggcggaggcggaggtcggacgcggatgaggcggcggcggtcgcggaggtggagggagcaggtagaggaggacggagcggcgccgggggaggaagcaggcggaggagggactgtcggcggtcgtggacgagcggcggctggtcccggagctgaggcgaggcgtgaatgagcggcggcggttggtcgcagacgaggcggcggccggtcgcggaggcgaaggttgcggatgtggcggcggcggtcgcgcggaggtggagggagcaggcggaggaggacggagcggcgccgggggagggagcagccggaggagggacgggcggccgtggcggagccgagtgggaggctgcggccgggagctgacgtcgttctctcagtcgaagtgggatggattggtccggccgattttggcggaccgtttcatcccggataatattcctctatagggactatcccatcccacttacctctcaaccaaacatccc

SEQ ID NO: 4682 - DNA, 1081 bp, Oryza sativa
  unsure (1)..(1081): unsure at all n locations
  Clone ID: PAT_MRT4530_11543C.1
cccacgcgtccggaccggacgcatcgcgtcgcctcctctttttttctttcttgcggtggcggccaaagccagcgaacacctgagctctctcgccgccgcgccgcttaggggttttccgccgccgcatccgccgatctccccgccgccatggacgcctctctcatgggctccccctctcccgccgcgggcgacgcccccacctccggggagcaccggatggggaccaccatcgtcggcgtctgctacgacggcggcgtcgtcctcgccgccgactcccggaccagcaccggaatgtatgtggcgaaccgtgcatctgacaaaattactcaactgactgacaatgtgtacgtctgccgctctggatctgctgccgacacacaagtcatttcggaatatgtacgctattttctccaccaacacacaattcagcttgggcaaccagctactgtgaaagttgcagccaacttaattaggttggtggcttatcagaacaagaacatgttgcaagctggcatgattgttggtggatgggataaatatgagggtgtccaaattttctcagtccccnttggtggaacaattctgaggcaaccatttgcaattggaggttctggttccagttacctgtatggactgcttgaccatgaatggaaggagggcatgtcccaggaagaagctgagaagtttgtggtgaaggtggtttcccttgctatagcccgtgatggtgctagtggaggggttgttcgtacagtcaccataaatgccgatggtgtttcgaggaaatttcaccctggtgacaaactaccactctggcatgaagagatggagccccagaactcgttgctcgacatacttgctgctgggaaccctgatccgatggtccagtgattcagccatacaccaccattcttttccaactttctactgtatctgacttgctctagatttttactgaactggactgcagaattgttccacaccgacttgttgttactctttattattttaacttagtaaattctcggttgctcggtaatgcgaagtgtgtcacattggattggtccggtagcccggttactgc

SEQ ID NO: 4683 - DNA, 1219 bp, Oryza sativa
  Clone ID: PAT_MRT4530_11544C.1
atgagggtctctaccgttggtggagagggatccggtaggtccgaaggtgggatcgtcgccgatgaacggtgggggggaagggaagggaaggggcgacggcggggcgaggagtttcatcggcggtgggggaaagggaaggggcgacggcggggtgaggagattcgtcggcggcgacacactggagatggggcagtgcgagagaaagagacggggagagggatgtgcgtgtgggatgaggatctggaaggcgagaaagagagggggggaccgccacgtagaccaaaactggggtcaaaaccaccaaaggacctcggccaccccaccccgaccgacgccgaccccacctctcagaatccccccaccccaccaccaccaccaccaatgatggcttcttcctccgacctcatcctctacaacctcgtccccgcccaacccctaaaccctagcgccatccccaaccctaaccccgacctctccatcgccgccgccgagcccccctcctccgacggcgccacccctcgccgcgtcaggcccaggaagtccccctcctcctccgaccgccactccaaggtcgccggccgcggccgccgcgtccgcatcccggccatggtggccgcccgcgtcttccagctcacccgcgagctcggccaccgcaccgacggggagaccatcgagtggctactccgccaggccgagccctccatcatcgccgccaccgggacgggcgtcaccccggaggaggcgccccccgccgccgtcgccatcggctcttcctcggtcgccgccgccgccgccgccggcgggcatgggggcgcgttcgtccatgtgccttactacaccgcgctcctcatgcagccgcctaacgcggacgagccccccatggcatccgctgcctccgcctcgggcaccaccgccgccgacgagaacaataattaatttagaactgccgctgttaggtttaggagcttggagcgtgttagggttagggttccccggcgtatttaggagaggtctccccctcctcaataatttaacctcattgtccttgtggcggttgcggcggcggcatggatttaggttatttagatgccttattcaggcaagcaaatgagggggtgattcagatggtttcttagagaggagggcagaaaaatggagagctctctgtaagtggtgggtgaggactggagtgagtggtactgatgctctgatgaaaaaa

SEQ ID NO: 4684 - DNA, 2076 bp, Oryza sativa
  Clone ID: PAT_MRT4530_11545C.1
atgtcgcagctcctccgccctggctacctcggcctcctcctcttcttactctccatgctgcttgatgcttctgatcacctcatcgctggagcagcagcagcgccacctgtgttcagcttcaacttctcagccgaccacccatccacgtaccgccaagatctcgtattccaggacgacgcgatcgagccgcagaaagctggggcgccggtagaactcacctgcacctggaacgaccaggtttgcaggcgcggtggccggatgtcgtatgctcatccggtgcagctttaccaattagcagccaacggccgcattagcaaggtggccagcttctccacgagcttcaccttcgccatcaggcccatcgaaggcaacggtacatgcagaggtgatggcatggctttcttcctcgccagtttcccttctaaagtgccgtacaggtcggccgggggcaacctcggactcatcactgataagacgaccactagcaatatcgccccggatgatcggttcatcgccgtcgagttcgacatcggcatcggatttgacaatgacccgaaggaaaagaccgaccacatcgccatcgacatcaactctgtcaaggattctgccattaccacatacttgccaaagaacgtaacccttaatgggacaatgatagccgacatcgtcttcaacagcagcacagggatgctggtcgcctaccttcggtttcttgaccatccatcatccgcggcccacgctcaggtggtgagtgcaaacctgacagaacatctcaagggcacacctccgcccggcccgcaggttgctgtggggttttctgcagccaccgccggatgcgtggagatctgccagatactgtcctggtctttcaattcaagccttccgctaatacaccaagatacacacaatatagcacggttgctggttgaactgatcattggaggagctctagtgtttgcgctagttttgtggttcttactctcttgttgggagcagaaaaggattcgaaatgtcttcgacaagggaacaggcggcgccaggaggttcgaataccgcaatttggcagctgcgaccgaccatttctcggaggatcgcaagcttgggcagggcgcctttggggcagtgtacagcggacacctgaagctgctggaccatcaagttgctgtgaagaaaattgtgagggagtccagcgaaggacacaaggacttcttcgccgaagtccgcactatcagcgaagccaagcacaagaatctcgtcaagttttttggttggtgctcccggggacacagctggaacattctccgtttcatgtgcagctgtttctggagtaagaagaacaatgagctcttccttgtctatgaattgatgacgaacggcaacctcaacgactacttgtacaaaagcgagtcatcagaagtactttcttggcaaacaaggtacaaaatagccaaggacattggatcgggcctgctctacctacatcacgagtgcgacccacatatcctgcatagagacatcaaaccatgcaatgtactcctggatgaaaatttcaacgccaagctcgccgactttggcctatcgaggatggcaaaccaagacaatgcgacgttgctgacaactgccataggctcggaagggtaccttgatccacagtgtctgaaacatggtaaggtcccattcaagcgtagctcagacgtgtacagcttcggcattgcccttctcgagatcgcctgtgcaaggaggcacagggagcaaatctgggacctataccgaagcggtggcaatgttgtcgaggcggcggatacaaggttaaccatgggtggtggccttgatatgagggagatagagcgtgtcatcgtattggggctctggtgctctgctttgcagactcaacaccgaccttctatgcggcaagctatggatgtcctggagcgtgacggaccgttgcctgaccttaacagcttgatcgtcgtcaacactactttggcatcaacgacagaggaagacgcctccagtgcgccggcggcgggcaatcgctatgactgtgatgaggcaccactgctgattccagggtag

SEQ ID NO: 4685 - DNA, 181 bp, Oryza sativa
  Clone ID: PAT_MRT4530_11546C.1
gaaacagggacataaactcgttggtctgcatcccaggaaagatcagattgggaagctcctgaaatatgggttctgaaaatcagacatacaaggcctaagaattgctacatgaatttgctgttactctattcatttgtatatttactcattatcatttctggctgctaaatgagttttagta

SEQ ID NO: 4686 - DNA, 501 bp, Oryza sativa
  Clone ID: PAT_MRT4530_11547C.1
atgatcggcgtcgggaaggcgaagcagtacgccaacgtgctcgacaagcccctcagccgcggcaggcaggaggtcagtttgagtgcatttgcgttcctgttctcagagttggttcaatacaaccagacacaggttgataacattgctgagctggaaagaaggctggaagatgctggttatgctgttggtgcaagagttcttgaactactctgtcacagagagaaggtggctgactcacttgagaaaggaacagaacatgaggatgaatacatgattagtgaaaaggagcttcttgttaaccggttcatttcggtgcccaaggacatgggagcattcaattgtggagcttttgttgcaggaatcggtgtactggaaaatgctggctttcctgcggtagttactgcacactttgtgccaattgagggccaacaaaggccaaggacaacaatcttgataaaatttgctgaagaggttttacagcgagaagctagatttggctaa

SEQ ID NO: 4687 - DNA, 178 bp, Oryza sativa
  unsure (1)..(178): unsure at all n locations
  Clone ID: PAT_MRT4530_11548C.1
aattatacatcttttatgtcccacacaaagactacttgacacaactatgactactcacgacacttgggacttacacggcacacaacaacttccccgacgactgacctgtgtgctgccactcctgactctacggtggacgccacgccctcntggtggtanttcttggtctcacggtatt

SEQ ID NO: 4688 - DNA, 911 bp, Oryza sativa
  Clone ID: PAT_MRT4530_11549C.1
ccggccggggactactccgctccgcccggccacagcccaattcacgccacccgctccgcctctcgccgcctcgaccgcggccggcggccaccgctccggaggagggtgggcaagatgatcggcgtcgggaaggcgaagcagtacgccaacgtgctcgacaagcccctcagccgcggcaggcaggaggtcagtttgagtgcatttgcgttcctgttctcagagttggttcaatacaaccagacacaggttgataacattgctgagctggaaagaaggctggaagatgctggttatgctgttggtgcaagagttcttgaactactctgtcacagagagaaggggaataggcgagagactcgactgctaggtatattatcgttcattcacagcactgtatggaaagttttgtttgggaaggtggctgactcacttgagaaaggaacagaacatgaggatgaatacatgattagtgaaaaggagcttcttgttaaccggttcatttcggtgcccaaggacatgggagcattcaattgtggagcttttgttgcaggaatcgtaaggggtgtactggaaaatgctggctttcctgcggtagttactgcacactttgtgccaattgagggccaacaaaggccaaggacaacaatcttgataaaatttgctgaagaggttttacagcgagaagctagatttggctaaattttatcatatgttcacacttctttctgatcaattggtgaagatactgttgaaatgtttttttgtggctgactccacatgatttgtgtaccagtagttgcgaatagaagcgaaggagaaatcgttttgtttggaactgtaaaacatttgcttggatttacctcgtatataatgaatattcaagaattcttaaaaaaaaaaaaaaaaaaaaa

SEQ ID NO: 4689 - DNA, 933 bp, Oryza sativa
  Clone ID: PAT_MRT4530_1154C.1
caaagtcccggggaggtgttataattcaacttctctagaactacagaccttatttcattttacttgtcttctgatctgatcatctcaacagttttctgtcatgttactttagttttcactatccctttccatacgtctccctctcaagtaaaattactttttttttttcaaatgtagggtagcattgatattcttcagaagtatcctgtgccagaatgtgatatctggtttatcaaattctcatgcgattttcacttcaatcaattggcaataggcaaccgtgaaggaaaagtctttgtctgggaagtacagtccagtcctcctgttttaactgctcggctgactaatccgcaatgcaaatctgcgataaggcagactgccgtgtcatttgatggaagcacaatccttgcctgcagcgaggatggcagcatatggcgatgggatgaagtggaccatccaaaagcatgaaaagtacccttatagacagaccatggcaatgccagattaagattgacttgggaattcctgcatgtgtactttgttgtgggggttatagtaatcagtcttactgttgaaaaaaagtgcaatctgatactctgaaattagaaggattgacagctgaatgctggggttaccaacttgaatgttgcaaataggatactgcttctgttatatgctgaatgtttcaagttagggcctttttgtaaatgggaagattcggctatgccagatttttggaaaagttgccatttgctttgttaccaaagttgcatggcaaagattggcccagctcaaatttctatagttataaatgagttggcaaatattttggcttcaaaaaaaaaaaaaaaaaaaaaaaaaaaaaaaaaaaaaaaaaaaaaaaaaaaaaaaaaaaaaaaaaaaaaaaaaattcgagggggggcccgggtaccc

SEQ ID NO: 4690 - DNA, 261 bp, Oryza sativa
  Clone ID: PAT_MRT4530_11550C.1
atggtggcggcggttacattgttgatcagcacgggctgcgcctcagtcgagccgaggtaccacgtgaccacctcggcattgacccgagccgaggtaccacgcgaccacctcggcatcaaccccaaccccgccgctcctactgctcccgattggcatgaaggtggcatccagcttaatggttcaccaaaacaagctttactaaaccatcacgaaggtgtcaagtgcctcggcacccaacgacgctggaccgcgactacgtag

SEQ ID NO: 4691 - DNA, 312 bp, Oryza sativa
  Clone ID: PAT_MRT4530_11551C.1
gtcctcctctgcaacctcgcatcaaacgtaccaacggcgcttcttatgggtgatgaggtggccaaggcagcggcgctgatatcgccggcagcggtgacgacatcatggctgctgatggagtgggcgagcacgtgtgacggtgaacctgtcgctgctggcgacggctgctaacctgatagtgtgcggagcaggcgagcgctggcgcccaggaacacctacaacctgagcttctggaacacatattgttaactgttcgatccaaagttatcgttaatgctggtgtgatacccctgatcatcgagatctgatgtc

SEQ ID NO: 4692 - DNA, 232 bp, Oryza sativa
  Clone ID: PAT_MRT4530_11552C.1
taactatgcaacagtgacaagtgctggacactggggacactgttgtgctaagatgggattgctgccatggtgcatggtgatgaaatgggaccagctgttgagcttgaggaaatgtgtgttggttgatggtgagtggatgacacccatgagtgttgctggaatggaatggattggacaaaaaaatggttgctgccactgcatgagaatgttgccccagaaaaaaaaaaaaaaa

SEQ ID NO: 4693 - DNA, 681 bp, Oryza sativa
  Clone ID: PAT_MRT4530_11553C.1
atgggggaggagagagaacgcgaaagtacaagcctgtggggtcgcttctgcaactggataactagcaccgaaaaccgtctttacatcggatggttcggtgttttgatgatccctaccttattgaccgcaacttctgtatttattatcgccttcatcgctgcccctccagtagatattgatggtattcgtgagcctgtttctggttctttactttacggaaacaatattatctctggtgccattattcctacttctacggcgattggattgcacttttacccaatttgggaagctgcatctgttgatgagtggttatacaatggcggtccttatgagctaattgttctacacttcttacttggtgtagcttgttatatgggtcgtgagtgggaactgagtttccgtctgggtatgcgtccttggattgctgttgcatattcagctcctgttgcagctgctactgctgttttcttgatttaccctattggtcaaggaagtttctttgatggtgtagctggtgtattcggcggttccctatttagtgctatgcatggttccttggtaacctctagtttgatcggggaaaccactgaaaacgaatctgctaatgagggttacagatttggtcaagaggaagagacttatattattgtggccgctcatgttaacgacgagatttag

SEQ ID NO: 4694 - DNA, 1126 bp, Oryza sativa
  Clone ID: PAT_MRT4530_11554C.1
ttatctttctagttaatacgtgtgcttgggagtccttgcaatttgaataaaccaagatcttaccatgactgcaattttagagagacgcgaaagtacaagcctgtggggtcgcttctgcaactggataactagcaccgaaaaccgtctttacatcggatggttcggtgttttgatgatccctaccttattgaccgcaacttctgtatttattatcgccttcatcgctgcccctccagtagatattgatggtattcgtgagcctgtttctggttctttactttacggaaacaatattatctctggtaccattattcctacttctgcggcgatcggattgcacttttacccaatttgggaagctgcatctgttgatgagtggttatacaatggtggtccttatgagctaattgttctacacttcttacttggtgtagcttgttatatgggtcgtgagtgggaactgagtttccgtctgggtatgcgtccttggattgctgttttatattcaactcctgttgcagctgctactgctgttttcttgatttaccctattggtcaaggaagtttctctgatggtatgcctttaggaatatctggtactttcaactttatgattgtattccaggcagagcataacatccttatgcatccatttcacatgttaggtgtagctggtgtatttggcggttccctattcagtgctatgcatggttccttggtaacctctagtttgatcagggaaaccactgaaaacgaatttgctaatgagggttacagatttggtcaagaggaagagacttataatattgtggccgctcatggttattttggccgattaatcttccaatatgctagttttaacaactctcgttctttacacttcttcttggctgcttggcctgtagtagggatttggttcactgctttaggtattagtactatggctttcaatctaaacggattcaatttcaactaatctgtagttgatagccaaggtcgcgttattaatacttgggctgatatcatcaatcgtgctaatcttggtatgggagtaatacacgaacgtaatactcacaacttccctctagacctagctgctcttgaagttccatctcttaatggataa

SEQ ID NO: 4695 - DNA, 342 bp, Oryza sativa
  Clone ID: PAT_MRT4530_11555C.1
atggcggcggtcgacgacgacgcctactccagtgccagctggtgcagaggtggcggtggacggcgacggcagccgccgctactctcttgctggtgcccgctactcatgattgcagagctcctctccattggctcggctcttctcgtagccatggtcataagtgatggagatggaggaataggaggtcgaacagcaaggcagtctttccatcctaaggattacagaggcttatcctccatgaccagaactactgcttcgattgccaattttttcaatgccaaggccagacagctgtctttcttctccttcagcaaagccgctaagcggcgactttatgagtaa

SEQ ID NO: 4696 - DNA, 479 bp, Oryza sativa
  Clone ID: PAT_MRT4530_11556C.1
cccacgcgtccgcttcttcttttatacccttctcttgttcgcttgcggctcggagaagaggaggagaggaggggggcaaggcaagcaaatgctcggcgccgctccggtgagttcatcggatccgagtctcttcttgattttatcctgctcctgcgatcttgggtcagttaagttcttggttttggtttcttggggggaagatgaggagatgatgcggcgcccaaaccgattgcaaaattcttctcctggtagttcagattaatcgtgccttagaattctttgattaggtgttgggacattggggggcgcggataatgcggtcgattagttcgttgattggttcgaagaagtgagattgatgtcacccatgggggttttagtctttcagataatgtggtcaggtctcagttggtgcatgtgttcgtgaatcgaagatttgatgatttttttggagggggtggaattgtggggattagtgt

SEQ ID NO: 4697 - DNA, 210 bp, Oryza sativa
  Clone ID: PAT_MRT4530_11557C.1
atgaaaactttctccatttatgttttatttcctctaattgggtggggtataaacgaattcgcgcccttcatatacccatatggctgggtattaattttcagtgatatacttcttgtctgttttggtgagaggttgaaacaatttttaacaggcatcccttggaaaaaccttcgagttcaaaactttgcaatttttcttaagcggatttgt

SEQ ID NO: 4698 - DNA, 935 bp, Oryza sativa
  Clone ID: PAT_MRT4530_11558C.1
gctgcaggaatcggcacgagggcatcaagctcttctactaggaacattattattcagtctcagtcctaattcgccgatgtgcaccttcagtcttgagccagctctgcaagcaataactgaacatttaaagaactgcattttgtgcagcgatatggtgcggtttcagaatctgttgaaggaaatagcagtgttgtaaagatgcacaaatggtgcaacatgggtgctcaaacctgactaccgttaatgtgtttatctgcaccttggacggcagaggggaacctctctatttagacctgaagagtcattgcaaagagtcattactggacagtcttatttggtagaaggagaatggcctcatgcaagaagagtgttctctttgttgtctctgaacctgcctgtctaggatgcccatcttggtacccagttggcaccttgcaaggacgttgcaatattgtttggaaaacaacctcatcattctcaaatattttgcaatgtagtgtatgcatgcagcaagatggacacaacacaaatcgatgaaaccagcctcagtgagagtccgagctggccgagggtcagcctccaaattaaaaaaatatttttttcctggtctttggaatgccaagacgatggagatgcaggcaatcctgaccgttcattttttcacgtgtcagcacaggagccctctagattgggccggtgttttccgttaccagtgcctttcagctcatgggccacggccagcaattgttccaactgccacttttggggcccattccgttgggtgcgtgcccaaggtgatccggacatgtgggcccctctcgtggtagaaacccttgaacaaccgatcaagatcagctcaaaatcgaatcagcatgggaacaaaggaagagagatgcatggatgtagtttaatttgctcctaatcttatcttagcc

SEQ ID NO: 4699 - DNA, 1290 bp, Oryza sativa
  Clone ID: PAT_MRT4530_11559C.1
atgggtggagggggcaggtgtactcacagccccggagatgcactgggcgtggccctggacggtctcctggctgaaggactcgccgcagtcgatgcaggagagctgccgccgcaacacaaaaaccgaaacaaatcaatcacaatccaccactttctctcacctcgagacgagcaagaccaaattaaccgaagctacagagaggggggagggaagagcaaaccctgtaggctgagcgcaggagcggaagtggccggcgagcttgggcttcttgaggtcgtcgccgccgcagtcctcgcactggaaccgcgccattgtcgacgccgccgcgagctctcttgcttcacctccgacgcgtctctcgctagggtttttggctgcgggtcggcgaggcgaaggactggaaggcggaagcttctgcatgcaaggcccgtggaatggttgccgacttgccgtagtggagcggaggcccgaggggagaaagaattgctaaaacttgaggcccaaggcctagccaccccatgcgcgctgcagcccgattcggcaacggcaccacgagtcctcggcgcgtgcacgcggctggagcacctggcgatgtacgactgcgacgccgccgtccccggcgaggcgctggatggcgcggcccagtcgggaacgcatgcacgcatggtgaacgccggggttgtaggaacgcatggtggacgacctcgatcgtgggatgtcatgatccagtcggagcgcacggggcagtcggcatgggaagcaatcaagacggtgcgcatcggcacacggcacgtgcaggaggtgaacgagcagctgtttcgccaggagttcgccgatgcaaggttcaaggatggtgaaaacgtggaagatttctccgttcgcctcaccggtctcgccaacagcattcgcggctttggaggtgatctccctgagcgaaacagctgctcgttccccacctgcacgagtcgtgtgccgacgcgcaccgtctcgattgcctccaatgccgaggttgacggttatgaggagcgcccattcctcgtagttggtcctcgtcagaaccgggtagtagacggaggcgctcgactccctgacaacgcgtggctggacgccttgaggctatcgctcgccacgcccgcgcccatggcgcggcggggattctgcaggtcggcgcgtggtggcgtgcacgacggccggtgcggcggtgtacgcgacagccgcagcggtggcgagcgctgcgacatggcaccagcgagccaacgaggctcgtataccaattgttggcgaacaacc

SEQ ID NO: 4700 - DNA, 1384 bp, Oryza sativa
  Clone ID: PAT_MRT4530_1155C.1
ggccgcttttttttttttttttttaaaattatactaccgtttatcatttttcctccatgtattagtgcctcaaataaccgtaaaaatgttaccacaacatgaggagaatttcataaacggtactagcaaatagacaccacggcactgtaactcctgatgtacgtctatactacctaggccaatggaagcaatgaaaatgagaaaattaccacgttcaaagtgaaacacagcgggcacaaaactctaccgagaacaacagcatttttaacaatacaaaggtctacgtatcattagaagcctcgttgaacgacaagtcaaggtactctgccaagctcaatcctgatggtggcttgacttggcctcggtcagatgtatccttctttgcacgcagtgattctggaagccaggacttggatccatccctgggtatcattatgttgccaacaataggttgcaaatcccgccatgggtcatcagtcatgcttttgtggtagcgaactcttccatcttgccatccagaatagttttgagtgcctgagccatcccttcccccatcccttccccctcttccccttgatcctgggttgttgtagttgttttggcccctccctcttccataaggtgagtctggtctacctctgggtccatagttcattcggccgcctccttggccaggattatagtttctgggtccatagctaggtggatgtggataaaggccttgagatggaggagcagaatgtggattccatggtggtggaacgccagaatgtgggctccatggtggtggagcgccaggaggaggtcctcggtatcctgacatcggagcctggaactgcataggacttcgccaaggactgccccctggtgaatcatgggacaatcgggatggagtgtgaattggtggtggggccatatggtgctggtgtggaggaggataaccgcttccatagttccctgatcctgataaacaagcaaagttaggaattagatgagatatcctgacactccagttctcctctttctccccttttcccaaatttgcatagcctacgtttttcttaggatcatatcccccgcgcttgatgaagccatgagtgccgcggtagaactcgatcgcttttgagttgtagatgtagtcgtagcagaacgtcgatggtggagatgtagtcacgctgttccggcccgtctccaccaaccggcagcggcaaagcgcctcgcacaggggttcaccggcctgctgcaggcgcaaccgccgcagtttccgtggccggcggattcccttcgagatcgacctccccgtggtccccttcggcgcctcctggggtgcccgggccgggaaggagttcttccccgccgcggccgtcgcctccgtcatcgacat

SEQ ID NO: 4701 - DNA, 283 bp, Oryza sativa
  Clone ID: PAT_MRT4530_11560C.1
ccggacgcgtgggtgcgggtggtcggggtggaggtgcgcagcaagcccgacgcggcggcgcggccgggaggggtggcggcgtccatcgccgcggcggcgcggctcaaccgtgggcgccagtagaagaaaatggcggcgtctggcaccactgcctctctgcaatacacgccttgtgcttatataaagttatatactgtaatcgtgtaattgggatgctgcacctgcaggcttccagtgactttgtgtttggaattaatcatgcaaaaacacactggcattcacc

SEQ ID NO: 4702 - DNA, 266 bp, Oryza sativa
  Clone ID: PAT_MRT4530_11561C.1
acttgagtaaccaccagttaccatatacatggacttacgttagttcgaaggggttcaactcaaccaaggcgcatactgtggcggtgtccacactgacaacacaactgacgccgaaagtagaggcgactgtgggtgatgcattggaggagcgattttgagtgcttacattgagacaagcagtcacgttgagaacatatgctgtcattgcagtggaaatgcttgaacaaaaaacgatgactgtctgtgtgcttgcttgggcttaatgc

SEQ ID NO: 4703 - DNA, 167 bp, Oryza sativa
  Clone ID: PAT_MRT4530_11562C.1
gagagaagtggccgctctttaattctttggtcatcgccattgcccagagctcctcacacggcgaggagaggcgactggatctaggacgcgctgatgcacaagaggagaccggcggcgggtcgaggtggagggagatgacgcgcatgaggaggccggcggcgggctaa

SEQ ID NO: 4704 - DNA, 573 bp, Oryza sativa
  Clone ID: PAT_MRT4530_11563C.1
gggcatgtttcccgtctgttactattaatcttgggattgagttgagtctctgaatgtggcaattagtctagagttggtttttttaggttcctcaaaattgtgtatgtaatgggggtgttactttgctggtgatgaatacaatgacatattcacatccatataggcatcaggggcatttctttgctgagatatattaacatattcacatccatatatgttgggaataaatggcacccatgccaactgaaaacaccactttttaggttagatttgtcgcagtgcatcacgtttcgtcgtttctgtttgtcttgccattcaaagcatgcacctcaagttgtttcctagctgagtctatagaaggagctaggcagctagcctataaaagtgattagatttactttgattctttgaagaagacaatctcaatccattttattctcaagccgttgatcaactataattgttttttacatatagattgttctggttctcaaactatcctgaaaactttatgcatttttttctaatcttaattaaatcggtagcactcctgtctcccattgttccttttct

SEQ ID NO: 4705 - DNA, 616 bp, Oryza sativa
  unsure (1)..(616): unsure at all n locations
  Clone ID: PAT_MRT4530_11564C.1
gcccctcgtgaatgcccgtttctgcacagtcctcactccccctctccccttctccccccactctcaacctccggggtgccccgatttccgtcaccctgcgccacacctttccctgcctttggtggtttgctcgcccccacaatatccttatcctttccccaacgcccgtttatatggtatcctggtccgtaatgctcccaacattgctcgttcctgtatccgccacagcaaactcaccactcgccgcagttgccctccactgccctccattcctccccgcctacacctgtttgtgcttcacacattctgcgttgccatgcagccaccgtgtccccacattgccctagtctccacattcctttgtggtcctcagtggtatctatctgttgtagtnttgtatgtgattcctgcttaactagtctattgcctttccttcttgcctattagtcgtatagtgtatacatagtccnctgccacggctccacctncnnnnnnnnnnnnnnnncnnnnnnnnnnnnnnnnnnnnnnnnnnnnnnnnnnnnnnnnnnnnnnnnnnnnnnnnnnnnnnnnnnnnnnnnnnnnnnnnnnnnnnnnnnnnnnnnnnnnnnnnnnnnnn

SEQ ID NO: 4706 - DNA, 1758 bp, Oryza sativa
  Clone ID: PAT_MRT4530_11565C.1
tcggtcgagacctcctcgcgagtcgtcaatccatggccgcctccgcgtcggcgtcgctgcgccaccacctcctcctccgccgccgcccgcgcttccccctcggccctagccccactttccgcacctcctccctaccccgccgccaccagcggctcttcgcctctgccccatcctcgtcgacggtggagaatggcgagccctcctcgccggtggagccgtccgacggtgcgtccgtcgtcgacgtgaatccgccgcgcgggaccagggatttccccccggaggacatgcgcctccgcacctggctcttcgaccagttcagggaggtgtcccgcgtcatggcgtttgaggaggtggacttcccagtgctcgagtctgaggcgctcttcattcgcaaggccggagaggagatcacgcagcagctttataacttcgaggataaaggagggcgccgtgttgttctgaggcctgaaatcaccccttccttggcacgcctagttataaagcaaggaaaatcagtctcccttccactgaaatggtttactataggacaatgctggcgatatgagcgtatgacaagaggaagacggcgtgaacattatcaatggaacatggatatttttggcatgcctaaagttcgagcagagtctgagcttcttcaagctattattctcttatttgaacgtcttgggattacatcttcagatgtggggatcagagtgtccagccgaaaggtccttcaggctgtgttgaatatgtactccattccagaacatttgtttactgaagtttgtgtgattgttgataaactgggaaagctgactagagaagaaattgagaagaagttggttacaattgggctgtcatctgaagctgtgctgggtatcattgaggttctttctctcaagtcgctacccaagcttgaagaggtgctaggctctgatgttgaagctgttgctgacttgaagaagttgttctcgtttgctgagcagtacggttatgctgattggatttgttttgatgcatctgttgttcgtggccttgcatactacacaggaattgtttttgaggcttttgatagagatggaaaactgagagcaatttgtggtggaggaaggtatgatagactactttcaacatttggtagtgaagacataccagcttgcggctttggatttggagacgctgttatagtggaactgctgaaagaaaagggtctgttacctgatctgtcacgccaaatagatgacattgtcttcccattggatgaggagcttgaagggccagcatgtagtgttgcttcctctctgcggaggcaaggcagaagtgtagaccttgttgaagacaagcgtcttaaatgggtatttaagcatgctgagaggataaatgctggtaggctgatattggtcggaaaatccgagtgggagcgaggtatggttcgtgtgaagatattatcaaccagagaagaatttgaggtcaaggctggcgaactacaataagagaatttgtgaaggttttgcttctaatcctaggcctttttaccttctttatgacttcatccactaaagctctgttgaaacacagcgattcatgtcattcacacataggaggggtacaactcgtaggcactccattattttactgatagaatgcctttatttgctactagatgatttacacgtttgccgaaggtgattgtatcttcgtttgcagatacccttacactatagagttcaggagtaaataaactgcagaatacat

SEQ ID NO: 4707 - DNA, 1161 bp, Oryza sativa
  Clone ID: PAT_MRT4530_11566C.1
atgtattttccggtggagaagttatgtttgtgtttatatttctcttacaccaagttgaggcattatttgttatccaatgaatgcactatagtatgcaaagccgatgtgatcaaatatatgttatcggctccggttcttaaaggaagagttggaaagtggatatatgccttgatagaatttgacctcaggtatgaatcgcccaaggccatcaaggggcaggctatagccgatttcattgtggaacatcgagataattcgattggctcggttgatattgcaccttggacattattcttcaatggatcggtgtatactcatggttgtggtatcggcttggtaataatttcccctcggggggcaagttttgagtttgcttatactattaaaccttatgcaactaataatcaggccgaatacgaagcagttctcaaggggttgcagttgctcaaggaagtggaagccgatgatgtggagatcatgagggactcattgttggtaatcagtcagttggcaggagaatatgaatgcaaaaatgatacgttgatgatctacaatgaaaagtgccgggaattgatgaatagttttcggctggtaactttgaagcatgtctctagggagcaaaatgttgaagctaatgatttggctcagggggcatcaggatataagccgatgaccccatctcaatcggcttcacgaaaattgtgctacaaagctttgaagtatacattattagacgatgagctctattatcagacgattgatggggtattgcttaagtgtttgagtactgatcaagctaaggttgtgatggaggagtatgggtattatgcggaagccaatgggcaagccgaggcatctaacaagagtttgcttaaattgatcaagaggaagatttttgatttacctcggcaatggaacacaaggttggctgaagcattatggtcttatcggatggcttgccatggattgattcaagttcctccttataaacttgtatatggacacgaggcagttttaccatgggagattagaatcggctcgagaaggatggatttgcagaatgagttgacagccaatgaatattataatatcattgccgatgaaaaaagaagacttggttcaatccagactgagagctcttgcaaaagttaccaaggataa

SEQ ID NO: 4708 - DNA, 3302 bp, Oryza sativa
  Clone ID: PAT_MRT4530_11567C.1
ggcatccagaggcgcggtcggaccggcactggcttgagtgccgacaaccaattgaagatggagaccccaaattattattttgagggcatcgtggagggttcaaatttctacaccaaggacacggtggatgatctcgatggcaaattaggacagggtttcatgtcggctgatgatttggaagagattgacataggcccaggagataggccaaggccgacatttattaatagagcttttcaaagagtatagagattgctttgcttgggaatattacgagatgccaggactcagccaatcgattattgaacatcgacttcctatcaaacctgggtacaaaccttaccagcaacctccaaggagatgcaaagccgatatgtatgatgctatcaaggctgaagtaactcgcttatatgatgttggttttatcaggccatgccgatacgctgaatgagtttcaaatattgtctcggtcatcaagaagaatggcaagcttagggtgtgcatagatttttggaatttaaacaaggttacccctaaggacgaatacccaatgccgattgctaatcaattggttgatgctacttcaaggcacaagattatcagttttatggatggcaatgcaggttacaatcaaatttttatggcagaagaagacattcacaagattgctttcaggtgtcctggtgcaatcagcttatttgagtgggttgtgatgacttttggcttgaagagcgctggggctacatatcagagggcactgaattatatattccatgatctgatcggcttgttggttgaagtctacatcgatgatgtggttgttcaatcaaaagaggtggaagaccacagagccgatttgaaaaaggtttttgaaagaacaaggaaatatggcttgaaaatgaatcccacgaagtgtgctttcaatgtatcggctgggcagtttatgggttttcttgttcatgagagggggatcaaagtaattcagaggagtgtcaatgcgatcaagaagattctacctccagaagacaagaagtaattgcagaagttgatcggcaaggtaaattttatagaaggtttatttctaacttatctgggagattggaaccttttacacccttgctaaggttgaaagccgatcaagaattcacttggggggcagagcagcagaatgctttgaataatattaaggaatatcttagctctcctccagtattgattgctccacagaagggaataccattcagattatacttgtcggctggcgagaagtcaatcggctcagttttaatccaagagctcgaaggcaaggaaagacttattttctacttaagacgcaggcttttggacgcaggaacaatgtattttccggtggagaagttatgtttgtgtttatatttctcttacaccaagttgaggcattatttgttatccaatgaatgcactatagtatgcaaagccgatgtgatcaaatatatgttatcggctccggttcttaaaggaagagttggaaagtggatatatgccttgatagaatttgacctcaggtatgaatcgcccaaggccatcaaggggcaggctatagccgatttcattgtggaacatcgagataattcgattggctcggttgatattgcaccttggacattattcttcaatggatcggtgtatactcatggttgtggtatcggcttggtaataatttcccctcggggggcaagttttgagtttgcttatactattaaaccttatgcaactaataatcaggccgaatacgaagcagttctcaaggggttgcagttgctcaaggaagtggaagccgatgatgtggagatcatgagggactcattgttggtaatcagtcagttggcaggagaatatgaatgcaaaaatgatacgttgatgatctacaatgaaaagtgccgggaattgatgaatagttttcggctggtaactttgaagcatgtctctagggagcaaaatgttgaagctaatgatttggctcagggggcatcaggatataagccgatggtgaaagatattgaaatagaagttgccacaattgcagccgatgattggagatacgatctttttcaatatttgtagaccccatctcaatcggcttcacgaaaattgtgctacaaagctttgaagtatacattattagacgatgagctctattatcagacgattgatggggtattgcttaagtgtttgagtactgatcaagctaaggttgtgatggaggaggtacttgaaggtatttgtggtactcaccaatcgctcacaagatgaagtggttacttcggcgcgcagggtatttttggccgacgatgttaaaagattgcttcagatattacaagggatgtcaagattgccagaagtttggagcaattcagagagcattagcattggctatgaaccctatcatcaagccatggccatttagaggttggggaattgatatgatcggtatgattaatccaccttcaagcaagggacacaagtttatattggtggcaaccgattactttaccaagtgggtggaggcaattcctttgaaaaatgttgattctggggatgcaatacagtttgtcaaggaacatattatttattgatttggaattcctcagactatcacaaccgatcagggctctattttcgtatctgatgaatttgttcagtttgctgatagtatgggtattatgcggaagccaatgggcaagccgaggcatctaacaagagtttgcttaaattgatcaagaggaagatttttgatttacctcggcaatggaacacaaggttggctgaagcattatggtcttatcggatggcttgccatggattgattcaagttcctccttataaacttgtatatggacacgaggcagttttaccatgggagattagaatcggctcgagaaggatggatttgcagaatgagttgacagccaatgaatattataatatcattgccgatgaaaaaagaagacttggttcaatccagactgagagctcttgcaaaagttaccaaggataaagaatgggctgctcggcattataacaaaaaagtggtgcctaagtctttttctgagggagagcttatttggaagttaatcttgccgataggaactcgggataataaattcggcaagtggtctccaaattgggaggggccatttcaaatacataaggttgtgtccaaaggagcttatatgttgcaaggacttgatggtgaagtttatggatgagcacttaatggaaaatatctgaagaaatattacccaagtgttcgggtcaattca

SEQ ID NO: 4709 - DNA, 248 bp, Oryza sativa
  Clone ID: PAT_MRT4530_11568C.1
tccgtaccacggcagctactcaaggtctccggcgagttgacctgccccatcaatgcagcaaagggagtgagtcttcaggaggaggtgacccggggctgggaacgagcggtacaaggacaattacggcgagtgcgctgcgacagtacgaccaggccatcacgctgtacccgggcagcgccgctgtgttcatcgggcttggccggctcgcccaagcactccatacacatcaagtgtcagatagtgattaa

SEQ ID NO: 4710 - DNA, 852 bp, Oryza sativa
  Clone ID: PAT_MRT4530_11569C.1
atgcacacgaggtcagtgcgggagagcggcgtgagcgtggtggtggcagctccacctcttcagtgtcaccgccgatgcacacgaggagccatgataccagtcatgatattgagcagaatcatgatacatctcatgtatcacatgcgtgaatccttctaaggtttcatgataccgagaaggatcgtgaaacctcccaagtatcacatgattctactaatgtatcatcaatgaaacccgcaggcaccatgatagcagtcaagatactcactgtcttgatggtgttactctcattcacagatttttactgcctatcacctcgattcttaaaccgggccttctcagcatgttgtcctcccactggtgtcaagttcattgatgcaagctttctctgtcaaaccttgtactattttgattgtaagatcatatccttgcaaaacacgattctgaggatgtttcaccaggaagcagaagagccggcggacggcgagggtgccgctggaaagaagcaaggaatggcgcgcgattccgatgaggtttcaccgggatgcagaggagctgatggacgatgctcgcggcggtggaaggaagcgaggaatcgcgcgctttctaggaggattcgccatgatggggagaagccggtggacggcgcgcgcgccggcgggaggaagcgagtaatcgcgcgcggaggcgagcgcttccgaggaggtttcgccgagatgccgggaagccggcgtttggcaagcgctggtcgtcattctcattttgctgcaatgcacgcaggtggcggatgacagttgctcagagcgatgtcatatcggtatcagaatcgtcctgtttttgaacgggattccg

SEQ ID NO: 4711 - DNA, 5016 bp, Oryza sativa
  Clone ID: PAT_MRT4530_1156C.1
gcaaaaaaaacaactcgcgtatttcccattctttatacaattcctgttataggggggtaaaaaatttacacgtattgatctctaggctgcctggattgatcggcgtcagccctctccagggagctctcgatcctgcccgttgtgacaaaaataacatacacaaggcacaataggatcgactattctaacaaaaaaaaaacgaaaaaagaaagttaagaaaaaaaaaacgaacggcatgttcttctcccatcattccattttgcacttgaaccgtctggatgcgtctgatgcttggatatcatcaatggcatcgagacatcaagatgaccattggtcagggacagtcaggaagtacctcgacatggccttcctgaacctcttcttgtactggtctggggaaatgatagttgggagcacgtctctggagccacccaggaaccctgacgccttcacccaggtctccagctgcttgtcccaggtgtactgacgaaggtagtcgatgattcccatcacaagctctttgctttcttcatcaatgccaactaatagtgagtaatccatcacatccaccgacgccagaaaagaagtatcattccagacagctcgctccaaccttcgttttgctttgcttccgagaaaaatgggctttgtatgaagtgtctctaatagattcagatctaagagaactttgttgtttcctgatgtatcaggattgtaacgggaacgcaaagagcctttcaggtcatatattcttgatatcttcttcttgtaaaaaagattttccatgaccattacatccaactttagttccttgccatctctcaagttcctggcagcaacctggtaaagaccaagaactttagcaaggcacgtggggcttcctgaagatacagattctgttaaatatttgaagtactcagctgcatagtcctcaaatgaatctagttccgttcgggtcacttgctttatgacaaatctgtcatctagtgttttggcgaagtatacattactcttgccaccttgagcactccatctcttgcatcgactcaaagaacgaatgtagtaaagctcgtctggacagcactttcttctgattgcatcaaattgctttgcaaaataacatgttacagaaaatttagctttatccacagaaattgaatcgtcatcctcaaaagaaactgtcaaatgaatatccttggagtcattatttccagttcgaggttggtcagaaccatagctccacgtggatacatctaatgaactcctagaagaggaatcctgatccaaagaatttccaacactaaatctgcccaagtcattttgctggtccagcaacggcaacatgaatttatgataatcaggaacagtcatggcatgggctatcatgctggatggctcatcatcgtaaattggaacaacaacatctccagcattttgaagaagcaaacgaccttcaccatgcattatatcaggaactgatagctcagttttgaatgtcggggacaaacccctgcctgttctctcaagagcttttggaggcttttgagaataagctcttctaatgattccgtctgagccatctacaggtgataacctatttttgaaattgatggcagaatcaaatgaattgattctgattggtgcaataactctctggtatgagggatcatccaccagagcagcaggtacaactggaagtgcctcaatgctacactttgatgggtcattagcaagctgactagagccggtccatgctaagtcaattctatcagaaaggttggttgcagaagatcgtgatctctcaaatgttttttcaagctcatcagtcagtatcccatcattcggtcgttcagatgggcctggaacaactgaactggaatagtcttcagcagactgcggaggtacttcacctttaatgtcggttttcaacccaaaatgtgtcacaattgtgtcaatttggtctcccctgatcaatggttttatactatttgcagccaccgtcaatgaacttgactgagtatgttctagtgaattctcccaattctcatgtgtaccaggaatctcaacctttgatttttctacaaaacgttcaggaatcttatcaagacactgcacgtcagttggcacagtatgacagttttccttggtaagtgcctgcatcatgtacagtctacgatcccatatatgtgcatcaactataagctctctcctcaggcgattgagctcaagaatatctatagccagttcaagtgtattcaggttttctgtgctagcaaaccttgacaatacatcatacttcttccattcaactctaatcaaatccttaagatcaataacatgtttaggcaagcctgttttcatgctcatgttttgggctgaaactatgttttcaattgagtcaagtttgtcgaatatctccttgtaaaagtactccttcctgctggctacatcagcagcatctttgatgatccaatcttgagccattggataagtgaagtccagtactgcgggtggcaagttcacggaaagaatatccacaggagaatagcggaagacagcaaccatgcttccatacccataaaaacgaaggcagtccctctgaagggaatgtccacaggaggcaacccggttggccgttgtgtgattcgaaaagctaagttccaaaaacttcccaaaagaaagtccacgtgccgcatcagacatcactactctttgtgttgctggagggattccatctttaggtttgcacctgaggcacctgtgccacatccatatcttcccatcattctccccaggtaaccttacagaggcaagatttctaacactgattgtgagactgccttgtcgatgggtgtagcatcgaacatgagattctgcaggttccttgcaagattcacagcacgaaatctgattaaataaatcttcgcggaaatatctaccgagtggcttatcaaaattaccgtagaactttatgcgaaagagctgcgattgcttgcatacaacccctctctgaggacatgcgattgacaaggacactaaaatgctttgtggattatcagatgttgggaaatattcaatgtggttttcattatggtcacgtacagctaatcctgcatgttcttcatctgatgtattttgccaaccattatccaagtcactttcaactctatgaaaacgtggtcccattggtgagcttttggatgtctgaacaataatgtctgaaggtggtacacaacccttatcaagggaggatcttggagaacgaggatatataccattagtgacaccgatgtactctgcctgatttaagttaggtcccagaaaagatttatccgcagatagcgggttttcagaatcattaaggcaatttgcaggcatgttgcacccattatctgaagttttctgaccaacaatttgaaaatcgttaaaatcctgaagacagtaacttgaggaacagttcccaccatccacatgattctcaagtggaagagctgaaatatctgaagggatctttggtagtgttgcaccctcatctgcaagatatgaggtctcaagtgataggtgataggctgcaaatagtgcaaactgtagagcaagtttaaccctccttaactcttcgtgggatgtgcctcttagaaggatcgtgcagcccaaccgtcttggacaaccatcaaaaaacatcagtgtcttggcagacttcttgtttgcattctttggtgatgaagactctgaaactcgttcaatccagaatgtttggcactgtccaagccttaccgaagtaacattttcaatggatgaagcaatttgagcacctgtgcagcgtgatatcctttctagaagtgatctcttgacattcagaactaaagagatatcttttgcaagaagctgttgagcatatagtggcacgcttttttcaacgagcaaaacatgaggtcgttgggcctctatttttgcaactgcaatcttaaggtattccttttcctgttcaagaatgctgtttatcgatgctagtttgttcgaagccttttggtgttccagtgctccccccaaaagaagcaatctagggttctcatgctttgacaccatgcgtttatgttttacattcttagaacaaactacacctttaatgaaagtactatcattgggattccctgatgctacacatttgactttgacatagtccgtgggatccatgctaccacctttacttgtatctggccttacaaaggtagccgcctgccatgctaatgaggatattatgtctgaccatacatccacaggatcaacgccatgaccttggagcagctgggacacaagagccctgaaatgcccatgcaaagcattccttaggaactctttatgggctatattgtgttttccttttattcccagcgaatcatcttcaccaccatgatcatggttaacacgtgtgaaggtattcgtatcaccaacatcattgccatcataatcatcatcatcgtattcaaaaaaaccattttcaaagtcatcaccctcgtcctgaggtggtggtggataccaaatgagtctgttactctcaaaatcaatcggtatcgaggtattgttctgctgttcatcaccgcaaacaggtgaatccacaaagctagaataatcgacatcttcagagccatggacagaattcaaagggtagacaggagagtggcagctcctcctggaggatggacttgtgtctcctagtcccaatcgtctcacgggactatctaccgggctcgaagtccccaatctgaaggtgtacatcctactaatacttgtgctcaccgaatctgtatccgaagtgtcctgagaaaactcactgtgcggagagaaataccgctccgagtcatcaccatcttcataaccaacactccttgtcgagcatcggagaggaccaggtgacgagaggcgccgccacccggcgtacctcgacgaagacggcgtggggacgcgctccggcggggacaccgacggcccatccgtaccgtcaccacgctgctccat

SEQ ID NO: 4712 - DNA, 449 bp, Oryza sativa
  Clone ID: PAT_MRT4530_11570C.1
cggcacgaaggcctaatatgctccctaagaagtggcgtcaccggtgcagagcatccgtgcttcttctgtccactcctttccctcgaaaaaggagaattcattgtcacgggcagtgaggatgcaatgtttacttctacgatttgacacggccaaagaactcgtgtgtaaataagcttcagggacatggttctccagtaattggagtggcctggagtcatggggaaaatttgcttgcctcatctgattcagatggtacagttatgtatggaagcgggcataaactaattagagcggattccacaaaacgaaagttgcttgtataatgaaggcatttttggcgcatgttgtacctcccatcatatattgtttgtaagacacagaagatgaatcagccttcaattgtatttctacaaaagtatagttctccatagagtgtacagcggttcttc

SEQ ID NO: 4713 - DNA, 132 bp, Oryza sativa
  Clone ID: PAT_MRT4530_11571C.1
gagaagctacagtagctagaagctataggcctctatgctacctacctttggaggtggaggttaggagcttcacctccctaatccgagaagctgcaatagctagaagctataggtctacctttggaggtggag

SEQ ID NO: 4714 - DNA, 155 bp, Oryza sativa
  unsure (1)..(155): unsure at all n locations
  Clone ID: PAT_MRT4530_11572C.1
ttttctnagcggcnccctgtgtgtcggggtgtgggtaaaattttttnctatgggcactgggattttatctatcggaacaacagcttaaaagggaagtaccgaacaaaatcgggatagaaatacccaaaattacttcaaaccatctagaggaatac

SEQ ID NO: 4715 - DNA, 1961 bp, Oryza sativa
  Clone ID: PAT_MRT4530_11573C.1
ctacactttttcttccttctctccatccacatctttccccttccccatccagccggtggccctccccaaccaacccagctgaatgaggaagaggcggcgatggatgctcgagacgaggtggcacgtcgaccgggagcgccgctgtcggcagcacattttcacgtgatgaatccacaacggcagcggctcggttccgacgatgggcgacagaatccgcaatggccgttgtcggcgacatgggaccgggagtatcatgactagaggcttgaggcagacacaatcgcccacgtggcctggcaccctcgggggacgtcgggcccgagggtgatgtgttcgccctcctcttagtctccccgagggggtcggaccattcccgcctcggccccgagggccgaggcgccccgacccctcgtgggttctgctccgcgtaccggtcagattgcgggttaggtggcgacaggcggtctgacgcacgcctcgccccatcccgtcaggacgagagcctccaagcactcgtccctagctggagccggcgtgttagctcctggagatggcacgttggttccgacagccatgttcccacgtcgcgcctgcttccggcggaagtggaggtgggcccgacgaccccacctgtcaggtccttcctctaccttcggcctctagagccgaagtcgccatgccgaccgttgccgcccacgtcccgccgaatccggcgctctcccgcccgcgccctcgcgcccaaaccacatgaaatcggtttccctccacctcctccccctcttcccccacttttccccaattttcgcgtcgattcgagctccacctcgcccacgtcgccggcgccccttcccacttcaaattcgtcatgctcggccacgatctccaccacccgagcctatcaaaagcctccccgtgctctcatattccgtttccccttcctccccgagctcctcgcgccctctcctgtgctccccacgcgagcccaagcgccgccgctcgccggcgaccctccagccggccgttgccgccgctgccgccgtccccgcgccgctccgtttgcgccaacggcctcgtcgcgcgttgccgcaccccgtccaccgctccgcttccgcaataaaccacccgggcaccggtttcaccgtgcacccgagccacagccgcctctcgtcgcctccagccgcgcgccaccgctgctcccgtcgctgtcgcgctgcgccgccaccgccgaaagcttcatcgtgccttgccgcacaccggcctctgatccatttccccaaatcgccaccacagccgcccctccaccttcgacccgagccaccaccaccattggccgactccagccacgtcgccccgctgctccgtcgctgctcgtccactccttcccgagcgccacccgtcgctggagtgccgccctctccctccgccccgagcttcaccggccgcctccctccattgccgtaccccatggtgagcactccccctcccttttcctctttctccccttcgtcggccatctcccatgctcgccgccgcgccacgtcgccggcggccgttcggccatcctccgccactgccttgccaggctcctcccttgccgatttggggtgccgcgcgtggaccgcccgtggttctggcccacggcgcacccgaggacgcggtccaccgtgtgcctgcctcttgacccgatgacatgtgggggccacctgtcagcgtcggccctttttgatgacctcgactttttcctaggcaccggtggcgagggtgggcgtgatggagttgggtcagccggggtgtccggttgtccagctgccggattcatcgcggcgcacgaggggactgcccgctgccttgcgaggagtgggggtgaaaccttagcatggtgtggatggttaggagagagttatatgaagggtcttgtcacaatcactcgacgtggtgacgtgttcatcatgggcacatga

SEQ ID NO: 4716 - DNA, 141 bp, Oryza sativa
  Clone ID: PAT_MRT4530_11574C.1
atggggctgcaggtggagaccgatgataggggcgagagcatcggtgttggtgacgagggcggagacgtagctggcgagggcaaagaggacttggtggctaacatggaacttttggcgacggaggacgaggacgatatgtaa

SEQ ID NO: 4717 - DNA, 444 bp, Oryza sativa
  Clone ID: PAT_MRT4530_11575C.1
atggccgggtatcaacaggaggaggaggaggaggaggaggaggaggaggaaacataccacgggtggtggagggaaagggagagggacgccatggacgcctcgccgtcgcaggaggagccgcccccgctcgatcgctggctcgcttgtgcctgtgccgttttcttatcttgcgttatcctgtccaccgaggaagctagacgaagcccaataaggaacgggctggatccgtcaaggcgtcgacgatggccgggcctacaaaaaaagcccgcaggcaggttatggaagcagcggaacatggaggcagcatgcctcatgagctatggatccagcatcgtcctaaggaagaactacatgcgcttgaactcgccgaggaggtcgttcgaggatgagaacagggggtggatacagcgtaggggcggcggggtctcgagccctcactactaa

SEQ ID NO: 4718 - DNA, 960 bp, Oryza sativa
  Clone ID: PAT_MRT4530_11576C.1
atgcctctcctgccggcgtcgccgccgccgctgtcgctgtctcggtcgttggctgcggcggcggcagcctctcgtcgcggccgcgccgtgacgtgcgcagctgcgaggggcgcggcttcgtcttcgtcggcctcgttcgacgcggcggggttcgaggccgagcggctccgcctcgacgcagaggcgcgggccgggatggcgtccgcggcggcggtggcgggggcggaggcggcggaccccaaggcgtggaagtgggcgatacggaagcgggtgtgggacgcgctggaggcggagggcgtcgcgcgcgacccgcgccccgtccaccaccgcatccccaacttcgatggcgccgcagccgccgcggactcgctggggagactcgacgtgttccaggatgcacaatgtgtgaaggtcaatcccgactcacctcagaagcaagttcgcttcttaacactctcagaagcatgtacttctgttggtgcagccaaatacgggagacctataggtctagatgaaaaaattaaagtggatttgattgtgattggatcggttgcagttgatccaagcacaggagcacgactaggaaagggcgagggatttgcagagctggaatatgggatgctgcgttatatgggatctataagcgattcaaccatgatagtaacaactgtgcatgacaaacaattagtgaatgacattccagttgagaagctgttagttcatgatgtaccagttgacattatctgcactccaactcaggtcatattcacaaataccacgatcgcgaaaccacaagggatttactgggaaaagttatctccagagaaattgggccaaatccgaattctacaggagctgaagagacgcatagagagtgaaacaggaactacacttccttgtggcccttctgagaagctaccaccaacagcgcagcgaagaagaagaaaacgaagacggtga

SEQ ID NO: 4719 - DNA, 2131 bp, Oryza sativa
  Clone ID: PAT_MRT4530_11577C.1
atgtcgcacaggaagttcgagcacccgaggcatggatccctcggcttcctcccgaggaagcgctcctcccgccaccgcggcaaggtgaagtccttccccaaggatgacgtatcaaagccctgccaccttacttccttcgttggctacaaggctggaatgacacacattgtgcgtgaggtcgagaagcctggctccaagctccacaagaaggaaacctgcgaggctgttaccatcatcgagacccctccgcttgtcattgttggactcgtggcctatgtcaagacacctcgtggacttcgctctctcaactctgtctgggcccagcaccttagcgaggaggtgcggagaaggttctacaagaactggtgcaaaagcaagaagaaggctttcactaagtatgcccttaagtatgacagtgatgctggcaagaaagaaatccagatgcaacttgagaagatgaagaagtacgcatctattgttcgtgttattgcccacactcagatcagaaagatgaagggcttgaagcagaagaaggctcacctcatggagatccagatcaacggtggcactatcgccgacaaggtggactatggctacaagttctttgagaaggaaatccctgttgatgcagtcttccagaaggacgagatgattgacatcattggtgtcactaagggtaagggttatgaaggtgtcgtcactcgttggggtgtcacccgccttcctcgcaagacccacaggggtctccgcaaggttgcttgtattggtgcctggcatccagccagggtgtcctacactgttgcccgtgctggtcagaacggataccaccaccgcactgagatgaacaagaaggtttacaagattggcaagtctggtcaggagtctcatgcggcctgcaccgagttcgacaggactgagaaggacatcaccccgatgggcggcttcccgcactacggtgtggtgaagggcgactacctcatgatcaagggttgctgcgtcggtccgaagaagagagtcgtcaccctccgccagtcgctgctgaagcagacctcgcggctcgccctggaggagatcaagctcaagttcatcgacacctcgtccaagttcgggcacggtcgcttccagaccaccgacgagaagcagagcctctcgtcgcggccgcgccgtgacgtgcgcagctgcgaggggcgcggcttcgtcttcgtcggcctcgttcgacgcggcggggttcgaggccgagcggctccgcctcgacgcagaggcgcgggccgggatggcgtccgcggcggcggtggcgggggcggaggcggcggaccccaaggcgtggaagtgggcgatacggaagcgggtgtgggacgcgctggaggcggagggcgtcgcgcgcgacccgcgccccgtccaccaccgcatccccaacttcgatggcgccgcagccgccgcggactcgctggggagactcgacgtgttccaggatgcacaatgtgtgaaggtcaatcccgactcacctcagaagcaagttcgcttcttaacactctcaggagataaaaagttgctgactccgcaacctcggctaaggacaggatttttctcagttctggaatctcacatgatacccattggatgtattccagaagcatgtacttctgttggtgcagccaaatacgggagacctataggtctagatgaaaaaattaaagtggatttgattgtgattggatcggttgcagttgatccaagcacaggagcacgactaggaaagggcgagggatttgcagagctggaatatgggatgctgcgttatatgggatctataagcgattcaaccatgatagtaacaactgtgcatgacaaacaattagtgaatgacattccagttgagaagctgttagttcatgatgtaccagttgacattatctgcactccaactcaggtcatattcacaaataccacgatcgcgaaaccacaagggatttactgggaaaagttatctccagagaaattgggccaaatccgaattctacaggagctgaagagacgcatagagagtgaaacaggaactacacttccttgtggcccttctgagaagctaccaccaacagcgcagcgaagaagaagaaaacgaagacggtga

SEQ ID NO: 4720 - DNA, 1919 bp, Oryza sativa
  Clone ID: PAT_MRT4530_11578C.1
tttttgtttcaagcctttcatttttttgatttgaattttgataagcaaaaccgcatttcagaattcagaagatacaagatttaatggcataggggtcaacagagttaatttagggacagcagaagggagcacaaattcatagatcaacaggtcctgaaacatttgctacaaaacttaataccccagaaaattttaagagaagagaaccaagtttagagtagtgatgatcgttttgacaaattctgactttgctgaggaaccgcacaaactaaatgtttcaaatctggctcctctttttgtttttttttttttttttttttggcgaaaaaacataactatcgagttcaaaattcataaatctcaacagtttgatcatccgcagcaccagcagctcagagtagcaaagcatttaaactgggtactcaaaatatctgccacaaaactcaggacaagtacagaaactgggaaagctatcaggtgaggttcgattgaattctgatggcctaggccttgagcttgccgaagaacctctgcttctcgtcggtggtctggaagcgaccgtgcccgaacttggacgaggtgtcgatgaacttgagcttgatctcctccagggcgagccgcgaggtctgcttcagcagcgactggcggagggtgacgactctcttcttcggaccgacgcagcaacccttgatcatgaggtagtcgcccttcaccacaccgtagtgcgggaagccgcccatcggggtgatgtccttctcagtcctgtcgaactcggtgcaggccgcatgagactcctgaccagacttgccaatcttgtaaaccttcttgttcatctcagtgcggtggtggtatccgttctgaccagcacgggcaacagtgtaggacaccctggctggatgccaggcaccaatacaagcaaccttgcggagacccctgtgggtcttgcgaggaaggcgggtgacaccccaacgagtgacgacaccttcataacccttacccttagtgacaccaatgatgtcaatcatctcgtccttctggaagactgcatcaacagggatttccttctcaaagaacttgtagccatagtccaccttgtcggcgatagtgccaccgttgatctggatctccatgaggtgagccttcttctgcttcaagcccttcatctttctgatctgagtgtgggcaataacacgaacaatagatgcgtacttcttcatcttctcaagttgcatctggatttctttcttgccagcatcactgtcatacttaagggcatacttagtgaaagccttcttcttgcttttgcaccagttcttgtagaaccttctccgcacctcctcgctaaggtgctgggcccagacagagttgagagagcgaagtccacgaggtgtcttgacataggccacgagtccaacaatgacaagcggaggggtctcgatgatggtaacagcctcgcaggtttccttcttgtggagcttggagccaggcttctcgacctcacgcacaatgtgtgtcattccagccttgtagccaacgaaggaagtaaggtggcagggctttgatacgtcatccttggggaaggacttcaccttgccgcggtggcgggaggagcgcttcctcgggaggaagccgagggatccatgcctcgggtgctcgaacttcctgtgcgacatcttcctcctccttacctgaggagagtgacggcgacggcggcggcggcgcgagctgagtgccgggcccggccggtgcgctttgcccaatgtcaacatatggtgttaatatgttcaaggcatccctccaaataacccgaatgcaagatgcagagccaaaaaaaaaaaaaaaaaaaaaaaaaaaaaaaaaaaaaaaaaaaaaaaaaaaaaagggcgaccgctcgcgatctagaactagcggacgcgtgg

SEQ ID NO: 4721 - DNA, 15637 bp, Oryza sativa
  Clone ID: PAT_MRT4530_11579C.1
atgtcgctcgacggcagcttctccgccgccgcggccgccgcgcgcctcctcgcgcggtgcccggcccttcgcgcggacccccgcgtcctcgcgctcgcctccaccgccggcggtggagggccctcccgcgatgacgtcgccgcggcgctcgccgagccgctgctccacccgcggtacaccgtccccgtcgtcggctgcttcctcccgctcgccccggccctcctcgaccgcgccgtcgggctgctccgcgccgcgggggcagccgccctgcgctcggacgaccccgcggcccgcgagggggaggaggcgggggaaggggacctccgggtcgtggagttctacctgtccaggggcaggggcctgcggctgcacgagatcgcgtgcctcgcgctcgcccgggccctcgacctcgccccctacctgctccggcatttactaaactactttaagtttgctccaccaccattccaaaggtttctttctggaggtgttccgtcacaaatcccaatcaaggttggacttcatttgttgcttgatgccacccaagtatcatatcggtttctagaattggagccaagagtattttgtgaacaatgggactggtcttgctttttagaccttgtatatagtactgctgactacagtttagttgacgattcactttatagtgttgtgttggatttaagatggtgcgctatacaaatactcatggtggttctgaaagcaagtgatgaggctgttgaaagttttggtctaggagcagacgaagcatttacatgtttcttgagatggaaggagttttgcacagatacttccttggagaaagcctctttgtatcttcaagccgaagaagttgattgtaaaactgatgcagatggactcacttgtttggctgattctttgccagattggcatgagttttctgtgggacggcagcatggcagtggaagtaatatatgtccatttgtgctcactgctactttgagaaagagttacgaggtagctttaatggcagttaaccagaagtggcccatacttctctatggtcctgttggtgctggaaaaacagcactaattaacaagcttgcacagattggtggaaatcgagtgctcttcatccacatggatgaacaaatggatggcaggaccttaataggaagttacgtttgcacagaaaaacctggtgaattcaagtggtctcctggttctcttactcaggcagttgaagttgctgagaattttcgtttatttgctacagtcaccacctcaaagaatgatgtttcacatgccctggaaggaagactaacctttagtgctctgtggagaaaagttatggctgttgatatttttgcttcctctttgtcatctctggataaaaggctatatgtagcaagagaaattgctaaactattttgtgtcccccatggagcagaaaccataagtccttctgacaagcccattatccaggcgcttattcagaaagggccttttgctgatattcggcgtgcattagaagttcttgagagggtagcctgctcaataaagttcaatgagcctgttcttctcgttggtgaaactggcactgggaagactactcttgtgcagaatcttgcttcctggcttaaacagccgcttactgtggtgaacttgagccagcaaagcgatatttctgatcttctcggtggatttaagcctgcagatgctcgatcaatatgctttcctctttatatagagttcaaagatcttttttgtcgaagtttttctggaaaggacaatgaagctattcttcgccattgtgatgtgtatgtaatggagaaaaaatggaagaagttattacgtgctttggaaaaatgtgttgagaaagctcagaagctaattgatgggagttctaggtctaacagtggttcgaagagaaaaaggcccttgcctgcccaagttatttctgactgggactccttttcatccaggctaaatgccgcttgtagtcaaattggttcagaaattggcatgtcatttcaatttgtggagggtgcttttgtatctgctttaagaaatggccattggattttgcttgatgaggttaacctggcacctccggagactcttcagagaattggcgctgtactggatggagagagtggaacattgtgcctggctgaaaggggtgatgtggactatattgagcgccatccttgtttccggatgtttgcatgcatgaatccagcaactgatgctgggaaaagagagctgccatacacctttaggagccgatttactgaattctttgtagatgatcttattgatgatgatgatctccgtctttttgtcagtaaatatctggatggcctgcatgctgctaaaggagttgcagatagcattgttcgattctataaagcagcgaaaaaggagtctgaggagaagctgcaggatggagctaatcagaagccccaatttagtttgaggtctctttctcgctcattaggttatattaaaaacgcagagagaaaatttggcttcaagaaagctctttatgatggcttctgtatgttctttcttacaatgctggatgccccaagtgcaaaaatcatcaacaacttgatagtatctcttttgttagatggaagagtgccacctagaatttcatttgctgactacttcgttgaaaagcctaagctactaaatggttctgaatctgacgactttttgcgtagctatgtgttaactaacagtgtcactgagcacattgtcaaccttgcctgtgctgtttacattaaaaaataccctgttctcctgcaaggtcccacatcaagtggcaaaactagccttgtcaggtttcttgcagcacaaactggtcatgaatttgtccgtatcaacaatcacgagcatactgatcttcaagaatatcttggtacatatgttactgacagccatgggaagcttcaatttcaggagggtgctttggtgaaggctgtacgtgagggacactggattgtgttggatgaactaaatcttgcaccgtctgatgtcttggaagctttaaatcggctgttggatgacaacagggagctctttgtgccagagcttcaggagaccattcctgctcaccctaattttatgctctttgctactcaaaatccacctgtgctctatgggggacgtaaaatattgtctcgggcgttccgcaaccgttttattgaagtgcatgttgatgaaatcccagaagatgagctaatcacaattttggagcagagatgttcaattgcctgcagttatgccacacgaatggttcaagttatgaaagatttacaaacacatcgacaaaacagcagagtctttgctggcaaacatggtttcattacaccacgggatttatttcgctgggcaaatcggtacagactttttgaggggaagtcatatgaagacctagctaaagatggctatttacttctcgcagagagattaagggatgacactgagaaagctgttgttcaagaagtattggaacgacatcttcatgttaaactcagtatctccaatctctacaacatggaagtcagctgtgacaataacttgtcacgtgaatctataagactgagagtacaagaaacctttggaaacatcacttggacggaaagtatgtggaggctatacttcctcattgagcgttgttacaggtcacgtgaacctgtcctccttgttggtgaaactggaggtgggaaaacaactgtttgccaggtcctaagtgctgtccttggagtgaagctacacattttaaattgccatcaatataccgagacttcagatttcattgggggattctgtcctatacgtgataggtcaaaaatagcgatggagttcaaacatctgattacaaaaatgaagcagctgaaaatattcattcatgttgcaggagatatgtcatttcctgctgatatatctggagctgttagtgtggtgaatcacatcgatgaaatacttgatagatacataaaggagaaggaactgttcccacaagtgccacctcatgattttgccgccatggagcaaattaagttggatttgatgcaacttcacaagaggtggcaggcaattttcctttggcaggatggatcgcttgtgcaagcaatgaagaatggtgatcttttcctaattgatgaaatttctttagctgacgatagcgtacttgaacgactgaacagtgttctagaacctgaaagaaaattggtcaattcactggctgagaagggtggttctgtgctagagaaagtagtagcacatccaaacttctttatccttgcgacgatgaatccaggtggtgactatggaaagaaagagctttctccagctttaagaaatcgtttcacagaagtgtgggttcctgctgtcactaatgttgatgaacttaagagcatagctatagagaggttcacaaatgctgaggtttcttgctttggagattgtattgttaatttctggatgtggttcaaccagttgcacactggaagaatgctcacaatacgagacctgttgtcctggatttcatttatcaatgtgacagagcgaaatcttggtccacaacaagctttaatacatggtctgttccttgttttactagacgggctcacattgggaatgaatgtttctaaaactgaggctactgaattgagaaggacttgcctgtcctttcttctagaagagctgcagaaggtcgagggaaaaccattaaactcagacttacatgatctaaagaactatggctggggtgaccatacaagagaaattgatattggtcaaccggatcattttggcatcatgccattttatattgatacaggtcattttactcgcaagcaacagggttttcaattcatggcaccaactaccagtaagaatgttttccgagtgttgcgtggcatgcaacttccaaaacctcttctgttggaaggtagtcctggagttgggaaaacaagcttaattgttgcattagctggattttctggtcataacgttgtgaggataaatctatctgagcagacagacatgatggatcttttaggttcagacttgccagttgaaggggaaaatggaatggaatttgcgtggtctgacggcattcttcttcaggctttaaaaaatgggagttgggttctgttggatgagctcaatctcgctccccaatctgtcttagagggtttgaatgccattttggaccaccgtgctgaggtctttattcctgagcttggtcagacgtacaaatgtccaccgtcctttcgtgtctttgcatgtcagaatccttcgtcgcaaggtggtgggcggaaaggccttccgaagtccttcttgaaccgcttcacaaaggtttatgttgatgagttatcagaaagcgactactcattcatctgtaaatcacaatatccatcaatcaaggatgacattctaaaaaagttgatttcctttaacaatagactctacatggataccatgatacataagaagtacggccaagaaggatctccttgggaatttaatctacgtgatattattaggtcttgtgagatgatagttggtgcttgtgagacagcaagaggatatccagaaacctcaatggttgactgctttctaaatacagtctaccttcaacgaatgcgaactgtagctgatcgcgaagaagttgtcaagctttttgaagaagtctttcagacaaatgtttggtggttggaagtgcatctattagaagaaatcgcgtccactcttgcaaagttcagaatagccaactcaacattctccctggtaccctccatagccttgaagctgccatgcactgtatcaatcaagttatctggcaatacattgaacgaagttaatctatcttcggcaactgatgtgtcagaattgttgggatgctttgagcagtataacttttttaggcactataaagtggtcatatctcaagttgagcgttatattgatgaatacttcagcctgagtcaatatatacagtggaagagtttggttgcagacaggaagacattgtttgtaaaatggtttgaatttgtaattgcaaagaagttctcttcaatttgcatttcaacccttgttgaaatgagcaagaattcatcgttgccatcattgagcttggtcagggacatagttgaggatatgaagtgtgatatggaaatgtttgacttgcctgtatccttcaataaagatgatttgagtaaaacactgaggtctatctattacttgcagcagagtgaagctgtacaccaaccagttaaatttgaatgggttgctggagacttgatcagggctattgaatgtggtgaatggattgttttggacaacgcaaatttttgtaaccctactgttctcgataggataaactctctggttgagcaagaaaggtcaattgtagttaatgaatgtggtcttgtggatgggaaccctgtaattctgaaggcccatcccaagttccgaatgtttttgacaattaatgcaaaacatggtgaggtttcaagagctatgcgaaacaggggagttgagatctttctgatgaaccagaatttaagtataaacggatgcagcaatgcggctgaggatagtgagaggagggacattacacggtttctaatttcctgtggcataccaagaatggagttggtttcgtctatgagtgaagcacacttgtatgcaaaagctgctggattgcgtcttggtataaacattacacttcttgagataacaagatgggttcaattgttcaaacaacttctaattaaaggaaatcagtttctttggagccttcatctaagttgggagcacacttacctgccatcattgggtgaagtgtgctctaacattgtcgaggagggaaaacttaggtttttggttcattttgatgtttcttcagctgatttgcattatggattttcgttatccttgcctggtggttggccagttgaacaaaaactaaaggactttatctggtattcaaaggaaacttgtgtccaaagaaattgtatgtatttgcagtcattgggttcccaatacgctgcttatcagataagcactttgaaaagtaattcatccttgttgggacctatcactagcatccacccatatattctgcctgccacgagtttattagaactgcagtttccaaccgtttctgataagcagtctgtcaagccttgtgtaactgggttgttcaattcagaattagctgatcagatgctttttattgctgcaaactgggtaatggagcaatctactgaaaatgatcttaaattgtatgccatatggttcaattggtgcaatcaccttctccagccttactgcaacttctttgagaactacggaaatatacttaagaaagaaagtgaccatcctatttggcatagcatccttgaatgttacagggaaatagttgcttatcacaagattgatgttgttgctcaccctattccattgctttcaatgagattgctggatatgacttgttctgttacccttaaagattgccataaccggcttcgcaactctcgtaatggtttgagcttgttgcgacttactttgcagcaatggcaactcgagacaaaatttcctgaccatggtataatggaagtcactatgttgccagcattgaagtccctcaggtgcttggagggtgaggtactcaagatggttgtgaaatcacggaaactgctgcagatatactctcgtctcattgattatcacaggtcaatatggaagatgatactcttatctcagtttgagggcttgccagttgtttggaatcttttgaagaaggaaatactaaagttgcaaccgaaattcccagtagaagtcggtatctttttgatggaaagtgtcaatctcaacagcctccaagatttcaatttacattatgacaaaccaactttgtgggtttatggtggccaccctattgtaccatcatctggtagaatcttctacaaaatccaagacatcttagcattttctgcagctgtttggccaaggaagaatcttctgaagggacattttgatgacaaccaacacttcgttgatgctatgttgtcagccaatcaggatcttagaaaccttgcgatggaaggtctttctatggcttctcttgctgcaactatcaccgaggaagaagattcaacagtattggcccagttggatgaagttcacaagaggcttgttgagaaggttgactgggagaagaaaaatcttgaatttttgtccaaggcttcaactactgaaattattgcaaacattgaatatatgctcaagtatgctatggacttccaattgggatcatcttcaagatctccctttgagtttactcaacatcagatcatttggtggattcatcatgcttgggccacagttgataacgcttacaagttggcactcgaatgttctgcagtgcatgtaaaagttgctagttctattcttgaaatgtggtacaactaccatacttttttgtggacatattgctctgggagaccaaaggttcagttctcagttacccatgatgaaacctgcgaccttgcacacctgacaaaaatggatgcaatcgataccatccttcaagaggatttacgtgtgatggattatcagaagaaccgtttagtgcttcgaatttcatcaagaaacctctgggaaggtgtctcgtttgcgggaaactttgttcttagtctacattctgctgctgattccctctttaaacagatcatagttgtccataagaagcatttcaagcaagaagagtatagcaagttagagtccatcctcttccaacagtctgaacatcgtgtaaagaaagaagatcttgacactgcctgtgcgctgttatcacgttcaagtcatggagtattggcttcactcgctggctcgcatgagctaatagggtccttacttctggaattgcactcaccgttctcacagggttatttgatgcatcttggggctgcttgggtgtacattggagagttgcgcttccggttattgttgagctcatataatccagatcctgcattcgaatccgctttcatgcactctcatattctggaaaagatttcactactggagcttgagggaaaggttcgtcatcagtgtgaggaattggctgggtctagctctgaggaagatgggtatgatcagaagttattgcaagaactcaaaacaaaagagaagagcatccgggcaaaggttgtatttcgacctccacaatctaggcataagagcctgattgtggcatgctgtgagtttgaggaacgattgtctgaatgcaagtctctgttgactagtttaaatggtgatggagttgggcaattagagattgatagagtctgcaattggcagataacatccagaaatttcatcaagagactgacagaggagtatgtggaatatgttgatttgattcaaccaattcaagttgctgtatatgaaatgaaacttgggttggcaattgctctgtctggttatcttgagagggaatatttgaagaagattaaagaagatgatattgaacgagctctgggtgcaatttttgctattatgcaatttccaagtggatctgctactggcaatgtttcagtggacatgcccgatttaacgaaatatgtaaatgatgatcaactggaaattcgctacaatgaggtcagtgaccttgctatgttgaagaagctagctgctgtgtcgagtcaattgcatgttggtgaagtggctgacaaattgaggtctcactctcagatgctagtatcaatccatcatatttctttagtacggacaacataccgtgtctgctattcccttatcctggataaaacatcttatctgtcgctaaaggaaacatttgaccagtttacaagcatgtgggttgacatgaaatctagtttgaaggccagggaaaatgatgattcacagtattacaagttcaggtcccgtatcattgatatacatgatatctttaaaggagacgtgccatcactttcagatatggatgcagaaggcaatgctgtagcagatactgaagaaaagttagagcaggattttcttaaaattatggagagaactgatgagaaaaatagtgctgttgaagactcgtgggatctcataccagaatctattctgaaatgtattgtaacaatacataaccagttatttggttcgccagaccttgttgagaagcctagtaaatgccaaattagtgatgacctgaaaattcaatcttttatggactcatatcaactgggagcaagaattctgaaggacttgccagaattgacatcttcaacatttgatgagaaactcatgcctgagcatctacttcgtgtttgtctggaatatcgacaaacttgtgcaccatctttagaatgcaacacctataacgcttacaaggatccaaacccttctatattgttcaaaatggttgagccattgactgcacttcaagaaaaagttagatactttttggacgagtggcctggtcatccaggtcttctgaaaatattagacataattacttcccttttggcaattcccctgagcactccactttcaaaggtattacttggattgcaacttttggttggaaaagcacaaacattgcaagaaaatgactccaagttcttcttaaaagaccatcttccacaattattcatcattgtgtcttcatggcaaaggcttgagttagaatgttggcctatactacttcaggaggtgctggagaagtacgagagcaatgctctaaaactatggtttccattgcgagcattactcacacaatcctgtgatatttcaaagaacgaggaaatatctataatcaaaagtgttgaggagtttgttcaaacatcaagcattggtgaattcaagagaaggttgcatctcctactggccttccatggtgaactttctgatggtgctggtgttggtgcttattcaagtaactcgttgaagaaaatccagaatattctgtacaacatgtttgggtactacatgcagttcttgccacttgttcttggggaaattgaaggtggtaaaggatcaatagaaaaggacttgaaagatcaggtcaagctttaccgttgggagcaagatccacacagtgcttctattgagaatttcaagaggacgaggcaaaaagtttttaagcttctgcagtgtttcaattttgttactaatagcaatcatgatattttgcaaaaacctgtgatggtcctgctaaatcaagaatctgtggcaagaaaagttccatgttggcttgatcaacagatgcctgaatcagagtttcctgttgaccttgggaaacttagcggaaggtttttgtggtacactaagtgggcaaatcaggccaaattgtcatttcaagctttacaacatacaaatgctactgatattggagttcataatgaagagtttgcgcgtgtagttttccacaatacaaactgccaacaagctgaaagtgaacttgaggacagattgtatttcttttgggctgcaattgagcggatttgcaatgcagctgattttggttctatactgaaaagtggtaagaagaaccagaagaaaactgctctatccaatttgttcaagacacttgaggaatgtggattatcgaagcacagaccaatgggtcgtgagggaaacgagttggctgcaccaagcccatttttagagcagtcgtatatcacgacacatttgctccagcaagtgatctcgaagaaaatgcctgaagatgctagcgttgctcatgctaccctcttgagcacaaataactggaaaaatgcaaatcagcagtacttcaaatgtttggcaatgatgcaacaacttcgacaaatttccttgaaatttaacaaagatcttggtttagaagaggttaatagggctacatcttttatggatcatcttttatccatcatgtctgaacaaagacattttgcttacaatatgtttgagcaattgaatgagtttcggcatgcaattttgttgttaggttctggaggtgatagtgactacctttcgtcatgccaaagtgtactgctgaattccatgtggcagcaaaagcaattttttgacaacatactggctacgaccatggataccaacttgctgctcagaagcttcatcgattgtcatcatgatccttgtgacaacatccaagtagaagtttctgcaatgtcaacgctttttgaaaagttcatcgcaagattttctgaatctaaggacttgttagacaaatacttactcggatccaattatatgatcgctggctcacacaagaatatgcctcttgctacaagagagatggagcaacttgttgctgcaaattgccagcttatcagcatgtttagggaggatatccaagttctatgccaccaggatgtttcgatgagatctgttaagaaagttctgctctctcggtttgaagagttgctggagaaggggaattcaccaatggcgattttatccagaaaagttgatgaagacaagcatatgctatcctccgatgtcctacacaatcttgaagcttcatatgcagaagcttttaaggaaatcttttcactggctgttggtgttgttggaaagctcactgatcagggaatatccaccgatggaactcatgattcattggaaggaaatattactttgtggaaagatattttgcagacatatgtcatgaaccttcaaatgggccatttgtttgatgctagtaaaaaacttactgtttcagtgaggaggctggtcgacattaaacctgagttgccttctagtatagggatgcagttaatgcatcttcatgctttgcttggtctggtcctatcagcagctgaaggcattctttctgaacttttagaagctcatagaactacatctgaaatgactcatgcacttggggatcttttgattcatctatttgcggaaggctttggttccacagatgatacaactgaagatgcttcagatggaccacagcaggatgcaactggaactggcatgggtgagggtgaaggcaaagagagtgcaagttctaaaatagatgatatatcccaacttgaggggacagctaatgaaatggatgctctacgtaagccagaccaagctcctaagaatgatgatgatgcagttgaaatgcaagacgattttaatgcagaactgtctgatgtttctgaggaccctgaaggcaatgattcaggcgatgaggatgatgacacgaacttggagaatcagatgggtgatactggtgatgcaagtgaaatggtcggcaagaaatcttgggataaggatgaagatgatgatcctaacagatccactgagaagtatgagtcgggttcatcagccaaggagacacagaagaatgatagggaactgagagcaaaggacgaaggtgctcttgaagaagatcccatggagacagattgtgatgagcaaggcaagaataataatttggaggatgatcctagtacttgtgaggatgttgatcaggatacgaatgacttaatggacaaagctgatgcctatgatgatcgaacagcacctgaactccctgaaccaaaggatgattctgaggatgtggatatggatgggacagaacatattgatgaaatggatgctgatggtgaagaactcagtccagaagaggaaaagctagcagcagatgggtgtttagatgcttcagacgatgtggaggatgtagatgcagctcaacatggtgacaatgagattgatggtgagcaggagcatgctgaagatggacagatggagacaaataacatggagaaagaacttcataatattgagtcacttgagcatccttcacaaggcatacaaccaaataatgccgaaatggactataacagagaatctgaatcaaacttggctaacagcactgatatgaacagtgctgctgctccttctgttaatttttcaagcaatgaagtccctagtctggaaatatctatgcccaactctggggatggctctaggttattgtctaactctaagccagagttgcagactgatactccaccatcgcagatcaaacagacaaatccttttaggagcattggagatgcaatggcggactggaaagaacgggccaaagtctcagctgatacgcaggatcatcaaccagaagctgaacaccatattgatgatgaaagtgctaccgaatttcgttatgtgccggacagtgagcagagcacctctcaggcactgggtaatgcaacagctgatcaaatcaacgatgacctgcaagtcaaacagtcttccatggaggatgaaaaccgtgtgcaaaaagaggaacacaatactgacagggcacctggagatgatcataatcttgaagtgccacatctgcaagcttcacaatcacgtaccaacaaatctgaaaatgccaacaaccttgagcatagagagattcaaactgatacatatgttcaggattcagttcaaggtgaaacagacgagacttttggagattttgtttcgttcaaacaacctccagcagatgaaaaaacagttatgcgggatgatttagccaatgacagggagttgtctactccgatggaaatcaacatcactgatgtagatatgaaaggtcctattgttgactggaaaagtgttgagctcacaactatgaagttgtcccaagaacttgctgagcaattgcgccttgtcatggaaccaactcttgcaagtaagcttcaaggagattacagaactggaaagagaataaacatgaaaaaggttattccatatattgcaagtcatttccgcagggataagatatggttgcgccgaactaaacctaataaacgtaattaccaagtggttattgctgtggacgactcacggagtatgtccgagggcaagtgtggaaaagtggctattgaagcattagttacagtctgccgggccatgtcacaacttgagatgatttctagtttgtcctttgagcaagacaacaaacttgaggatgaaccagttgctgatctcttgatgcatctgaacacaatgcttgatactgccgtggcacggtcacgtacaccgtcagggcaaaatccacttcagcaactcgtactaataatatctgacgggaagttccacgaaaaggaaaatttgaagcgttgcgtcaggaatgtccttaacagaaagaggatgatcgcatatgtgctcctagatggtcacgaggaatctatcatggattcactggaagtatcctatcaaggtaccaaactaaccatggggaaatatatggactcctttccattcccttactatgtcatgctgaagaatattgaagcacttcctcgtacattggctgacttgcttagacagtggtttgagctcatgcagagcgctaatgaatgatcttttggatgctcatcaaagtaaccggaggaagaatgccctcgcgcccatcactgtaatttgtgtatagaatactaccaaaattttgagtcccctaggcttctagctgcttacacactttgggttaacaactgttccaaggcctgagctgtgtacaaaatataccacatttcgttgtaaactgcatttgagaaaagcaagcaattttgtagctactactcatgactcatgagcgtctggaaagaaatttcctcttccc

SEQ ID NO: 4722 - DNA, 154 bp, Oryza sativa
  Clone ID: PAT_MRT4530_1157C.1
atggatgaaggcttcggcggcccatcacgcccgtggggcgcccctagcagcgtgccgacgggacagggcacacctgcccccattccgcctgacacagggtggaacgtgggggcactgccctccgtcccgtcgcctgttgaccggtcacaggccg

SEQ ID NO: 4723 - DNA, 174 bp, Oryza sativa
  Clone ID: PAT_MRT4530_11580C.1
atggctgccaaggaatgcgccgtgattgacacaaatgacaattccacggccatggcccccttggtttcggagggggtgaaaaccccgagccagggggccatacgagagcacaacacagcacagggcgctgcagtgcatgcattcgacgaccactgcctgcgcagcagccgctga

SEQ ID NO: 4724 - DNA, 395 bp, Oryza sativa
  Clone ID: PAT_MRT4530_11581C.1
ggtcgaacggaggctctttatatgtattagcgcaggcaaatgacgccgtaaaatgccctaaattcttagaatgccccgagctgggattgttttcacggctttatggacaggggttagcttagcccgaaaattacacgagtaaagtacagaggtggggttttggtaccagccatgcatgacatgtatggttcgcatgccccaggcggtttacaggcccctcctgtcctgttacagactcaccgaccggagctgttggccgtccatccgcagacatctgcggagagcaatccccttgcataaacaccagcagcttacgcacggcctccggagcggacgccactgactgcctgatcctgcggcagagctgccttgggctgtaagacagccaaagcact

SEQ ID NO: 4725 - DNA, 862 bp, Oryza sativa
  unsure (1)..(862): unsure at all n locations
  Clone ID: PAT_MRT4530_11582C.1
tcatggcgacgaggcggcggcggcggcggacatggcggagaggcggctggggcgcgggcggaaggcggcgcggcggcgctggtggtgggaggacgggcggatgagcgccgccacggcgcggcggacgtggtcgccgtcctccaccgccgcgatgcgcaccagcgagttcgccatcgccgacctcctcgcgtnctcgcgcagcccgccgcacgccgccgncacggagggacgcgacggcgacgccgcgccccggtgcagcgcgcaccggaaggagcccgggtgcgtggtgggcgagcacgcgcactccctcctcgtgctgcgcgcgccgaggccgccgccgccgcgcgacgacgacacgacggcgaccgtggcgtgggggagcgcgacgcggaaggcggacgggaggaggccgccgccattcggctggcgcgtgggcggcggcggcgagcgtgcaccggcgccggatgagagcctgacgcggcggcagacggagggggacgccggcgtcggcgtggtcgacctcgccatcggtccaagcacggcgtggcgtggtggcgcttcggttgcggcgcggccaaacctagcgtcgccgccgcggcgtgaatttataggcgggaagcgggtccatcactccaagcccaagcaagtggtctcttcttcttcttcggtgtggctgcctttgtgggccctgggccgaggcccacatgcattgttcacacttcagagagcttctagaagcattgaagacacaagactacctcaaaggaggagaataatgagagcctcaagtcctgtgatcttgcaatcaaaagatcttgtaagatcattgacaatctgcttacaaatgattatacactactag

SEQ ID NO: 4726 - DNA, 561 bp, Oryza sativa
  Clone ID: PAT_MRT4530_11583C.1
gtctagaacagatagtgccgtattacagaaatgaattgtccgatgacaaaacgcacagatgcaaaatacagtggatttgaaagagaaataactggtgtcgttcaagtttgcacattcaacaagaggtagaaaaggaaaatgaaaacgggcaatagagaactgaaatgccaaactagaatgcggaattttaatctagaaagatctacagatgttaaaatatatacactcagtttgagaacatacaagggagccgtaacaactatgagaaccaagtggagctcgggtgtgtgagagtacaatcagaaaagaaaaggatgtgcagcaaaagattatttactctatatcatcacctctttgctattggttataattggcctgagtattgtgttcccattgacaacctttgtggtcgcaacaaggaagtcatagcccatcccttccgcgaagctcctgaatgacaatgaatgctgaaatatcttacgcacgatgccggtgtactaaataaagcataagcgagtagtaattcctccacataagggccgccgccagggtgtgggaagc

SEQ ID NO: 4727 - DNA, 1316 bp, Oryza sativa
  unsure (1)..(1316): unsure at all n locations
  Clone ID: PAT_MRT4530_11584C.1
atgggccccaccgaccccccgagcccttatcccatcgtggaaacctgcgacgtatgcggtccacggcacgtccaggcggctgaccgcgaatggagctcctcccgcgtgtgggtgtggccgcccccggtcccggacgcggcggcgcgtcgccgtccccgacgcgccgtcatcgcgcgccctctcacccccgatcggcggcggtttgcggcgcagtcgccgtctgcagaggaggggctgtcgccaggaggagccggtggtcaactctgcacaggaactgctgaactggtcgactttaactgggaaactcttgggtttcaacccgtgccgactgactttatgtatgtgatgagatgttccgaggaaggggtgttcaccaagggtgaattggtgccatatgggccaatagaactgaacccagcagctggagtgttgaattatggtcagggtttacttgaaggtctgcgagcacatagaaaagaggatggatcagtccttctatttcgtcctgatgaaaatgctttacggatgagagtaggcgcagaccgtgataggcgccgtggtgcgcacatctttctcatgagctatgcgctccgttgcaggtaccccctactggcaaaggccgtttatgctaaagaaagagctaaggagagaggtcattctgatgttctttacttggatccagtgcataaaaagtttgttgaggaactttcgtcctgtaatatattcatggtgaaggttgaagagtgtcttattacaatagatgagttgcttgacgctgatgaagttttctgtactggaacttctgtggtactatcctctgttggttgcatagtgtaccaggggagaagtccagagaacgtcgccctgaaccagtacatcctgctctcatcagatggctgaagcagcaataaagaaattcaccgaattttctcatttcaggcagtatagaatagagaatcacctcttgtgcatatgcaggtacacacagtatacaaataatctggggcccagagatagagaagcatgaactgtttcttctgactctattacctttcttactgaccatacttccagtgtaaataagtgctccttgcttatccgaggccatattccgtgcatcaattcggcccataactttgtcgtcagcttgtctcatgtgtattcaggacaaaattattggcactatttnttggcctnttnggtgtgtgcgtatggnncnnngnnnnnnnnnnntttnnnnannnggnatcacggcaggcatgaaaccatgcttgctaagttgccgataatgaatttaatgactacagctcacttgc

SEQ ID NO: 4728 - DNA, 861 bp, Oryza sativa
  unsure (1)..(861): unsure at all n locations
  Clone ID: PAT_MRT4530_11585C.1
tgattataatagtgccaataattttgtcctgagtacgggttatacaagctgacgacgttcaccagggctgaattggtgccatatgggccaatagaactgaacccagcagctggagtgttgaattatggtcagggtttacttgaaggtctgcgagcacatagaaaagaggatggatcagtccttctatttcgtcctgatgaaaatgctttacggatgagagtaggcgcagaccggttatgtatgcctgcaccaagtgtagagcagttcctagaagctataaagctaacaattttagcaaacaagcgctgggtaccccctactggcaaaggttctttatatatcagaccgctgctgattggaagtggggctatcctcggtgttgcaccagccccagagtacacatttgttgtctttgcttgcccagttgggcactattttaaggatggcttatctccaatcagcttgttaaccgaggaagaatatcagtgtgcggcaccaggtggaactggtgatataaagactatcggaaattatgcttcagccgtttatgctaaagaaagagctaaggagagaggtcattctgatgttctttacttggatccagtgcataaaaagtttgttgaggaactttcgtcctgtaatatattcatggtgaaggacaacattatttctactccactattaacgggaacagttcttcctggcatcacaagaagaagtataattgaatacgcccgtagccttggatttcaggttgaagagtgtcttattacaatagatgagttgcttgacgctgatgaagntntctgtactggaacttctgtggtactatcctctgttgggtgcatagtgtaccagggg

SEQ ID NO: 4729 - DNA, 414 bp, Oryza sativa
  Clone ID: PAT_MRT4530_11586C.1
gtcagcgttacggataaggtatacctcatatcatacgacttatggaatatacgggtatggtatacctcctattctacgatttatggaatatacggatatggcatacctcccgtgaacgctgttggaatctgttacaaattatggaaaatatctccacgagtcaagtgatttcgaaagtcctgctcggtgtcttacttggatatcaagatgatccacggtataaaagggacccccagggaggggtgcaaggcatcgaatctcatcgccaacacacccaccatagtttacaaacccggagtatgcagagccaagtagccgggagatctcgtcgggtacatcgactatgatcttatcatcgttccaacgtaccccaataccctaatcatccggtctacgagtatcactcgtcaacat

SEQ ID NO: 4730 - DNA, 327 bp, Oryza sativa
  Clone ID: PAT_MRT4530_11587C.1
atgacgatgaacgaggaacgccgcaccgtcgaccatcgcgccgcctacgccgcggacaccgagatgccaacgccaggcagtcgcccagcgttctcggcggagaaacgcgttccgctgcgctccaccgctctcctccgaaacgccacccacaaccgcgcgctgaccaccgacaccacggccggcatctgcgccgctctgacctcggcttctagcgagaccaccggccagaggagcgatagtgaggcgcctcccccgcagccgtaccagctacctagagatcagtggatcctcaaaaatgacccaaacgacctcctgctacactactga

SEQ ID NO: 4731 - DNA, 312 bp, Oryza sativa
  Clone ID: PAT_MRT4530_11588C.1
atggcgcaaaaatactcctggtatattatggttacagagttcatccgcaagcgcacggatataccattgtacgtccttgtcatcaagactgtttacaagggttcggcacccattatttttgctcacatcgaatacgtccttgttgtcaagactgtttccaaggattcgttcgataggcgacttatcgaaaccgtgatagaagagacgatcgaacggctgccgttcgactgggacctgtcgaacaggtcgttcgactgccgccctatcgaacaagggcagttcgacaggagccagtcgaacaccgtcggttag

SEQ ID NO: 4732 - DNA, 301 bp, Oryza sativa
  Clone ID: PAT_MRT4530_11589C.1
accacgcgtccgaccacgcgtgcgaaaaaaaaatctcggacgactggctcgaggacatgcgtaccaagctttgaaaatccgacaggggagtaaggtccgccgcctttccaagtgcataaagttcagaaacggcgggcgcctctaaagaatctacgcttaggaacgcgcgaatgcaaattaattggtctttttttttgaaccttaaattaaataaaccgccgggggttccacaacgtaatgactgggaaaacattgcctttcccaacttatatgaattggagaaaatgcccttttcgacagc

SEQ ID NO: 4733 - DNA, 2953 bp, Oryza sativa
  Clone ID: PAT_MRT4530_1158C.1
caatcagtcccgtctcctcgcccgccgccctcgactcccgtctcctcgcctgccgctggcgccgatctccatcctgctagcagaggtggcgccggcgtcctcctgctcccgccgcattcgctcaccggtgagcatcctaatccatcccatccggtctcggtctcggcctcggcctcgaatttttcgtctcctcgcccgccgcttgggccgatccccatcctgcgagcagaggtggcgcccggcgtcctccttcttccaccgcatcgtcgctcgccgccgttatgaacttccaaatttggttccaaactctgaacttttgctcgccctactaatccccctcacaaatcacccaaaatccgaacgacgccgccgccggaatccgccaccgccgccgacggaagcaagggcaggtcaggccgtcgtcgggagggggggagaggagaggcgcatggcgaagctagggccggggcaggggctggggtgcgaggcggcggtggggctgctggcgccaagcaggaagagggagtacaaggcgtgcaacaagctcaccgaggggaagcggccgctctacgccatcggattcaacttcctcgacttccactactacgaggtcttcgccaccgtcggcggcaaccgcgtgacaacctacagctccctcaaggatggtaattttgctatcctgcaagcatatattgatgaggataaggatgaatcgttctacacactgagttgggcttgtgatcttgatggcacaccgctgttagtggctgcaggaagcaatgggatcattcgggtcatcaactgtgccactgagaagttactcaagacttttgttggccatggcgattcaataaacgagataagaactcaagcattaaagccttcgctcatcatttctgcaagcaaggacttccacccatctgatatctaccgcatagcaagttgtggcatggataacactgttaaaatatggtcaatgaaggaattctggccatatgttgagcaatcctttacatggactgaccttccatcaaaatttccaacaaaatatgtgcaatttccggtcttggttgctgtagtacattctaactatgttgattgtactagatggcttggtgacttcattctgtcaaagagtgttgacaatgaaattgtgctgtgggagccaaaaacaaaagaacaaagtcccggggagggtagcattgatattcttcagaagtatcctgtgccagaatgtgatatctggtttatcaaattctcatgcgattttcacttcaatcaattggcaataggcaaccgtgaaggaaaagtctttgtctgggaagtacagtccagtcctcctgttttaactgctcggctgactaatccgcaatgcaaatctgcgataaggcagactgccgtgtcatttgatggaagcgtggatttggatataaagaaaacaaaaattcttaaagatgaggtctcggccatcgtcatcgacgtggggtcctacagctgcaaggcggggtacgccggtgatgacacccccaaggccgtcttcccctcgttaacagacttatattggggtaatttgaattcttggagtagattgctaatttctctttgttgccgaggaagtgagaaaacatataatttagtgacatatagcaaaacaatcagctgtaaggttgttggttcaattgagcaaacgggagaaactgatgaagcaaaggcagacaaggaggctgaagctgcatcagattctaagaatggagccaaacctatggatgtggacaaagccaagacaaagcgcaaattgtatgttggtcaagaattggagttcaggagggatcatatggaggtgatttcaccaatgaaagatggaacagttactgattgggatattgttgacaatatatggaatcatgctttcaggcagcggctattgatcaatcctgaggagcatcctatgttgatagctgaaccatctacaaacacaggacagcaaagagagaaagcagcagaacttatgtttgagaagtacaaagtgccggcactgttcctagcgaaaaatgcagttctcacatcttttgcatctggacgtgctacatcgttggtagttgacagcggtggtgggtctactgtggttgctgctgttcacgatggttatgtattgcaaaagtctgtggcgacttctccaattggtggtgaatttttaactgactgtatgatgaaaagcttggagagcaagggcgttgttataaggcccaggtattcattcaagaagaaggaagtcggccctggcgaatataaggttgtagatcttgatcttccaaacacaacggagagttacaagttatactgcatgagagctattgctagtgatatcaaggagtcagtttgcagggttccagatactgccttcgatgaagtggcatatgcaaacgttcctacaacttcatatgagcttccagatggacaaaccattgaagttggtgcagacagattcaagattcctgatattctgtttaatccatctctttctcagactattcctggagttgatggatttgcagattcaatgtcagttcgtggccttccacgaatggtcattgatagtgtaaataggtgcgatgttgacattcgcaaggaactgctaagcagtattctgctttcaggtggttcatcatcaattctgcagttgaaggagaggctagaaaaagaagtacttgaggaatcttctggtaatactcgtgtaaaggttttggcaagtggaaattcagtagagaggcgattcagtgtttggattggagggagcattctagcatcccttgggtcgttccagcaaatgtggttctccaaagcagactcacaagttaatgtgatttatctcactatagatacgaagaacatggagtatcctacatccaaaggaagtgcccatgaagttgtggagcatcgctacgatttgtga

SEQ ID NO: 4734 - DNA, 621 bp, Oryza sativa
  Clone ID: PAT_MRT4530_11590C.1
atggtgcgcatggctagtgtggacccggagtggtcacacactaccggatgtaagcgggcccggtctagaagaggtgggacattacacagcgccatcagcaacaggctcttccatggcggcggcggcctcttcctcggcggcagcggcgccaatgacatcgtcctcaacggcggcggcggcggcggcctcttcctccgcgacgtggagcgcatccccacccccaagatccccgccacgcccgtccaggcctcctagatgctgttcgacgtcgccgagtcggcgcggcgtggcgcggccggaggagcgcaccaccggggcggtcactcctatcagtgctaattcctctggtgaatgctgctgctgctgaaatttctgcctaaatagctcttgttgctgctgtgtgatggatgctgctgttgctgctgctggtggtggtgaatgctgctgctgctgtgtgatgatggatgctgctgctggtggtgaatgctcctgctgctgctgctgatatgatgcaggaattcgtgctgctgctgctgctccttggagctcggacgccatagagtcccatatgaatatatatatatgacactcatatggggcaccatggtgcccgggcaccat

SEQ ID NO: 4735 - DNA, 720 bp, Oryza sativa
  Clone ID: PAT_MRT4530_11591C.1
atgtggggcccgcgtatcttctttttctcctttcttctctcttttcttttctttcctctcttctcttctcttatcttcaccagcggcagaaaggggagaggcggccggcgagcctggccaagctctgcaagcctcgagcgccacgcaacgagaggagggaatgggggagaggggaagtggccagcgggagatgggggaagggagaggcgcggtagggcggtggggaacaaggggcgtggtgcagcgacggggacgatgaggcgatggtggatgggggtgcggggcgggcctatagagctggccgaagtcggcccgtgcgggaagcgcccagaagccctgggtgggggcgtcggtagcgggagcgagcgtgggggaggtggtttgtggttgtcggtggcatggaggtgcttgccgaggatgaagggggcggagcaggggaagaggaggtcattagagtggagggagaaaggtgaggaggtggataaggaggccggggtggtgatggtgctggtggcggggatgatggatggctcggccagacggaggagccagtcgatggtctggccgtcaaacttgtggctgagatcgcagatgatggggcatgcggatgcgacggccatggtcgatgaccttgctgtggctatccttggagggaggcttgcggacggtgaggacggtaccatcggtgttggaggtggcggggacgaggtgcttctctag

SEQ ID NO: 4736 - DNA, 1434 bp, Oryza sativa
  Clone ID: PAT_MRT4530_11592C.1
atgtctcagcaaggttatcaaaccatcacagaaaataattatattgcacatctaataaaaattcaccttcaaaggatatcaatggaaaaacccatagaagcgcaacccacgggtgacaagggtaaggaaactcaggccgtcgtcgaggaagatatttgcacgcaagtagtcgcggaggaatcgtcgttgtcaagcttcagtgaagcagagagtggatcgtatcactcaccgagtgacccccatccttctcttgcaaggaagagaaagggcgggagcaacaatgaagaagttgactccgactacagccctcgcgaaccggtgactatgggcaagctgtggcgaaattggaaaacagacctgaataggaaatatgtccagaagggactcacgccgtataaggactacgtaaggataatacaggcccagagggatgagttcgttgccctgaagacattggccgaagaaaaggagaagagccagaagatggctgaactagcaagaaggaatgaacatcctcatcatttgggatcgaccggttaccgtcaagcgatgaagaaatggaaaaaacaagatgaaaatatggagaaggcttggaaagaggttcctatgaaaaaacacaacccacgaagcaggaaatggcaacaatcagagctagcaattcaagaagtgtctcccacacaacaattagagactgcacaatcagagcctaaaaagcaagcggagggtgaaattgaagaggtgcctgaacaggcaatgcccaatcaaccaaagccatcgcaactagagcaatcgcaaccagaggaacctaagggtgccaatgtgccagtgatgaatggcaaaccattcatgtacgactggcaaccaacagaaggaccgtggcaattaaaaaggtggcatgaatggtacatcagggcaagcaccatcaaaggcattacatcatttacagttgccgtgcaggagaacatcttctggagtgggccatgcctattccaagtccatttctccgatatgcattccctcttccgtcggaagaggctggacaccaatttgatcggcatctggtgtctaatgaattatgtggaagccgaagtgatgagaaagcctgtcggctacctaaacccgtgcaggataagtaagtcgaaccacacctacacgctagacgagaagaagctaccggcgcacattaaggcgatgactcccaaagagaggaaagaatacataggacaaaggcatcaggaaaagattctcaatgtggctacttgcgtagctatagtgcttgaatctatgcaggacaaggagtgcgtttatgccccatatgcctttgatgcatttaaaaggtattaccagaaaggcagacaatggaaaaactcaagagaacgcatactcatccgcaataagtggccgtgtcacaagcaaccgatgggaccgtactag

SEQ ID NO: 4737 - DNA, 633 bp, Oryza sativa
  Clone ID: PAT_MRT4530_11593C.1
atgggagaagggaaaggggaagaggaggcagccggcgggaaatccatactgagccagcggaacgccgccgctgtgacccacccgaacagctactggcggtcattgaaggagggggtatgcggagtggcagcggagggtgaggtgggcattgtgcctcgtcaattccacggtggtggcagtagtggcaccgctctagagaagcacctcgtccccgccacctccaacaccgatggtaccgtcctcaccgtccgcaagcctccctccaaggatagccacagcaagggcttctgggcgcttcccgcacgggccgacttcggccagctctatagcttcgtggttgtgttggagatgatggccgccgcagcagccgcgcccgccatgcctggggaggcgtccggaactacctccgtcgcgacgcacgcccgccccgcacccccatccaccatcgcctcatcgtccccgtcgctgcaccacgccccttgttccccaccgccctaccgcgcctctcccttcccccatctcccgctggccacttcccctctcccccattccctcctctcgttgcgtggcgctcgaggcttgcagagcttggccaggctcgccggccgcctctcccctttctgccgctggtga

SEQ ID NO: 4738 - DNA, 1368 bp, Oryza sativa
  Clone ID: PAT_MRT4530_11594C.1
atgtcgccgtcatcgtcgtcgtcgctgatccacggcatctccatctccgtctccgacgacgaggaggcctcggggagggtgcgggtccgcgtccgccgcaagcgccaccgccacccggcctccgccgcgcggcgccgcctcctccgccgcgccgcgcggctgtgcgccccgctcctcctcgccaccctcgccgtctccctcctcctctacgagtcctaccgcctctccccgtcctcccccacgccgcctccggcggccaaccttacccgcgtcgaccacaccggcgccgtccgcgccgccgatggcgcccggaagccatgcttgaagattcttggtcctgagaagttgcagaatctggaacttcctgaagttcctgaacaaaatctgtcagtccagaaagtggtgtacaagtccagtctgctgcatcttggtgatgatgattcatctcgaacagagatatcacgttttaactcattcacaggataccagactctaaatgaaagagaagaaagtttcaagatgaaggaactcacaactttgcattgtggcttctataacgaaaatggagggttcaaagtttctgatgttgataaagattatatgaggtcttgtagtgtcgttgtggccacttgtgcatttggtggaggggatgaccttcaccagccaataggaatgacagaagtatctataaagaaggtttgctatgttgcattctgggatgaagtcactcgtgcagctcaagaggaggaagggaacaagattggtgaaaacctcatgattggcctttggcggattattcttgtgagagatcttcctttctcagatcaacgattgaatgggaaaattcccaagctgataagtcatcgccttttccctatggcaagatactcaatttgggtggattcaaaatctcagtttcggagagatccacttggagtccttgaagcccttctgtggcgttcaaactcttctttagcattatctgaacatggagctaggagtagtttgtatgatgaaggtaaagcaattgttaagaagcacaaggcaactccggaagaagttaaaatacaattggatcaataccgacaagatggcattccagatgaaaaacgattcaatggaaagaaagctctcgcagaagcttcagttattgtgagggatcatgcccctttgaccaacctcttcatgtgcctttggttcaacgaagtggttaggttcacgtcccgggatcagctgagcttcccttatgtgctgaggcgtctaaggatgcctggtgtccacctgttcccggtgtgcgcccgcaaagaccttgttaacagcttcgggcataggcgcaaggcgaagcctcttgccagggagcgaagatga

SEQ ID NO: 4739 - DNA, 375 bp, Oryza sativa
  Clone ID: PAT_MRT4530_11595C.1
atgggcccctcgccggcgcgtgccgctccaccggccggccccgagctcctctaccttggctgccgccggcgggcgctggatctccttcgcgccccggcaactccaccctccgccgccagcacgcctcctcatccccatctcgggtcgctgccagcagtggctcgtgctcttccacaaccttcgtgcgtggcgcgggtcatcgtcgggtcaccgacgctgccctgcggtcatccgcgtcaggcgccggagcccgccgctcctcacggcgccgaggtccacgggctaccatccaccgggttcccaccgcagacgccggtgtcccgacatggggggcttgtaacgcctcgattttcgttcggggttaaaattcattaa

SEQ ID NO: 4740 - DNA, 327 bp, Oryza sativa
  unsure (1)..(327): unsure at all n locations
  Clone ID: PAT_MRT4530_11596C.1
cccacgcgtccgcccacgcgtgcgattaaattttctaaattacaagcaaatcaaagctcatcgaagtatagctatggcattggcatcagacaagttcgtcctctccggcatcgtgctcgccgncctcaccgtctcggcagcggcggcggactacggcggatacggcgacgtcggcgagtactgccgtgcgcggaaggcggggacccggaacccggtcccatcgtgccggaactacatcgcgcggagaagcgccgtcaccgtaggactgactgcactccgacgagcgatcgtcgcggtagctcctggatccttgctggcgtgagcttg

SEQ ID NO: 4741 - DNA, 1729 bp, Oryza sativa
  Clone ID: PAT_MRT4530_11597C.1
aggtcaaaatcgaatggcatatgacatccatctgggtaacaagctgtgcagaatacataacagcaaagcaatgataattttaaggcagaaaacaaaccacgaaagatttttttactacatgcagttcacatgtacgacagaatcacaatgtgcaccagcccaggctcacagaagtacagaacatgtcgcttaatcaaaacacctcataagcagtcaaaatctggagaactacaaatcacaatctctattgacataacccagacatgctccggaatgcagaagcatcacctcgttcgacggctttgatcagtctcgaaaaccatataatagattggatctcactgttgctgctgcggctgctgagctaggggttgttggtagttgggataaccagcataagctccatacccgtacatattagggtcctgaggttgagcatacccataaccctcatatccttgcccataaccgtagtatccagcattagcaccaccccactggttggaatcctgttgaggctgagcttgtctatttgaagggctgcggccccatgaaagcctcacattctgtcctccaatcaaggtaccttgtagaagtaccaaagcttcatctgcagaagctctgttagcaaattgaacaaaaccacatctttttccaactgggatcttaacatggaccacatctccatagggagtgaaaacttgtttcaacatatcgtcagtgacactgggatcaaggccaccaacaaatatagtggtattgctaggatcactgtcagactgaactccttgagcactcggtactttctcttgaactccagttgctttcttatttgcagctgggccgatacgcataggtcttgaagaacaaaccatcccattcatttctgtcattgcacgggcttgctcggaaggatcaccaaatttgacgaagccatagccctttgaacgcattgtcattttatctgtcacaacctttgcacccttcacagatgggtaatgtaccctgaacgtctcttgcaatatgtagtctgtaacatcagcagccaaatcaccaacaaaaattgtgtaatcaggggtatcatcacgtttttcaccagcagaggcccaattcaaccggtatgtctgctcaacatttggcatcattgccccattgtatgtttgaagaactctttcagcaccagcatgggatgtgaattcaataaagccataaccctgaagttgtccagtctgcttgtcacgaattagcttcacagattgtagctcgccggtgggcgcaaagcaggcggagatgtagttctcatccatccagtactggagatccccgatccagagcgtcctgacctcgttgggccccgcggggacggccggggccgcctgcggcggcgccccgtagtaccccgcctgggccggcggcggctggccgtacgcgggctgcggcggcgggggagcctggccccacatctgcggcggcggcgggggagcctggccccacatctgcggcggcggcggcgcgtactgctgctgttggtgcggcaccgggggagggatggcgccccactgcggcggcgcgccgccgcccccggcgacccccgcctgcgggggcggcggcggcggggccatccctggctgcggctgcggcatcatggcggcggcggcgggaggggtatggggtggcgccccgggacgaaccccctaggcgaggaggaggagggattagcctcgtgccg

SEQ ID NO: 4742 - DNA, 1147 bp, Oryza sativa
  Clone ID: PAT_MRT4530_11598C.1
gtctcgtgcgctacccccttttattattgccgaattcatgtttcgacagatgacgcgccaggtaggggtgcgtcgagtttccgcgcgtcatccaccgtcgcagtgggctgcatcaccgccgcaaggaggacggagggcgcgtctcatcagagcgttgagcgcctgccagatcgagatatcgcgccgatcggtcgtgtgctgtttggacttccggatcggcgagcagctacacgtgacctgcagcaaccagccgccggcacatgatctccgtcgacgtcgcttggtctaattcaatccggccgaccacctcgatcaatctacatccatgcagctacgaaagttcacatgacaagatcgctggagatgtacaggatgtgtcgattcaaccgccatgcatggattaattaatccagccatacatgcattcaatcgctgagatttatacatttaatttgcctccgtctcggagtcagtttgatcgaggagatcaatctcatttctgctgtctacatgtaataccgcggcactattgctaccgactggtgtcctcgcttatacggttggttggtcacactaccgtttatgagcgtccacgacttcaccgaccggctggacttcgccgccgccgactggtgtttccgcctgcacggctggcctattatgccaccgttgttgggcgtctacgacttcaccgccggcctgcctccgtcgccgccgactggtgtcctttcctatacggttggttggtcacaccaccgttcatgggcgtccacgactgcaccgaccggttggacttcgccaccgccgactggtggttccgcctgcacggctggcctattatgccaccgttgttgggcgtctacgacttcatcaccggcctgcctccgtcgccaccgactggtgtccttgcctatacgcctattatgccgccgttgttgggcgtctacgacttcaccgccggcctgcctccatcactgccgactagtgttttcgcctatacggttgacggactccgccgccgttgatgggcctcgtcatctacaccaccggcttccgactggtgtttccactgttattgatggacaactttgttcccacattggtcacctctgccatcatctaggggaatattacaaagctaagtcat

SEQ ID NO: 4743 - DNA, 182 bp, Oryza sativa
  Clone ID: PAT_MRT4530_11599C.1
atggcgaagaagacgacgttatcatcttcccaagatcgcaagagatcgcaggcaacaaacgcggacagctcctgttcggggctcgccgtcgccgtcgccgtcgcgtcgcggggcgatcgtgttgagtgggatatggtggcgttggagacgatggggattgggaggagcaccagcggcatgag

SEQ ID NO: 4744 - DNA, 1596 bp, Oryza sativa
  Clone ID: PAT_MRT4530_1159C.1
atggcagacggtgccaacaacgacgacgtttggcgccggcgtttcgaggaagtcctggaacgcctcgacgcgctcagcggccaaatcactgatctcgatcagcagcagcgcgatcagaacatggtcatcaatcgtctggagcgtggggctcgcgcacagtcccctcatttcgacgacgtaagtggcggtggcggcctcggcggaggccgtggcggcaactacttcggccgcggcgatccctttgctcgcggcggtgatggctttggcccggacggcggtcggagcggcttccacggtcgattcggtcaccgctatgatggtgatggcgagcgacccccacgctaccacaagctcgacttccccaagtacgacggccgcgacgatccacttccttttctcaaccggtgtgagcaattaatctggggacaacgcacgccggaagatgacaaggtgtggctggcctcctaccacttgctcgacggagcgcagcagtggtatacgtgtctggagcgtgaccatgggccgccctcgtggcaccgtttttcggagctcctcaacatgcgctacggccccctactccgttcagcaccgctgggcgagctcgcggcctaccggcgcacgtctacggtggacgactacaccgaccacttcctcgacctgctggctcgcgcgggctacctctccgaagatcagcaggcacgcccccggcggttaaccgcgccatccgccgtctatcgccgttggagatggacgagcgcccgccgccaaggcctgtgtttcaattgcgacgagccgtactcccgcggtcacaaccgcgtgtgccgccgcctcttcttccttgagatgggggaggacgacgccgacactgactccaccgatgacccggcggccgcacccgcaaccctccggatttctctgcatgtggcgaccggagttcgcgtgtccgacgcgatgcacatcatggtccacctcggcgacactgacctctatgccctcatcgactccggttccacgcctacgttcctgtctcaggatgcggcggcgcgtgtcggccgggatcctcaacctcgttcgggcctcaacgtcacggtggcgaacggcgacaaggtggcgtgccccggcgtcttccccgacatgccgttccagatcgccggcgaggaattcgccacggacgtgtacgtcctaactctgggcggctatgatctggtactgggaacacagtggctcgcgacactgggcccgatcctttgggacttcacggcactgacaatgtcgttctggcaccgcgaccactgcgtcaccctccacggactgccggggcaccagcggccacgcgccctagcgtgcggtccctcggcgcacttggactcgctgctagaggagttcacggacgttttcgccgagcccacgggcctttcaccggtccgggaccgcacacaccgcatccagttactacccgggtcggcgctagtggcaatacacccatactgttacccggctcgccacaaggatgagttggagcgccaatgccgtgtgatggaggagaacggcttaatccgccggagcacgtcggcattctcctcgccggtgctgctg

SEQ ID NO: 4745 - DNA, 3987 bp, Oryza sativa
  Clone ID: PAT_MRT4530_115C.1
atggctgtggccgctgcccaagacctcccgccgaccttccatcccaacccctcgcctttgccttcctccatggagccgcgcctccgccagctccgcagggttccgctcctcgacttcgtcgcccgcatcgccgacctccatgccgatcaggccagccccgtccgcaagctcgtcgccgagatgattggtgaggttgggtcaaaacacatggcataccttcccaatgtcatgccttgtctgcttcatcttctcaacgatgacacacctgcggtcgcaaggcaagctattaaaacaggaacaaccttgtttgccaaaggcttgttctcaagtggtggcattgatgattcattaaaattatcctgggaggcactgctcaagcttaaatctgctgtgtcacacatggcctttcagccgatgagcaatgaaggagccaggttactggctattaaatttgttgaaaaaacagttctattgtacacccctgatcttgataccccaccggatccaccaattgaagttacagaagatatgggattcaatgtagcgtggctgagaggaggtcaccctttgcttaatgttggagatctggcaatggaagccagccagaaccttggattgctgctagaacagcttaagcctcctaaagtaaaatcactcagtacttccatgatcattgtctttgttactagcctctcagctatcgcgcaaagaagaccttcattttacggacgcatacttccagttttactttctttggatccagcaagttccattattaaagtgcaagtcccaggtgctttccatgctttgaagagtgcctttgctgcatgcctgaaatgtacacattcaagtgcagagccgtggcgagctcgcctattggaagctcaaaatattatcaaccaggctgattcgatagaacattcttcaaacagggtagaatcattgcctctggagacaacaagcacagataacagtaacaagcgtaatctgatcgatgacatcgataatgcgccagaagatggtgatcgttccaacaaaagaattaggcaatcacatcatgatcaagaacatactgaaaatgtaaagaataatgtggagctaacctctgctgataccccatctagcccgtccaactctgcaagtactggaaattctgaagctgtatatcaattagttagtatgtttgctgcattagccgctcaaggtgacagagcggctggatcactgcaaatcctgtcatccagtattgctgctgacttattagcagaggtggtaatggttaacatgcaacacctgccagtttctcatcctgaagtagaccaacaacaatctccttcagctggccagccatctggtgctccgagttcaagtcttctttcagcatgctttcctctgttagaatctttattgaagagaataaatcaaaatgatcgagaggtcgatgaagcacctcaaactatagattctgctgttgtgccatctgctgctggtgaaactgcagcaattcctgccattcctggacctacctcaagaaatgtacctatggaggagaatagtaatagttcatcaattccatctgatatggaaactatagaggctaaagaacccactgcagatgccgctaggttatcaattgagattcaagaatcatcagaagcttcccatgcttcaacagaacttcaaggaacccaagagcatggtggcagttttattagttcattgcctgctgataattcctcagctggtcttagtttggctcaatcttcagaaactcgtagtccaagctcttctatggtggaagcaagtcagactcagttctcatattcaagcacacttacttcacagcatgtgcttccaaagttggttgtgactaatattgatctcagcgatgaggctaaagatctacttcaaaaagaagcatttttgcggattcttgattgtgataaacaagatgcatctggtggttcaatagctcgtcttcccttgcttgctcacttgggtgttgagttccctttggagttggacccttgggagcttctccagaagcatgtactgtctgattatgtaaataatgagaatgctacctatctggtagactggcagcgaaagatcatacttgacaactaccatgacaattacaagaacatatccccaacctccattgccaaagctgaaaatcttcgcgatatgtttccggcttcagataaatcacttggaaaattactttgtgagataccatacttaccagagggtgtattgaagttgctagagggcttatgttctcctggaagcaatgagaagcaggacaaggatctgcagagtggtgatagggtaactcaaggacttagtgctgtctggaaccttatcatgttaagaccttcaaatcgagacagatgtctggagatcgctttgcaggtagcaaataagctatttcctatggcaagcatttcaaaaaggattgaagattttgcaaatgaaaaacttaattcagttctggaagtagttccagctgatgaatcagcagcttctgaaatgtctactccagaagcacccaaggatggtggttcagaaaatttatcgtcttcagtagcagattctcaaactttgatgtcactctattttgctttgtgcaccaagaagcattcccttcttcggcatgtatttgcaatatatggaagtctaccacaagctgccaagcaggcagttcatcgacaagtacccattctgatccgcacaataggctcatctcccagtcttcttgggatcatctcagacccaccagctgatagtcgggacctactgatgcaggttttacagacactcaccgatggagcaatgccatctcaagatctgatttcctctgtaaagaacttatattctaaaacaaaggatatcgaggtcctttttgcagtcttggctcatctgccaaaagatgaggtcctccctgtttttcccagtattgttaatcttcccttggataagtttcaagttgcactttctcgaatcctgcagggatcaccgcagaatgggccttctcttgatccatcagaaattttgattgcgattcatgtaatagatcctgagaaagaaggaataccactcaaaaaggttattgatgcctgtgctgcttgttttgagcaaaggacaatattcactcaacaagttttggcgaaagcactgaaccaactgttgttgggtcattgctcaagctctacttttcctcaggttgaacaaattccacttccgttgctgtttatgcgaactgttatgcaagcaatcggtgcatttcctgcattggtggactttgtgatggatatcatgtcacgtcttgttagcaagcagatatggaagtatcccaagttatgggtaggattcctgaagtgtgctatcttgacgaaacctcagtcatatggtgtgctgctgcagttaccagctcctcaacttgaaaatgccttgaataagaatcctgtactgaaggcacctttggttgagcacgcgaaccaacctaacgtacgatcaactcttccaaggtctaccttggtagttttgggtcttgctgaagatcaacagcaacctgcacctcaagcacaaagtagccaaaatcaggctgcagaaaccagcagttcagctgcagatactacgacagaagtgacccaggaatcttccgctgttagctaatcttcttcggcagccgtgaatgtgacgtcccaatcaactattggttacttccctttctgtattagttatatgccggaaggaggtgggcattgaagttcaagatgggtctggaatagacccttgttaggacttaggacttggataattcattgtagctgggcagttggataagacatattgtagctgggcacgttggatatgtagtatacagttttaccttgactagggaaatgggaagattcttagccgtcttttcatctttggcggtctatattttctaaaatttttcattgaaaaaaaaaaaaaaaa

SEQ ID NO: 4746 - DNA, 130 bp, Oryza sativa
  Clone ID: PAT_MRT4530_11600C.1
aaaggatgccactaaccgaacccttttaactatggttggacttgataattccatatagcccatgggctgatcagcaaaagctgctacacattacagggaaaacaagggtgttccaggcttggcaacacgg

SEQ ID NO: 4747 - DNA, 1031 bp, Oryza sativa
  Clone ID: PAT_MRT4530_11601C.1
tcttgaatctgctgccactgacttcttccagaactactactactactaagctgtttattttttgttgggcagtacaatcctacaacaagatgaaatggttacttaatagagcgggattctattggccaaagatggttgatgattgttttaagtacaatagaggatgtgaagcttgtcaacaattcggcaatgggcatcggttcgtgctagttccaacagattacttcaccaagtgggccaaagccgtgcaactcaagaatatgactcacacggaggtaattgactttattttgaagaataataagcatattattcataggtttggcattcctcaaactttaactacggatcaaagagattcttttatgtctaaggaactgaaaagctttgcagaatcttatgatattaaattgttaagttcttctccttactatgctcaggctaatggacaagttgagtcaagtaataagattttgttgaaattagtcaagaaaaataatgagggacatccaaagagatggcatgaggtactctttgaagcgttatgagctcatagaatatctaagcatggtggtactaaagttactccttttgagttaatctatttgcaagaagccgttttactagtagaggtaaatcttggctctgttagatatatcaagcaagatgatttatcggccgaagaatataggacgttgatgggagacaatcttgatgatgtgaccgataaacgtctaaaggctttagaggagatagaaaaggaaaaaaagagagtagccaaagcctatataaaaagagtgagagaaaaatcatttcaagtaggaaacttggtttggaagacgatttttcctttgggttctagatgtaaggacttcggtaagtggttgcctagatgggaaggtccttatcggatatgtggaatcgttcgagggaatgcgtattttcttgaaactttgcaaggagaatgattttaaagagcaatcaatgggaaatatttgaagaaatacttcccaagcgtctggcaagatgct

SEQ ID NO: 4748 - DNA, 648 bp, Oryza sativa
  Clone ID: PAT_MRT4530_11602C.1
acccgggatccacaattgctgaaattccctaaggcgatcgggtaaatcgagtgtttgcgtagacgacattgctccgatgaatttgacgggggttgggcgaatcaaggttaaaataatgttaaggcttgctgattattaactcaaacttgtcgaccctgtgtggtccaactccctgggaaatctcctggggagagtatcgcttttacctgtccctagtaaaaggagcaaaaatcattaataaccattaacattaattaacattaatcccaaaaacctgcaccgatacagaaatgtctgctacaagataaatacgggattttgacaagctaatagctgatactatttttcccccgttaattggcaattatcggcttttttggtcgttttttctgttttataactagttagtgcaaactaccctaacaccctccccaaaactatgaatgccgtcgccgctctgcccacccccaccattcacaccacctgtgcccaagacattcacgatattgaattgccccagtggttagaggattgtttacagcagtggcagagggagatagaacagggccaggaccaaacaacggcgccccattgtctaatttgtcgagcgttctgtttcgcctacgatcctctagagtcgacctgcag

SEQ ID NO: 4749 - DNA, 149 bp, Oryza sativa
  Clone ID: PAT_MRT4530_11603C.1
ttgtccgccgccgtcggtgtgctgctggtgggggcttcgctggccggtgtggctcgcggtaaggacccgtacgtgttctttgagtggaaggtgacgtacggtaccaagacccttctggacgcgccgtataaggtgtatcctgatccaac

SEQ ID NO: 4750 - DNA, 308 bp, Oryza sativa
  Clone ID: PAT_MRT4530_11604C.1
cacgcatcagtcgacagggacagaacgtagaccatctggttggttaactgtgataggcgactgcaccgtgtacaggctcaaacgaggcatgctagacggccggtcggtcttacgcaccggttcaacgacgggcgctccgctgtgcgggagcaaccctctactgacctggaacctttaaaggaacgggtggatcacctgcatgacgttgccggacgactggatcaggagggccctgtacgtgaacagttgcaagatgatcggatggatcgcgccaggcagcgtactgaggaacacacggacacagactg

SEQ ID NO: 4751 - DNA, 1278 bp, Oryza sativa
  Clone ID: PAT_MRT4530_11605C.1
gggctgcaggaattcggcacgagggagagagagaactagtctcgagtttttttttttttttttttttttttttttttgggcatgaatagctttgattccctgtgtaattgatactaccttggttttgctatgtacaaatgggccccagaaattgtagctggggaggcattacattggagagctagtcatgcatttcctttttgtgcctttcaattaagtacagcaataagtagcgctccacaataatgcaggggccctaattctcctgtaatggcttgatgggacaggttatgtacaatgttttttttttctttttggaaagcgcaggactgtacaatgtgacaactatatcaatgtaaattcttgaagaataccggttttccagctcgttgtaacttctaaattaaccatatttggaattgccaagtcaattgtatcctcctcaggtgtgggaagaaattgatggcatgaatgtgaaatttgtatattagaaagaatgatctggctgaattaatttgataagccagtagtttcagaaacagtttgtatcgtcgctgacaacttcttccggatctctagctcttgttgtctcttgagataactttgtgctgtagaagtaattatctgaacgatgaagttcatgatcaaaagccacaccacggtattccagatcaaagagaatgatagattccacttcgtttccttcacaacacttgatgctgatgcagcaacactggatgataaaaacttgctcttggctgtcttcaacttggcaactaaagagggaaggacggatgataccataggaacattgccaaatacccacataattcttttctccaccaaatcaagaagttggttattgcagagagtaattactaatgttgtctggatataaaccttaataacagcctttccaattaaagttgctagaaagaacttccagaatgggatgttaaattgcccacacaaaatgccagcaagatcgaagagggggtttggcaccgaagcaagtaataagatggtagggaagttaagatactgtgagtgagacataagccatcttttagcccgatgcagagttgaggatagaaaaccttctcctgaaacggaagcatccaactcttccagctcatctagtttgcgtcctgacatgctagctgctctcgagaggaaatatggaggaagttctccaagtgcagttccaatgccccagagaacagcttcaaggtgaacttcatgcagtattttgctaaatggaattgtttcctggtacat

SEQ ID NO: 4752 - DNA, 331 bp, Oryza sativa
  Clone ID: PAT_MRT4530_11606C.1
atgtatggcaagaaatattattcggactataaccatgcgttcatcccccacaggaaaacctagggttggtacaaaaaaaaaaagcattttttttaccgggtgaaacggaaaggacaagcaacgcgaaaaggttaccaaaatgccccataaaaggaggggatgaagggccccatcaggaccatttttttataaaaaaagtttgaaacaaattcgccccaaactccccatttcaaagctaaaggcgtcccccacctggggcctcacgctctggggtttttttaacggccaaaacgccccaacttttttataaaaaggggcccaaacggggggg

SEQ ID NO: 4753 - DNA, 897 bp, Oryza sativa
  Clone ID: PAT_MRT4530_11607C.1
gagggcttcttctacctcgcatccgatcaggaattcaggatgcagcagtcgatcatgtcgacgctgccccttctgctgctgcttctcttctcctcgctcttccctgctccctcgcacgcctggggaatccatggccatctcatcggccggctgagcgacgcggccgccgcggcggtgaggggcctgctgccgtcgtacgccgggggcaacctgagcagcctctgctcctgggccgacggcgtcaagctcaggtacccctggtcggcgccgctccactacatcgacaccccggaccacctctgcagctacacctacgacagagactgcaaggacgaggatagcttcagggggaggtgcgtcgccggcgccatcaacaactacacctcccagctcctcacctatgatgcaacatccccttctactcaatataacctgacacaagcacttctgttccttgcacactttgtgggggacatccaccagccgcttcatgtggggtttacctccgataaaggaggaaacaccattgatgtgcactggtatacaaggaagactgttctccaccatgtttgggatgacaacatcatcaaaacggcagaaaacgactactatggggaaggcgtggctgaatttgtcgatgcactgatgcagaatataacgggagaatggtcacaacgagtgccaggatgggaagaatgcagcaagaaccagaccacatgcccagacacgtatgcatctgagagcatcgctgcagcatgcgactgggcgtacaaggacgtgacagaagattcactcctggaagatgcatatttcgggagcagattgccggttgtgaatctcaggctagcgcaaggcggcgtcagattagctgccactctgaacagaatattcagttaa

SEQ ID NO: 4754 - DNA, 1178 bp, Oryza sativa
  Clone ID: PAT_MRT4530_11608C.1
gcggtactcctaccaactcttctcgtcgtggcggtggctttgtccggtcaccggccgctgcatctccctttgtgtcttagttagtttaatcccatttacaaatcttacgtggtgaactgatcaattattagttgagctgagctgagcttataagtagcagctgctctgatctgctcagctcgcttcatcaccttccactcagtcaatcgcagcgagaagccaagaagcactcaaccacgcgctgttcgtcatggcgagggtacagctctgggtggccgccgcgtgcgccgtcgtgctcgcgctcgccgcgccctcgctcgccggcgaccccgacatgctccaggacgtctgcgtcgccgacttggcgtccccggtgaagctgaacgggttcccgtgcaaggcgaacgtgacggcggacgacttcttcttcgcggggctgaagaaccccggcaacaccaacaacccggcggggtcgaacgtgacggcggcgaacgtgcagtcgttcccgggggtgaacacgctgggcgtgtctatggcgaggatcgactacgcgccggggggacagaacccgccgcacacgcacccgcgcgccaccgagatcatcttcgtcctcgagggcgtcctcgaggtgggcttcatcaccactgccaacaagctcttcaccaagactgtcaccgccggcgaggtcttcgtcttcccgcgcggcctcgtccacttccagcagaaccgcggccacggccccgccgccgtcatcgccgccttcaacagccagctccagggcacccaggccatcgccgccacgctcttcgccgccgcgccgcccgtgccgtccgacgtcctcgccaaggccttccgcgtcgacgtcccgcaggtggacgccatcaaggccaagttcaagtgatcgtagccggccgccgtcgatctcccatcattttctgcattttctttcatcaacaaaaccatctgatctactcatttgatttggttacggaataattttagtggatactgtctgtagcgtgcagttgatttcttccgtttgtaaatctgtttgcatttgttaatttgccttggaaataagacttgttccgttttgtgtggactaaaaaaaaaaccaaaaattatttaacctctcataaaaataaccaaaataacaataaaaagaacgaatgaacaaa

SEQ ID NO: 4755 - DNA, 197 bp, Oryza sativa
  Clone ID: PAT_MRT4530_11609C.1
gggagggaggaggaggggcgcgatggcgtggattcgacggcggccaccctccccccatgcaacggtggtggatcgacattggggaggcactggaatggcagattcggctctggctctagctccagcaacaggagcgggcagacccggctgcccctagccggcttcgaccaacgacggcgacgacgaggagggcggcg

SEQ ID NO: 4756 - DNA, 704 bp, Oryza sativa
  Clone ID: PAT_MRT4530_1160C.1
aataaaactaactatactgcaagtaatgaagatacgtacgatcgattacaatatgtatagtgcaaaacggtattgatgaagggtttttctaccaaaccatcaaccatcaaatgggaggaactactcctaaaggtgcactaaaatgcagtatatattggacctttaaagatgtctatgaattccatatacgtggacaccatagtgtttcgaaaccatgcatgttcatccattttttcagaacgtacgtacgcatacaaatatctcgcaacaacgcgatgaaccagagatcagtcggtttgagtgaggttgtggggttaggaggttctgggaaccaagtttattcatatcctcagtccaaaacctgacctctttttctcttgatctcatgctggccaaggttcctaaaccatattcaagattggaaactggcaatgctatacagtagtagtaagggttctgcaaccagtaacccctggagcttgggtacaacgtggtaatcatccagacaccagttatgaaccaagccaaagaggcatagagctaggtcttccaacctctgccaaaatgctccagaacgtctattgcaccttctgctaaaagatgaaggcatgctggggccgttgcttgacgaaatttctccaatgtttttttgcgccctcatgaagctttaggccacaatcttggcttgctgccccccccctttt

SEQ ID NO: 4757 - DNA, 381 bp, Oryza sativa
  Clone ID: PAT_MRT4530_11610C.1
tagtacatggacgggcgcgccgaaccgcgtaggggggactcgtttaacaccctacaccggatgtttatctggaccagatcaggccccctggagggagatcggccagaaaaaacatgcgcatgccgagggttgcgcaacagggatgcgaacacgcattactctgcacaggagagatacgagatcacggggacatagccctgatgagaccatactcatgtgaacagatcccccatagacagaccctagcatggggggagaaccaacactgagggtgacaaacggagcagccacatgagaagacacctgcgggagcctgactaccggcggacctcaagaagctgctaaatggaggacgactagggtggcgaaggcgccatgcct

SEQ ID NO: 4758 - DNA, 157 bp, Oryza sativa
  Clone ID: PAT_MRT4530_11611C.1
tttcggccgcccccccaaattttttttttagcataaggcacaggctatctaccctaaatcctttttcctatgcttccacatcttttttcccgacgcatgctaattgcggcagtctccagtttctcacctagccgcttttagttcacccatgttttca

SEQ ID NO: 4759 - DNA, 551 bp, Oryza sativa
  Clone ID: PAT_MRT4530_11612C.1
cgggctgcaggaattcggcacgaaggctcaagatttgtgttttcgaaaataataatgaagtaccttgtcttcactatcatgctagcttcagctagtcaagccttcatctttgagccgaaagtcaaggctggtctcaaggccatcgccgacgcgcaaccaacacagcaggttgccatcaatttggatattgggcaagaaggagccgaatctcgattggcaattacaggaatgacaatgcgatctgcacaatgatcaagctgattacgaacacgttgccatgccaggtaagaatggccctcaccccaaactctctagtggcattcgaaagttgaaccttgtcaaggaaggagagttcatctcgcttacaggtgccaagatggtcaaggcaatcaagggctgctgggaaatggtttggaagaaggacgttcctgctggtgctctcctttgtggatttgaaatccccgaagaataccgccgaaacgaagccaccttacctccaggaaggatctacttgagctttcctatctggaccaaggaatctcttgccgacg

SEQ ID NO: 4760 - DNA, 1932 bp, Oryza sativa
  Clone ID: PAT_MRT4530_11613C.1
atgctcaagacgccgccgcagcttgatccagagaagcggtggcagatttattgccaggaacctgatcccgcgtgcggtgctagcggatccggacaagatgcacccgctgatcaacaggaaagcgacgggaagcggggccaacaccgctcgcctggtgacgaagcgaggcctgatcggcagctcaagaggaggaagaagaagaagaagaagaattataatgctatgaagatgttgcaatattccctaatccaattgaggctactgaggggtcagttgattggtcgagttgaggatggcggtgttatagcccgattgaagcttatggacaaaatatgtatggagttgaggtatgtatgcgagtggaatgagtacaggtggaaatttttgttgtggctccttaaaaggacgaggttggacttgcatccggagttggtgatggatttgtcacacacgaaggagctggaaaccaaacccacgtacgatgctagccaatccagagaagaagcctctgctgcagcttcagcttctgatggacagggagacgataaggaaaggggtgacttgcaagcagttgaagcctatggttctcctcctggtaaggaaaaggttgacttgcaagcagctaaggactcttctcccactgctgagaagggaaagggcaagcatattggatatgaagcacagcagaagaaaaacagcattgaagatgttaaatcctcaagtcaacaagaaattagcaagccgaagaagaagaagaaacagaagaagaggcagaggcgcaagatggacgaatccacagaaaatctatcatgccacagtggtagcccatcctcttctcatgatggaacaagcacatcaacaatagagggggagccaaaaccatcttctggggaccttgccaagatttcacgagaacacaaacaagaacaagaatcaatggaggatttagaagatctccttggcatggatgaggataccatctcaaacaaagtcagttactactttcatcagttatatgttcaggaccatcttgatgatgatgatgatgatgattggcttgaatgcgatgggccacagcagctcactgagttgcatgagcagctggccttctaccgcatcataggttatgagttatcaaatggtagaaagcttgacgaactggatattgcaaaactgaaagagaagtaccctccctccattctttatgagaaggggtactttcagtactatgaggatagtcttgaatggtactttgatcctgaacgattccagcctgctgcccttgataactaccagcgtctagtgctttgtgataatggtttgtacatggactgggatcaataccactcaaattatagtacctatgagagtgatctagcatatgtcaaattctgtgaagagctagcacataagactaagtggtttcaagattatttggtactcattgctgttgaggataagataaccatgggtcagtgggacaaagttaaaaatacagtttaccttcaagcaatgaagatcgcactacgcattcgtgttgtttctctaatgcaagttatgactgctttccaggaatatatatggagcatgcggtttgattgttgtaactacaaggattttgatggtgtgtattttgaggtttggaagcgggttgctaagcagaagatggaattcactgatgccctgtcagaactttatagagaagatatgtttcccttgcgcaatgttgatattaaggatgagcttcgcagtactcgagggagattccgttcgatgaaggaaaattacgatctctacgtggcttgcattgatgaaacggtgccagaaaaggaagctcgtcaattgatcaaagatgccattatagaaatggcagaggaccagagccaagaacctagaaggtcactgcacaacacagcccaggggagacaatag

SEQ ID NO: 4761 - DNA, 1249 bp, Oryza sativa
  Clone ID: PAT_MRT4530_11614C.1
attcttttttctcttcttcttcttcttcttcttcttcacatcgtcgtcgtcatcatccatggcgtgtgtaatgtgaaatcagcgagctcgatatatactccattaagctaagctggttgatctctcgtgtgttccaaattaatccgcgtggttaattagctctagctagagatcggtagctctcgactagttggacatggccgccacgggcgtgctcgtcgtcgttgtggcgctcgtgttcgccgtgacggtggctggcggcggcggcgccggagtaggaggtgatggcgggttcatcacgtgggaggacctgagcatgccggccggggcggcgcggagcagcacgtgggacgacacggccggcggtggcggcggcaagaggagcggcggcggcggcggcggcgagcagcggacgacgatcgtggtgtcgccggacgggacggggcactcgcgcaccgtgcagggcgccgtcgacatggtccccgccggcaacacgaggagggtcaagatcgtcgtcaggccgggcgtctacagggagaaggtgacggtgccgatcacgaagccgttcgtgtcgctgatcggcatgggcaccggccacacggtgatcacgtggcactcgcgcgcgtccgacgtcggcgcgtcgggccaccaggtgggcaccttctactccgcctccgtcgccgtcgaggccgactacttctgcgccagccacatcaccttcgagaactcggcggcggcggcggcgccgggggcggtggggcagcaggcggtggcgctgaggctgtccggcgacaagacggtgctgtacaagtgcaggatactggggacgcaggacacgctgttcgacaacatcgggaggcactacctctacaactgcgacatccagggctccatcgatttcatctttggcaacgcaaggtccttgtaccagagctgtcacaaactcacaattcaggcattcaccaactcttccattttataccttacagcaaaagaacttctcactctgggttgcacgctgcacgccgtggcgacgagctacggcgcgatcgcggcgtcgcagcggagctcgccgtcggaggagtccgggttcagcttcgtcggctgccggctcaccggctccggcatgctctacctgggaagagcatggggcaagtactccagagtggtgtactcctactgtgacctcagtggcatcatcgtcccccagggatggagcgactggggtgatcaatcaagaacaaagtga

SEQ ID NO: 4762 - DNA, 191 bp, Oryza sativa
  Clone ID: PAT_MRT4530_11615C.1
ttcacagttgagccagtgaaagaggaacaaacccaagcgcttactgtgggaactcacagcagctcatgacagtcactcaacctggtcgacgcaagtggctggagcttggctccagcaaatggctagacgaaattagtgtgcattctaagcctgaggaagaacatagataacgcacaatccagtgacatatt

SEQ ID NO: 4763 - DNA, 506 bp, Oryza sativa
  Clone ID: PAT_MRT4530_11616C.1
tcacgctgttcgacaacatcgggaggcactacctctacaactgcgacatccagggctccatcgatttcatctttggcaacgcaaggtccttgtaccagggttgcacgctgcacgccgtggcgacgagctacggcgcgatcgcggcgtcgcagcggagctcgccgtcggaggagtccgggttcagcttcgtcggctgccggctcaccggctccggcatgctctacctgggaagagcatggggcaagtactccagagtggtgtactcctactgtgacctcagtggcatcatcgtcccccaaggatggagcgactggggtgatcaatcaagaacaaagacggtgctgttcggtgagtacaactgcaaagggccaggggcgagcacgaagcagagggtgccgtggtcgccgacgcttcacctacgacgaggcgcggccgtcatcggccggagcttcatcaacggcgagcagtggttccggtgtagatcatcgccgatttttcacaagttc

SEQ ID NO: 4764 - DNA, 1318 bp, Oryza sativa
  Clone ID: PAT_MRT4530_11617C.1
tcaacgccgcatctccaacagcctctccacattaaactctccaaacactcgtatagctaactctccatccttcttccttctcttccaccccattttccccgcccatacacgaaggcggccacgtccatgagtgcgtccacggcgcaagcaccggagccgcccggcgcaagcaacggacgcagccacctcgagcatggcatggggcggctccggtgcggcaggctcctggaggggctgcgtcgggggcgggcggcggcgacatgccctgccccgggaggtcaacgaccacggtgaggatgccgcggctaggccaagcttgtccacggcgtgggtgacggacgcagccacctcgagcagggcatggggcagctctggtgtggcgggctcctggaggcggaggaggaggatgatggagcagctccggcaggtcggcgaggccatcggcggtgtcaacgcccttctcgcccacgcctacgctcttgcctttcacgccgtcgccgccgtcgaggtccgcgcccgccggcgtaggagagggagaaggtgtgaggtcgctgccaccgtcggggtgctcgaggccgccgtcgtcggggccgttcagggcggtgcccttggcgggctgatgggcacgctcgcgtcggacagcgggtcgcaagcagcggcgcggggcgaagccaacccgctcgcggagtcggcggcggcgtcgtatgcgctggcggcggcctcggcggagtcacagctacctccccttcccccgaccccacctcaccgccatcgctcgaggtcggcggcgcggagtgcgctgatggcgacggcgttctgcgagcggagggccggctcgtcgtcgctgtcgccgccccgctccagatcccggagggtcgaggggaagacgaagggcggcgccatctcgtcgcggcctcggcggagtcgcgacggcagcaggacgacggcggcggcactgggtggatggggtggcgggcagggaggaagccgagacgggatggggaaagggggagagagagaggagagagggggtgggacccacaccagatggccagccgtcctggctggccaactttggctacgcacggctgatgccgttgaggatacgatcacggcgagccggccgctatcaggcaaccagaagttggtatctcggggtgaaaagttcgcgctaggattcttccggtcagtgagagaagaaaataaggaagaaaatttggaccatatattaatcatcgaagagttaaaaacaattgatatggtattgcttaatggggaacatgaggaagacaatttggattataaattaatcatttaa

SEQ ID NO: 4765 - DNA, 804 bp, Oryza sativa
  Clone ID: PAT_MRT4530_11618C.1
caggcattcaccaactcttccattttataccttacagcaaaagaacttctcactctggtgaggcacctagattagcaccttgcttaacctagctatatagctaagtgggataaggtggttaggcacttagccctgcaccaatgccaccaatgctcttacacaaatcggtgttcagaattagtggtcacattctctttctaccttcggcacaactgtcactgaatgaaaaatgccggagtgagtgttaatgagagtgacattacatggcaatgtggtgccatgatcaatttatttttttcacgaacatgcaaaaaccttacacgtcaatatattattattagatcaatatacaactgtaacacgtggaggcagtaatatgccatgattaaaatggacaattagcttcttggcagtctgaatttttgtaactttgttttttctttttgtcagggttgcacgctgcacgccgtggcgacgagctacggcgcgatcgcggcgtcgcagcggagctcgccgtcggaggagtccgggttcagcttcgtcggctgccggctcaccggctccggcatgctctacctgggaagagcatggggcaagtactccagagtggtgtactcctactgtgacctcagtggcatcatcgtcccccagggatggagcgactggggtgatcaatcaagaacaaagtgatcaactttccatcctcgatgatcaaatggcataggaagtggttgggagttgcattgcaggctcaccaaacagtcttgataggggaattcagttaccacatgtgacaaggctgtt

SEQ ID NO: 4766 - DNA, 1521 bp, Oryza sativa
  Clone ID: PAT_MRT4530_11619C.1
atggccgcctcccgccgcctcgcgcgaaagctcccgtctctcatctccaagcaccagcgcctcatctcgccggagatcgatgtcgagcaagccgccgagagccccgcgtcgtcgtcgtccatcccgctcgacccctccctgcccattctcccgctcgccgtctcccacctctcgccgccgagccctctcccggcgctcccctcggtgcacgcgtccaccccggccgcgctcctccgcatcctccgccgcgcgcggcaccacccgcgcctggcggcgctcgacctccacctcctcctcgcggccgcgtccgactccccggccttccgccccgaccaccgcctcacgtcactgctcgcctcccgcctcgcggaatcccgccgcctcccctcgctccgccgcctcctcgagctcgtcctcttccgcccctgcccctgcaccgacgactccatcttcgcctgccccgagctcctccccacattccgcaaggccatcctcgccttcgccgcctccggcgacatccccgccgcgtctgacgccctcgcgtccctccgccgcgccgctgattcacctctccccgccgaattctacaacatcatcctccacgcactcgcccgcctccgccgccacgaagacaccgtccgcttctacggcgagatgacctccacccaccgcgtccatccggatgtctacaccttcaacattctcatcaacagctcctgccgcgctgaaggcgttgatgctgcgatgcgctggtttcaggagatgcgacgttggagctgttcaccgactggtgtgagtttcaatactctgatgcgtgggttcttcagagaaggaaggtgcaaggagggcattaaggttgcacgcgagatgcttcagcttggatttgggctatcggttgcatccatggagatcatgatcaatgggttgtgccgtggtggggagcctctgaaggcggccgaggttttcatcgagtttttggtcgatggagtggtgccggaagggtttgattgcttggatctggttgagtctctgtgccgtgttcggaatgtggagaaagcagtggaagtggtggagttgatactggaaaggaattgggtatcctgcttgggtgtccctgctggtgtaacggttttggagtgcctgatgaaggaggggaagctggacaaagcatgccagatgatggggaggatggttgctgcggagatagttccggataccatttcttgtaactatatttttgaggcgctctgtgaagctgggaggacagtggacgcaaacaggctgaggctgcaggctaaagagaaaggttttcaggctgatggctttacatacagcatcattgtgcagggctttgggaggcagggaataaggaaagagggggaggctgtattggatgaaatgctggatgcaggatatgtaccaaacattgcgacttacaataggctgcttgatggcttacacatggggagatctatgcaattacaacaaaaatgttcaaggcataggaatgcagcaaactga

SEQ ID NO: 4767 - DNA, 1551 bp, Oryza sativa
  Clone ID: PAT_MRT4530_1161C.1
gcaaaatctagtgtggtgtacgaacgaaaatggcgacgccgcggacactggtgcccattctgccgcccgtcgccgcgctcctcctcctcctcgtcgccgcctcctccatccccatcctcgccgccgcgcagccggcggacgcgtgcggcggcgcaccggatcaggcggcggcggacggcgcgtgccacgacgtgccgagggcgctgcggctgaagctgatcgccatcccgaccatcctcgtgtcgagcgtcgtcggcgtgtgcctgccgctcctctcccgctccgtgccggcgctccgccccgacggcggcctcttcgccgtcgtcaaggcgttcgcgtcgggcgtcatcctcgccacgggctacatgcacgtgctcccggacgccttcaacaacctcacctcgccgtgcctgcccaggaagccgtggtcggagttcccgttcgcggcgttcgtcgccatgctcgccgccgtgtccacgctcatggccgactcgctcatgctcacctactacaaccgcagcaagccccggccgtctagcggcggcgacgtcgccgccgtcgccgaccacggcgagagccccgaccagggccaccggcacggacacggacacggccatgggcatggcatggcggtggccaagcccgacgacgtcgaggccactcaggtgcagctgcgccggaaccgcgtcgtcgttcaggtcctcgagataggcatcgtggtgcactcggtggtgatcggcctcggcatgggggcgtcgcagaacgtgtgcaccatccggccgctggtggcggcgatgtgcttccaccagatgttcgaggggatgggcctcggcggctgcatcctgcaggcggagtacggccgccggatgaggtcggtgctcgtcttcttcttctccaccacgacgccgttcggcatcgccctggggctcgcgctgaccagggtgtacagggacagcagcccgacggcgctcgtcgtcgtcggcctgctcaacgcggcctccgcggggctgctgcactacatggcgctggtggagctcctcgccgccgatttcatggggcccaagctgcagggcaacgtccgtctccagctcgccgcctcgccatcccgtagggacgcgcttcctcgccgtcctcctcggcgccggcggcatgtccgtcatggccaagtgggcgtgagctgacgatgcatcacactctgcggcatcatgcaattcgctgcattgttagattgagcttggtcagactcgatcatcagctgcagacatgttgtacagtgactgtgacttctccatgttgtactgtaattcaggttttcagtgttgtagcgtggttgttcaggttttgttcttcgtgactgatgatgtacttcaatacgagcatctacatattttcatgattattaaaaaaaaaaaaaaaactcgagggggggcccgaggcccaattccccctatattggggtcgattacccgcgctcactggcccgcgtttacaaccgcgtgaactggaaaaacctggcgttccccacttaatcgcttgcagaaaatcccctta

SEQ ID NO: 4768 - DNA, 1236 bp, Oryza sativa
  Clone ID: PAT_MRT4530_11620C.1
atggacgccgcggcgtcggcgacgagctcgaggccgaagcgtgactcgcctcgcatccctcccaactacgtcagcctcagggacctccaggagctccgccggaaggagagggaggaggaggaggagcaggagatgcagcagcgtcgacgggaggtggaggcggcagcggcggataaggcggaggaggagtggaggggctcgtcggagaagtcgcggggcggcagtgagaggagccgcgggggggagcggtgggcgcccgtgccgcaccgggcgtcgccgccgccgccgcaggcgcgcacggaggttgcggcgacggcgaggaaggtggatggggcgataggggccatggctgtggcgcaccgggatgcgccgcctccgccggcgcgcgtggaggctgcggcgaagaagatggatatggagataggagtcgtggctgtagcgcaccgggtggcgccgtcgccgtcgcggtcgtcgcatggtgcggtgaagaagatggatggagcagtaggagttctggctgcgcctcaatcggaggcgccgctgccgctgccgccgccgcgcagggaggatgcggccaagaagaagggcagggcgataagaggcgacgccgttaggaagggggccgacgaggccgcggccacgccggccagtgcgttccaagggcgacccaaacccaaggagaaggggaaggtcgccgccggcacgaaacagccaaccgcgccggccgagacggccaccgcatcgtcgcccggcggcacgccggaagagaagaggaagagcaaggggaagaaggcctcgggagatcagggcacagcaccggtgaccagcgacgcgccacgcgcgccggccgaggcggccggtgcgtcatcccgaggccgcgacaacccggcgagccggcgcaaccggaagaagggcgcagtcagcaattcgccggacgggaaggccccccagccggcgccgatcagcaattcgccggcagccgagttgggcggcaaccggcggagcggcggcgcgctcgggacgaacggggagacgaaaccggagcctgtcgcggagaagccgccggtggtggaggccaagtccaccgcgccggcggcgagcgtcgtagtgggcccgaccaggccgccgtccatcggcggcccaaggcgtcagcacgccggcgtgtgggtgcccaaggtggtggcgattcccggcccatcacggcattccgtagtatcggttaggaagaacaattag

SEQ ID NO: 4769 - DNA, 456 bp, Oryza sativa
  Clone ID: PAT_MRT4530_11621C.1
ctgggaataggcaagccaaggggaaagtcagctaaaaagctgaaggagttggcaggtatatcaaaaatccttatccctggcagcaagattactgaatctgatttcaatgttctggaagatgatataaactcagattcttccccttctgaacataagaggcatgaatgctgataccaaactattttctttgaggcaaaagatagaggaaagtggctgccaggttttctatgtccgagagaccaaaaaacaaaatttctctttggctgatattaggacttttgcttctaagcgttttgatgtgtttgctttctcaccctcaagaggtgcttcacgtggaatattagtggtttgggcctctaaatggagcggcttgattgggtcttttgtaacgccccgattttcgttcgggttttaaaatcatttaataatgcatttcaagaaattatattaaaagtt

SEQ ID NO: 4770 - DNA, 551 bp, Oryza sativa
  Clone ID: PAT_MRT4530_11622C.1
ggagcagcaaaaagaattattactttcttcacacgctgtgcatggtgaagtcaaattgcctctctgaaactcagatgcaatcatttgtcgctgttgaaacgttggttgctacttagtgtggagtgttggggaagaacaaaatgcacaacacgaaaaaatcgatgcggttaattgtgtcaagtggttttctccaggttctcagcttcttgccgcttcctttcttcgtactcctcacgtaatctttcctcctcacgcctcaatgcttcagcttcctcttcctgttgtcttcgctcagcctcctcacgctccctcgcttcatcctccgcatcctctctttcatcaagataatcaaactccttctctgcagccatagcttttactatagggtcccgcagctcagatatcaaacccccacccaccttgtactcctgctcgtcaccgacaaggaataaccgctgatcaggtcctgacgccattggtatgtcaacagcgagtagcttcatgtcgtactgtccctttttcttcttgacctcaacacttacaaggccttt

SEQ ID NO: 4771 - DNA, 367 bp, Oryza sativa
  Clone ID: PAT_MRT4530_11623C.1
caccacgaaaaatttattcatagcccagttttttttttagcatggggaactgaactttcatgcatgagggggctcgttaaattcaccggcacatgcgggtgcggccgggcaaatgtttccattttattttttatttttctggggggaaggggtaattggtccgccaacccaaccgaaaagccgttgttgaacggcctttggttgtaacaatcgaggttgcccccggggcccatgccaaacgccccaaaatagcgctggtaaaaaccgatccggttccccacccggtcgtgggggccgtgccccaacttcaacccggcgttgaaaatgttggggattaccccgtaccccggggcccgcccccccgggg

SEQ ID NO: 4772 - DNA, 457 bp, Oryza sativa
  Clone ID: PAT_MRT4530_11624C.1
tcgttaaaactagtgaagcgtcactgtttcaggccatatagtttttgcaggtgaagggcacacacagatagtttcttttctttgctaatgttagaggtttccgcctttgctaattgctattgacaccatgctgatcgttatgagcgtatctctacatgagcagaccatcttttttcaaggaattccttcagtactccacctgaagaaaaccatgtaaattttaacaaaaaggggaacattaggctatgttttggttacaacccagataccactctagatgggcctatgcaggccttagcaactctattggactaaaaaccctttctttaaccaaaatgatcatcctgaagttactgtctttgaaccctcaagtgttacctattatacttggggggacagttaacccatcagtatacacatgggactgttatgtaactccttgaatcctgataagcca

SEQ ID NO: 4773 - DNA, 473 bp, Oryza sativa
  Clone ID: PAT_MRT4530_11625C.1
tcattcaattgttcctacaacattgtgactgttggatgtgggcattgcacaatggtgctctccatggatcttgctccttttcaccaagcacgcactgttcaagatcaccaggtacagaacagaggatttcaaggtaataactttggaagctatgacatagcttccagaaatcagaggacatcgacagccatgtacccaatgccaaccagtcagcagcaagtgtcacctatacgtcgtatgcacaattaattttctcatgattttatttcattgatctactaaattatggggtttattttttatttctctatataagcatgcatgcaaaatgggtatatataatatagctaaaggttatatgtactgttctaggcttctaatgtataatcaaaatatataatagtcatcaagttcatgcatgacctatatatgaacctgatcacactgaattcccgtaaacattagtttttccc

SEQ ID NO: 4774 - DNA, 768 bp, Oryza sativa
  Clone ID: PAT_MRT4530_11626C.1
atgatggtgatcaggttcttcgccgtcctggcggcggcgctgtgcatcacgtcggcctcggctgcggcggcgggcggctgggtgagcgggacggcgacgttctacggcgggaaggacgcgtcggggacgatgggcggggcgtgcgggtacgggaacctgtacacgcaggggtacggcgtgtacaacgcggcgctgagcacggcgctgttcaacggcggcgcgtcgtgcgggcagtgctacctcatcatgtgcgacgcctccaagacccccgagtggtgcaaggccggcaccgccgtcaccatcaccgccaccaacctctgcccccccaactgggccctcgccaacgacgacggcggctggtgcaacccgccccgcccccacttcgacatgtcccagcccgcctgggagaccatcggcatctaccgcgccggcatcgtccccgtcctctaccaacaggtgaagtgctggaggcagggaggggtgaggttcacagtctccgggttcaactacttcgagctggtgctcatcaccaacgtcgccggcagcgggtcggtgcaggcgatgtcggtgaaggggagcaagacggggtggataccgctggcgaggaactggggcgcgaactggcagtgcaactcggcgctcgtcgggcaggcgctgtcgttccgggtcacctccaccggcggccagacgctgcagatcaacagcgtcgtgccggagtggtgggagttcgggacgaccttcaccagcaaccagcagttcgactactga

SEQ ID NO: 4775 - DNA, 2418 bp, Oryza sativa
  Clone ID: PAT_MRT4530_11627C.1
atggataaaaatatgaggcactgcttgtatggatccgaggatccttgctggtatagatcgggattatgcaggtcgttgacgccttgggatgcagtgctcccatggggctcagatggtggctcgatgtggtcgtcggtggcaccaagtcagggaatctcggggagaggagaagccgaagaggtagagcagggagagagggtgccgtggtgctacgatgaatgccgccggctctggggaggaataggacacagagaagaaactagaaaggggagctggggagaggaggaagaagaggggggagttgggctgggccgaaggccattccaaatcactcgtctaaagaggacgtcgaagacgaaggcggcggctgcctcgcctagcacgctccggcaacgaggtggcttgccgagctgcgccgccggcgcccgctaccgccgtcatttcaaccgaggggggaggcaacaggggacggagggagccgccgctgacgccacccgcggctgctgggggcggagggagccactgctgccaccacccgcagctgtcgcgaggccaccgccaccgccagatctgcctgccgcgggagggatgagggtggaggaaggggagggaatagctgtggggaaacggcgctggcggaggagctcatggcaggacgagacctgcgtcgccgtctcgggcttggttggcacggtgactgcggcggggatggagaccgacgagccggcgaccaaggcggcgggaggtgagccgaagccctcgctggcgaccaaggcggcgggagagcaagataaggacgacgaggaggagagctccggcggtggcggcgccgagcctgaggttagtgccacccctgccgtcgtggtcttctcctcatcccacatgttcatctcctacctcttcgacgcttcgccaaagatccaagagctggagattcagactgtcccgaagctggagcagatgctgcgaaagatagaggaagagaggatgcacaggaaagcgaagaaggagagatcagccgtgcaaaatctcgacacgctggcgaagctggtcaagtctgccttgtacgaagcagaagacgtcctcgatctcattgcttatcaccagatcgagaaggatgtcatcggcgatgacgagccacagggaagcagcagcaaatggcatccgcacatcgacgatgccatccacgcttgcaagacgagctggattgggagatgcataaccactctactggagtgggcacaggtcaactggtttgaggttgctcgctcttatcgagattggttttatgatgcaactggcatcacagccacaggttaccagctggaggatggtacagcagtatattctttcatgcctgctattgctagatggaaattgaggaaaagaatagagaaactagaaaacactgtcacaaacgtggagaactctccctatttaacacagacaagcagtggtgcctggaatgatattgtcaacatgaacaggagaagcattacatcgagtagtacacgcaaggtattcggtagagaccgggagcgtgatatgataagaagtatgcttcgtgaggatgattctttaccaagctccagtagcaggaaatgttattctgtaatttgcatatatggcattccagggtctggaaagactacactggcacagtatgtttgtgagtatgaaaaggaggataaagatagatactttgacacagtcatgctaatttatgtttctaagacttacagactggaagatatatttcgtgatatgctcgaggagatcacgcaaagccggcattctgaaattagtgactgcagaggtttggaagcaaaattggtggagaatttgagaggcaaacggttcttgttggtactggatgatctgtgggtcaatgatgagaatcatgagaagctgctttctccactcaatgttgggaagtcaggaagcagaatcctggtgacagcccagagtaaagaggcagctctaggctctaataggcttattccaatatctgatctggaagaggagcaatacttctcaatgttcatgcattatgcacttgacagtacaattttcgatgatcgagaatacataccgattgggaggaaaatcgctaagaagctgaacagatcacctattgcagcagtgacagtggcaggtcagctctggagaaacccagatatcagattttggcaaacaaccgcgaacctcgatgtgctgaataagaccaagggagctctttggtggagctataatcaacttgttgtggatgtcaggagatgcttccagtactgtagcatcttccccagaaggtatgagcttgaacgtgacaatcttgttcgtatgtggatagcgcaagaatttgtgaaggacaatgatggaaacaatgaggacgtagaagatgttggtcagtccctctga

SEQ ID NO: 4776 - DNA, 464 bp, Oryza sativa
  Clone ID: PAT_MRT4530_11628C.1
gggaggagggtgaccgggcaccgtcctcgccggagaagttcgccggctcgatggggaaagcgacggccgcggtgaaggtcgatttggcgccgcgccaccgcgccgcgttgcggccgtcccgtggcgccgacgaggtcgccgccctcccctcacgccgcggctctcccctggcgccgacgaggtctcccctcacgccgcggctctcccctggcgccgacgaggtctcccctcacgccgcggctcggccggcgccctcccctcgcgccgacgcttggccggcgcgccctcccctcgcaccacggctcggctggcgccctcccctagcgtcgcggctcggccggcggcctcccctcacgccgtcctacgctcggctgtactgcggcccctctccacgccggtctgtcgccgtcccggatctacttgcaggagtgatgcagatggattccaatgtttatgatatatga

SEQ ID NO: 4777 - DNA, 442 bp, Oryza sativa
  unsure (1)..(442): unsure at all n locations
  Clone ID: PAT_MRT4530_11629C.1
ttgactgtagacattgaaaacatagtatactcctacatattttaataggagtaaagtctatcaccggtccctaaacttatatcgttgtgtgatcccggtccctaaacttgtaaattgaccgttcaggtcctcaaacttgttcgactgtgtcatcccagtccctaaacttgcagatcacttgtttaggtcttccaacttgttcagctgtgtcaccccagtccctaaacttggatttgaatatcatctgggtcaaataggacgagaccggggtgacacaactgaacaagttgtaggacctaaacgagtgatctgcatgtttagagaccgggatgatacagtcgaacaaaatggtcaaatatgtaagaaaaagtcaagggtaccgagctcgaattcgccctatagtgaatcgggtaactacaatntgcaaatcaaaggcccgcgt

SEQ ID NO: 4778 - DNA, 1079 bp, Oryza sativa
  Clone ID: PAT_MRT4530_1162C.1
cccacgcgtccgcggacgcgtgggcggccacgctcgccgccagcgtggccggcgtgtgcctgccgctcttcgcccggtccgtgccggcgctccgccccgacggcggcctcttcgccgtcgtgaaggcgttcgcgtcgggcgtcatcctcggcaccggctacatgcacgtgctcccggactcgttcaacgacctcacctcgccgtgcctgcccaggaagccatggtcggagttcccgttcgcggcgctcgtccgtgggctcgccgccgtgttcacgctcatggtggactcgctcatgctcacgttccacacgcggggcagcaagggacgggccagcagcgccgtcgcgcaccacggcgaccacgggcactgtcacgctcacgcgctggggcaagcagacgtcgctgcgctgtcgacgacggaggcggcggatcagggcagcggcgacgtcgaggccggtaacaccaccaaggcgcagcttctcaggaatcgcgtcattgtgcaggttctcgagatgggcatcgtggtgcactcagtggtgatcgggctgggcatgggggcgtcgcagaacgtgtgcacgatccggccgctggtggcggcgctgtgcttccaccagatgttcgaggggatggggctcggcggctgcatcctgcaggcggggtacggcgggaggacgaggtcggcgctggtcttcttcttctccaccacgacgccgttcgggatcgcgctggggctcgcgctgaccagggtgtacagcgacagcagcccgacggcgctggtcgtcgtcggcctgctcaacgcggcgtcggcggggctgctgcactacatggcgctggtggagctcctcgccgccgatttcatggggcccaagctgcagggcaacgtccgtctccagctcgccgcgtccctcgccatcctcctcggcgccggcggcatgtccgtcatggccaagtgggcgtgagcgtgaccgtgaccggcgtcagggtcgaagatatgcatgaagtataggtgaaggtgacaccgtatgtgttgagttgtgatccaaattcatttgcacttaataaagaccagcttctgccgt

SEQ ID NO: 4779 - DNA, 783 bp, Oryza sativa
  Clone ID: PAT_MRT4530_11630C.1
atgaacacagcggcgctgcccgggtacagcgtgatggcctggtcgtactgtcgcagcgcactcgccgtcaactcgccggagaccttgagtagctgccgtggggaggagggtgaccgggcaccgtcctcgccggagaagttcgccggctcgatggggaaagcgacggccgcggtgaaggtcgatttggcgccgaaatcaatcggctgggagagcgagacgcatagggttagggttacgtccgcggcgccgatctgggtgccgccgcgcaacctccctagcgccgacgcgccgccctgcccttccctccagccaccgctccgtcgtgccctcccctcgcaccgacgcctcccctcgcgacgacgcggcgcgcctcccctcgcgccgccgctccgtgtcgtcgtccttcaccagcgccaccgcgccgcgtttcgtccgtcccgtggcgccgacgaggtcgccgccctcccctcacgccgcggctctcccctggcgccgacgaggtctcccctcacgccgcggctctcccctggcgccgacgaggtctcccctcacgccgcggctcggccggcgccctcccctcgcgccgacgcttggccggcgcgccctcccctcgcaccacggctcggctggcgccctcccctagcgtcgcggctcggccggcggcctcccctcacgccgtcctacgctcggctgtactgcggcccctctccacgccggtctgtcgccgtcccggatctacttgcaggagtgatgcagatggattccaatgtttatgatatatga

SEQ ID NO: 4780 - DNA, 804 bp, Oryza sativa
  Clone ID: PAT_MRT4530_11631C.1
cagaaatatcagcattgcctgttaatatgatggattattgtctgaccaaatttgattattacattatcatgataagcttttggtatcagcgaagtgcaaattttccagccatgttgtgcttaaattccaaccagaatcacgaatcttcaaacatggttgcttgttatgaccacccaacgagctgctgcacaatgtacagatgcacacacacgaaaaatacggaatgaaatgactcacggcatataccaattagaggacgccgccgtggcagtggcggcgtcggccacggcggaggcggagatggcgacgcggacgagaatccgcatgcgctcgatctcgaggtcgggcatggcctccaggcgtcgctcctggcgtgaggggaggccgccggccgagccgcgacgctaggggagggcgccagccgagccgtggtgcgaggggagggcgcgccggccaagcgtcggcgcgaggggagggcgccggccgagccgcggcgtgaggggagacctcgtcggcgccaggggagagccgcggcgggagggcggcgacctcgtcggcgccacgggacggacgaaacgcggcgcggtggcgctggtgaaggacgacgacacggagcggcggcgcgaggggaggcgcgccgcgtcgtcgcgaggggaggcgtcggtgcgaggggagggcacgacggagcggtggctggagggaagggcagggcggcgcgtcggcgctagggaggttgcgcggcggcacccagatcggcgccgcggacgtaaccctaaccctatgcgtctcgctctcccagccgat

SEQ ID NO: 4781 - DNA, 1338 bp, Oryza sativa
  Clone ID: PAT_MRT4530_11632C.1
tcaggcctgaaaatatctcaaaacggatggcctagagccctggagtgcactggactgaagcctgggccatggggaaaatggtccatttgctttgtttgccttgcccgtgtcccccagctttgcttctggtattcgcctgtccttcttcgcttcccttgtgcaagtagttgtggcctcttttcctgcaaccgcaaagaaagaacctgtcgccttttctgaatgtttttcgtgtgctcaagctgttaccaggagccgagtgccattcaaaacatgcaaacaaagtgtaatgcatattgtggcgataaccatagacttatcagtcatgtattgcatcgcgcgcagtccgctatccatcactgtgttgccacccttcttcgccccagcgtgcattttccacagtgcgaactcaaggaacgacctcactgtctcaaatgtaactctaccagtaacatcaagcacaaacttcctgttgcttggaactgccaatgtgctcgacactgtctcgacccacccttccccagcaccattgctgccactgccaaccgatttataattggcattggacataacatggtgagtggccttcaccatagtctccactgccccgttgcataccgaaacaagcaattctttaaccttagcatcatggcttgcattggtaaggccttggaatagctgatcataggtattgatgtggattgtcttgtcaacgaacacccccacggctgtgctcacgaacacctcaacccaattactaatcgccttctggccctttccagtggcaatcaagttgacccacttcatcggcgaggaggtctccccgggagtcgaagaggcggagtagatagcagctacgagatggcgggcgaagctcccggcgatggcagccgcaaggcgctccccggactccgagaagagcctgtcgacgaggcgatcggagagggccacgccaccgccggagccgggcccggagtcggatccgactccgcggagtatcccggcggtgatggcctccgagatcgcggagacggtcgcggagacctcgggggacgcggcgagcttggccagctgcgtgacgctgcgggggagctcgtccgagccggagcggacgaagtcggagaggtcggaggccaccagggccgccgcgtcggcggaggccgcggcggcgtcgaggaaggccgcgaccgcgccggccagccgcgcgaggcggcggcggcgggccgccacggccgggtggtggtagatcttgtacgccccgaacaccgccgccgccccgcccgccgcgaggaggatccagcgccggcggcggtgggagaaggccacgaggcggctgtccat

SEQ ID NO: 4782 - DNA, 477 bp, Oryza sativa
  unsure (1)..(477): unsure at all n locations
  Clone ID: PAT_MRT4530_11633C.1
ccccgcgtccgggcgacgtgcgcgggagggcgaggcgacacaagatccgatggggcgatggctctcaacacttgctgcatgctatccctgcaccaccggcagctggcacctagagcagagggtcatgacgacaaggcactacccctcttctggatggtccacngcgaccacccaggggtttcgtcaggcggtaaaataaaacntcacctaattaaacacctgctaagacgggtgtacggtatagctagctagggatgtcatgggcgagccacctacagctactgctcagttcctggcccgcaacgcacacacgaatgtccacccccagcaagctacaggaataaacctagccgagagagacggccatgcgctctctccgttagatagcttctatatatccgggggagactcggaacctacaaatactagctagtgtctactatgtcttatgtatccggggccgcaccacacctgcgc

SEQ ID NO: 4783 - DNA, 414 bp, Oryza sativa
  Clone ID: PAT_MRT4530_11634C.1
ggaataacccaaccaaataaaaaagggtccttttcttttggaattaactattcggggggcccaagggaaactagaccccaaatttttcacagggttttttttaaaacaaacaagctatacccaaagtattgggggcgttaggcaaaaaaattgggaccggggtttaataactttccagaatcaaaagttctaaagcacgggggccatttaaaaaatggattttctcgctaaaaaaaaaaaaacccaggctatgactagtcaaaacaaaaaaacttacgggttaattatttcttcaaaaattaaaaaaagggcttaaagccccaaaatggcttcaaaaagcccataaaaagttatgggaaacccgggaaaaatcattacgcaagcttgccccccaaaacccctcccggtttaaaa

SEQ ID NO: 4784 - DNA, 4200 bp, Oryza sativa
  Clone ID: PAT_MRT4530_11635C.1
ttaaggtatgtcgcagtagagccctccaggacctccataggcgacgttgtaccctggcttgtcggcgccgaagcccagcggctgggcaccgtagcagccaggcgtggtgacgacggtccgatccaccgagtcctggaagagctgcccgacggcgctgatcccgaggtacttcatgatggtggcggcgaagcgagcgccgccgcacgccggcaatgccgctgcccatcggcgcgcgtcgtcgtgtggttccccccggccctcgtgtccaccaccctcccccccatctccacatacgacccctctgggaaccccgtgtcgaacgcgtcgtccgtgtagtagccaatctctctgagggaatttacttgtgggcctcctcgcccgagtggatcgcctgatttggatgtcttgagcttctggatcgcacggtgatgacgacgccgtgacattcttccccccttgagctgaagcttgtccccaagcttctgcagatggaaaacgacggcgaagctcatgaggattctcccaggtacaaatggcagcatcatcacccgaccactgcaccaggacttgttccaccatcttggcacctttgcgaatgaaatgacgctccagcacatgaataggttggggcggatcagctatcgtcggacgaagcacaggcagaggcgcatgaacttgttcaccaggggccaatgccttcttgagttgagagacatgtataactggatggatcaaactggtagcaggaagagccagtttgtacgccacttcgcccacacgatccaacacctgaaacggaccataaaacctgaaagataacttgcaattagcgcgggtgaccactgattgttggacaaacggttgaagtttcagataaacccagtcgccaacagcaaaagagcgctcagagcgacacttgtcctcttgtgatttcattctggtctgagcgcgtaacaaatggctgcggattaaagattgcatctgctcccgttcatgtaaccagtccaacagatcctccgactgacaggcagatgtagcagacagaccaaaatagcgaggctcgtgcccatacaatacctcaaatggtgtagtacccaaagcagaatggaatgatgtattgtaccaatactcagccagagcgagccaccgactccattgagaaggacaagcgtgaacaaagcaatgaagataggtttgaagacattgattgacatgctccgtttgtccatccgtttgcgggtgataagaactcatacgcaattgtgtgccagccaaacgaaagagagtagtccacaatgtgcttgtaaagatacgatcatgatcagagatgagcgactgaggtaatccatgaagtcggtgaatatgttgcatgtaagcttcagccacatccaaagccgtgaaaggatgactcaagggaacaaaatggctgtatttggaaaatttgtcaaccacaacaaggatgcaattgaaagtggcagacctgggaagtccctcaatgaaatctagagacacaatctgccatgcatgtgcaggaacagggagtggttggagcatactagggtatttaacatgtttaggcttggcttgttgacaaactgtgcaggacccatccttgagagaaaaatcgggcaccgctccagaattgatacacagggtctgaattttacaacaagcatcagtatcctgctgataaccatcaaccacttcctgtatccaggccggtaaagccactgataaagctaacagttcaacttgttgcccaagaggataacgggacaacgcatcggcaactcgattgtcactacctttcttgtagatgatttgataccacaatcccaaaagtttcgtgagtgctttgtgttgccagggtgtggtgagacgctgattatctaagaaagccaagctgcggtggtctgtcttaatgaaaaactcagcatgttgtaaataagggcgccaatgatcgacagccatcataattgcaagactctttttcccataggtggataatcccaaatgtcgtggccccaaggctttgcttaagaatgtaattgggtgattgttttgcataagtacagcacccatccctttgtcagaagcatcagtctctaccacaaaaggaatactgaaatcgggcattgctaagacaggagcagtcactaatgcatgcttgatagcctgaaaggcctgatctgtggctgatgtccatagataaagttgtcccttctttaacaaagaagttaatggtttactcagaattccataattaagcacaaacttgcggtaataacctgccaaacccaaaaaacttcttaactccttgacagaagatggaaccggccaagactgaacaacaacaatcttgtcagaatctgtggagacaccattaggactgataatatgtcccaagtaagccagcttttgttgagcaaaagaacatttgctctttttgactttaagctgatgtttatgtaagatctgaaacacagtctgtagatggatcaaatgttcctccatagttcgactgtatatgagtatgtcatccacaaagacaagcacacacttcctgagcaatgtagatagaatattattcatcacactctgaaatgtggcaggagcgcttgtcaaaccaaaaggaatcactcgaaactcaaagtgaccatggtgggtttgaaaggcagttttatgttcatcctctatatgcattccgatttgatgatacccggcacgtaggtcaagcttggtaaaccattgagcccctgctaactcatcaagtaactcatctattattggtaatggatacttgttcttgactgtgatagcattcaaatggcgataatccacacaaaatctccacgaaccatctttctttttaaccaataacaccggagatgagaaaggactagagctaggttgaattatacctttagatagcatttcctgaacttggctttcgatctcatctttttgtgagggagtgtaccgataaggtctgacattaaccggcatggctccaggaatcaacggtattgtgtgatcaaatgggcgctgtggtggcaagccctcaggctcatcaaagagggaaacattgtcagttaacaacttttgtacagccgcaggtataacttcagtctgaacatcttcagtaataaagcaaaactgaacaagatttgccactgccatcttcttatccaactctttcagcatcaaagtccttgtggaccaatcaactgtcatagggctgtgctgcatcaaccagtccattcccaagatcacatcataatttccgagagccaacaccttaaattcagtacaaaacatatgcccttggctaacccattcacaatcctgaatcacagactgacagtgcaataatgctccatcggccactttcacttgcaccttggtaggtagccaccataccccaactaggccagctgccaccttcttactgataaaactagccgtactacccgaatccacaagaatcaaaatatccttgccttgaatttgtcccagcattctcatggatccacgatgctcagagccctgcatagcatgtacagaaattgccattatctgttgttctgcagctgtgtcaagaactgaaccggtatcttcttcagattcaaacagcactgtgaaaagctcctgcacagcatgaagttgaactctgttggcacacttatgggtaggtgaccatttctcggcacaaatgtaacaaagaccctgagcgcaacgctgagccttaagtgcaccaatcttatcaacagaattagttcctcttttgatttcagtctccctcttgtcctcaaacttcaccccagaacctccagaacgtacaggtggagcaggtaatggataagcacccttgaaagctgtattgggtcgatgcagtattcccccttcaattttcttctgctcctttcctgaatttcctgaattgccatcagctgtctccaagacttcttcccacaaccctggaaaagtattattcacatcgaaataatgctcacacttcatgcgccaatcttccgcgcgcaaatcatggatcgccgattccacttgcggacgccatccgttgactcctgcatccagcttcgccaccacagcttgagtctccgcttgcttgttgttcaacgacaccagcgactcctggatctcggccaaaacttttccgaagtcgttgttctgcttctccat

SEQ ID NO: 4785 - DNA, 274 bp, Oryza sativa
  Clone ID: PAT_MRT4530_11636C.1
gtgtctcgtacgggaactctgatgacctcgctgagcacgcactctacgtcgtgctaggaatcgacgtggacgtggacaggggactcaccatcgccatggactacctttaataagcgaggcgatgcccaacatacggaaggcaacacgacttgccgacgaaggggatgcggcaggacatgcactcacacgcaggaggccggagcctgctcatcgatgttctcgccctccactacatcccaaatgcagataagcagagaccgatctgcatggatta

SEQ ID NO: 4786 - DNA, 613 bp, Oryza sativa
  Clone ID: PAT_MRT4530_11637C.1
ggcgctcttcggctactaatgtcggattatgcattgtatcccgatgttttcaccgaaggtttgtttgcacagtagaaggtatggattgtatcctagagaacacctccttcatccacagtgaaactctccaggaaatcaagcatacccataaggagccctcaattgttgaatccaagcccatactttgtacatcacaagattcaccctttgaaccatcatctgaacctcatgaaccgaaggaagaagaaattcagccttcgaaaatccctttcgtgttcgaggaaggtctttttgaagactatagaaacacctcgaactattcctatcaaaagagatcacatgctcaaagggacagtaaaggagttaactaccatcatgagcgatgtgtggttaagggaagtggagccgtcttctgaagtaattcggatttcgcccccttacttagctattcaatgtcttgtgaaggagactgtggtgattgttctctataatcccactgtcggtgctaacatcctgtttgcaacttttgcgttaactttgttgacgtaccctcccaggaaattaacttaggattatatataggcgcggaggaatacccgtactgagctgtcac

SEQ ID NO: 4787 - DNA, 2214 bp, Oryza sativa
  Clone ID: PAT_MRT4530_11638C.1
atgcctgcactgcaccctcgtgcgagcaccacgccaccgcgctgcacagcgcctgcgctgcccttcaccacgccgactgcgcagctagggttgggatgggaaatttttcacgagagagagagatggggaggaagggaaggggctcctccacaatctccggtcaagcagagcacaagcgtgctagctctcccggtggcttgcctcgccggcggcggagacggcgacggtgcggcgcaggatggagccgcgggtggtgttggtgcttgcgctggtggcggtggcggcggcgggcgtgccgtcaatggaagcgccaagcggaaggggaagaagagaaggggcaaaactgtcattttacgcgagatcttcacagatgacagggtgaggaccctatcacaccaagtctccacacttggggacagggtgtgggagttggagcacaaaaaccccaggctgcttggcgagaaagaaggaaaggtggagaggagcttgaagggtgaaaatgataagcttcggttggaggttttgaccccggaggaaaaatatagccagtctgcagcagaggttgagaagcttcagaaggaattagttgcattggcagaggtgaaagaggtagctgcaaaggcatttgatgatgagaaagcaaaaatgatgatggaatctgtggatcttaagagtaggctagaggaaatccagggtaacatggatatgattaagagtgaaaatgataagcttcggtcagaagctttggttgcagagcagaaactaaacatatgtgaagcagagattgagaggcttaagatggaattgggtgcattgacagaagcgaacgaagcagctgcgaaagcatttgacactcaaaatgaagaaatcacgaaggagctagaggatcttaagacaaagttggaggaaatcaaaacaaataaggatctagcggaaagtgaaaatggtaagcttcggtcggagcttttgtcagcagaggagaaatacagccagtctgaagcagaggttaagtatcttaagcaggtaatgggagcagtggtggaggcgaaggaggcagctgcaaaggcatttgctgccgagaaggaagacattatgaaagaatcagacaatcttaagaggaaagttaaggaaattcaggatagcaagcttttggtggagagtgaaaatgatgagcttcggtcagagattttaagtatgaagcagaaacatggtcaatttgaagtagaggttactagcctcaagaaggagctgggagcactagaggaggcaaaggagatcaccacaaaggcatttgaggttgagaagacagaaatcctaaaggaattggaggatcttaagaggaaggtggtggaaatccaaaccaacaaggatttagtggaggtagggaatgataaacttcggttggatgttttatctgcacaacagaaacaaagcatattagaagtagaggctaacaatctcaagatggaattgggtgcattggtggaggcaaaggaggtggctacgaaggcattcgacgctgagaaagcaaaaataacgaaggaattggaggatgttaagaggaagatggaggaaatccaggtcaagaaggatttggtggagggtgaaaaggataagcttcggttggagatattaatagcggagcagaaacatagcatgtctgaattggaggttaaaaggctcaagatggaacttggtgcattggcagaggcaaatgagacagctgtgaagtcatttgatgctgagaaggaaaaattcatcagggaaatgggggacctcaagaggaagatagaggaaatccaggtcagcaaggaagctgctgaggaagtagggcgcaacaagaatgcagaggctgataggctgagggctgagttggtgaagatccaagtttctttatcgcaactacaagcatcctataatgaacttgatgctaagcattctctcctaaatgatgagaagaattcagcccagaaagcattagatgttgagaaggttgaagcatataagctgaagtcaaaatttgaggaacttgaaaattataaggctgaaaaggatgaagaggctgggaaactgaaggcggcattggaggaaaagaaaagtgagattgatgtcctcatcaaggacaatgagttgctgcgtctcgcaattgctgaggcacaggaaaagaataagggaagcattttatcatgcttatcaccatgcggctccaaataa

SEQ ID NO: 4788 - DNA, 225 bp, Oryza sativa
  Clone ID: PAT_MRT4530_11639C.1
atggcgacggaggaggaggccggagtggagggaggcggtggtgcggctcgggtcgacggggtcagcggcgttctggcggtcggcgacggaaacagaggggtggacgaggtcggcgaggacgtggcgaagccggaggagacgacactgaggcgggggacgccggcggggaaggaaaccggtgcgggggtcctggtcggcatcaatggagcaaatctggccgtttga

SEQ ID NO: 4789 - DNA, 646 bp, Oryza sativa
  Clone ID: PAT_MRT4530_1163C.1
cgggctgcaggaatcggcacgagggccactggtaaccaggatgtatattcccaactggaaatgtcgcagtgcacgtctgagatgatgctttcaatgttgaaagtttagaagtcagccgccgaatgacaagctcaaaagaaataagattcgcacttacaaagaaattagagaaaacccgaaataccatacttgtgtaaatggcaagtggtatttcggaaagctgagaacgtgtgtcgatcgtatgagagcagttattcaaaactgtgcagaaggttttatgaacagagagtggttgcagacaagagaaaagcaaatattcaaaactgtgcagaaggttttcatcaaaggagctgcttgattaacaattttagaattctacgggatcttctttgtcgttgttacacaaatttattcaaaagtgaactacgtgtatttcctgctttattctctcttcgaacagtgttctatgcattctgccgatctgcaagggactatctatcctactggcgccacaatgataaaccccttgggttgaagccctccctgtttgagatctcattttcctttcttcaatccttatggatattcttatcgttggcagtataagatattacaatttgaaaacaaaccattttcttgttcctgg

SEQ ID NO: 4790 - DNA, 497 bp, Oryza sativa
  Clone ID: PAT_MRT4530_11640C.1
aagatatagagaagttcttgagaatcagaagtgatccagatttagacaagtcgccttccccacaagttgggaaagaaaatcagatgcccaaaaagccaagaggcattaagctcaaggaaaagggcatccatggttcagctagacgtgttggtggcttagagaaagcatcatcgcagaggaagagaaagaagaaggatgacgatgttccggaccatgtgctagaaccacaacctgagatgcagtcacaaccacctgctacagtaatgctccaactcagcggcaaggcgcttgatcagtggtggcgagctcgagacaatcgactgctcgggcaagcggtgctcgagctcacccgtaaagcggcggaatctggcggagttcatctaggtcaaggtggggaatttttattttgttgtagtaatagtagatcagcagcatggagagagacgatgccttctgttgggggagggaagggatcaagggattacgccgttgtgtga

SEQ ID NO: 4791 - DNA, 351 bp, Oryza sativa
  Clone ID: PAT_MRT4530_11641C.1
tgttccaatctttccattagctccaccgtgaagacggcggcctctcgcgtatgagccccatggccgccgcctgtgccgtctgggctcagcgccgccggcgacgccagggctgcgcacctactacccacgccatcgccgcctgcgccgtcccgccgctggcgccgccagagatgcatggcccccgcgtcatccgccagccacacacccatcgtttgccccacagcagcagcatcgacacgccgcagattcatcggtgattttcttcctggtattgcccaaattcctcagccatcgaatcctggcaacagtagcaatcctaattgcaatactgtttctgcacacttgcacagc

SEQ ID NO: 4792 - DNA, 1524 bp, Oryza sativa
  Clone ID: PAT_MRT4530_11642C.1
ccggccgggaactcaaccacttctcctactacagccaacctcctcttgcctcgcctcgccacggatcgcgccgccatggccgcctccgcctccgcgccgccgcattcgctgctgctggccgccgtcgcgctcgcggcgctcgcgtcggtggcggcggcgagggacgagaacggggtgtacgacccctgcagcgacacgcggatccagcgcggggacgggttcggcttcgggatcgccttcgccaccctcggcgccttctactccggcggatccgtgcagctctccccctgcgaccgccgcctcagcctcgcctcctccggccagctcgccgtcttccgccccaaggtcgacgagatctccctcctcaccatcaacaccaccaccggcttcaaccccgcaatagtgcagatagagacagtgaatgtgttaaattaaaagtatgcagcccggtctgttccaacctttgtgtccaattcctcatatacagtctccagcttcaccctggttcttgagttcaataaaggcaggcttcaaaacttgcattggaagaaggatggctgtggtgcttgcgcgaaatcttcaagccttgtttgcatcggcaagcaaacctgtgcccttcagacacagagcttgcaaagccagggacctgttgactgcagtatcggcatccagctggctttctcaggcaccgataaacacgaatcagttctgaactcgtggtatgaggtgtctaacctgcggcaatactccctctacgggctgtactcgaacctgaaggacaccctgagcggccagttcaacaagttcttctaggcttttggtgcacccgttgttcatactcttctgccactatttctctggagctccctgcctgatgctgtacctattgctcgttaggtttgcccgatctgattttagcttgtgtggagatgctcttctgcgtcattttccactagtattctttccattccagttcccacttaacttcaattatctgatgggttgctatatgttaatgtcatgtacgcaagaaaggtccttgtccggtttgcgcgtttgtaaaaaaacttctggagataatgagaatataaagagctttcatcttggcttcagggctccgcaacggtgcgcgcgtcgcgttgatggtgcctgcactcaggtcgctcgagaagtacacactgaagttgctctggtcatatttacattgttgtgtgtaactcttcctggtttgcttttcagtctaggatagagatttacatgtcaaagagtcagtgctcttttgaaagtgtaatgcgatgcaagtaaaaacagttttggacaagatcgaaaggatccatgtcatttgctgtcagaatagtaatgtttgttacttaatgaggtttgttacaaaccttaattacaggaatagcattgtagtagttcttaactttttacactcctatttgtagatgtacaattatcagatggactattttatacactactttctccctctctatatagcatttacatttatttatgtat

SEQ ID NO: 4793 - DNA, 646 bp, Oryza sativa
  unsure (1)..(646): unsure at all n locations
  Clone ID: PAT_MRT4530_11643C.1
gaattgtaatncgagcantatanggcgaattgggtaccgggcnccccctgcgagttttnttttgntattttnntttttntntttttttatttttttttgtccagaacgcacaaaatcatatatagtactttatcagctattttgtgttcaaggacatttcattattcattatttgttttgatcactatctcgttgcatgcaacanggngncggtgtgatcctactagctatgaggcaanccagctaagcctantactggccggcggcngaaaatgctgcactgctggggctcaacccggcacatcgacggnagctgcgccgcntactgcctcgccctggtcagcctcacgcgggtcatccccggctgctgctgctgctcgccgtantaccctcctccgacccctcgccgtantaccctgctccgacnaaaaaccctcgccgccgtnntactccgacaaaaaaacaacanccttgctccaggggcatcngnatgctctcctcgtactcccacatccggnggatggngggcacggnctcncggtcngttctgcactgtggnncactgctcccaggcnacnccccggnggggtctgccaatccgcaccggggatcatattntaacgcncccnngngaancncttntcnt

SEQ ID NO: 4794 - DNA, 451 bp, Oryza sativa
  Clone ID: PAT_MRT4530_11644C.1
gttattctatgtcctgcatatagtagagactgtgagctgatattatgttttcagctaatcattaaggatgggaaatcttcatacaaattccatctctactgaccattcacttgctgcagcttttgtgatccttaagacggaacagataattgcttatttaaccacgttggcttctaacgtgtccattaggctttaagtttaacctgatgacatgccatatatttgggactttttagttgcccctatggcttatatgctgtgcctgtgggatgaacacgtcccaacattcacctcatttttttcactttgtcagctaatagccatacatgtttagctgattgttaagattgggaaatgtacgcttttcatactgtgttgtatatgctctgtttgcctgcttgaacatatcttgttttgagagtaaatacgttgccccgatggtggcaatggt

SEQ ID NO: 4795 - DNA, 457 bp, Oryza sativa
  Clone ID: PAT_MRT4530_11645C.1
aaaaacaacatggcaacacggttattcagccgaattaaccgaaaaaaatccccaagatttcagcattggaaaagccaacagggaaggacagtttattaaaaaaacagaccccacgcaacagggggggccctcaaaaaacctcccgggcaaataaaaacgggggggggaacaaaccgagggggggggccttctcccggccgaagtctgggggcatccaccggggggggccctaacagaaacttcctgtccggccggccggggccctcgcccggaaaagggaattcggggccgatgcccttgaaaacaaggagggggccggcgagccccaaggggccccccacggcagggctgggggggccccaggggaaggggaactcggggttttgggggccggggtcccactcctggacccactggttttggggccccttaaggccgccccccattttttccggtc

SEQ ID NO: 4796 - DNA, 412 bp, Oryza sativa
  Clone ID: PAT_MRT4530_11647C.1
agaatcatacttaagtgcttgctgatacaagatgggcatttatgttaaaatgaaatttccctaacctcacacatataaaactcaaaattcctatacccaacaacctattcttagcctaaattcccctgtacatttaaatgagcaaatgttctcgcgaaacaaaacctaaacgcctccccggcgctgtaaatcaaaactccatgaacaaactgggaacacacgaaaaaaggctggacacataattcaatcaaagcttaacaattaaaccaggctttttatgacgatgacggtttaattgccaccaaactcctagaaacccgggggcttgtaggccataaatctcaaaagctcccccttccttacctttgagaaacctattattcccaccaatgtttaagggaacgcttttttt

SEQ ID NO: 4797 - DNA, 456 bp, Oryza sativa
  Clone ID: PAT_MRT4530_11648C.1
atggcaccctgggggatgcgtattgagggcctcaacaaacaacaccttgatccactaccaccgtcgtgccgccaacaacgggtaattctagaccctcttgctctaaaactactgtcggagggtaaactccttgagcggggcactgtggggacccccttccttgttcgaaccagggacacgggtgaggctttgagagtcgatgttggaagatgcagaggggtcgggcccctcgggaatgatggagacacaagcgatttagacagggattaccacaaaggcccaagacctagcttcaagggaaaggaaaacattctttacaggctggcgcggggagcacccgcccaggccacatatgtgaaacagagcgtggagggggtcagggtggcccgacacctagaaagaatgggaggtagccgccgctccaactccgggcccgacccccgaggggggcgccac

SEQ ID NO: 4798 - DNA, 234 bp, Oryza sativa
  Clone ID: PAT_MRT4530_11649C.1
atggcttctcatgatgtgcctatcagtcatgttgttaaccaccatcaacaactcctggttgaggaaggagttacctgcagccatcatcaactcaccttcgaaggaatgaagcaagggcaagaatcactgattggggaggattttagggaaggcaaagcgacctcactagggagcaaattgagaaggggattggtaaatctgatatcattaccatttctgactataccattttga

SEQ ID NO: 4799 - DNA, 312 bp, Oryza sativa
  Clone ID: PAT_MRT4530_1164C.1
atgaagaggagcaatcgtgcagaagcactccccaaaaacctgatcacctgcctacccggtgcagatctcaggcgaagcgaacggttacaggttgaggtgcatccttattgccggcaaaataagttgagggagttctgcaaagggaaaggaatccaaatgtgcgcctactctccattaggtgcaaatggcacttcatggtgtagcaatgtcatggactgcccacttaaacagattgctttagaaaggggcaaaacagttgcccaggtatgcctaagatgggtgtatgagtgtatgagcaaggtgactgcataa

SEQ ID NO: 4800 - DNA, 1380 bp, Oryza sativa
  Clone ID: PAT_MRT4530_11650C.1
atgagcaccgccgccctccgcgcgtgcgccgtcatcttcggccgccgccgccgccttcgcgctggccgccgccggtcaccgccggtgaccgcgcgtgccgccgccggccgccatggccgccggtcggctttgaagccgagccgagccgtgcctagccgcctcccccgcgccgtccgatcgcctttgaggccgatccggaccgtcggtcccgtggaccgacggtggaccacccgcgtggtcccgatgacgaggaaggtggcggccatggatgccaaggaggcggaggaggtgatgaggaggaacgccaagctggaggcggcggcggcggaggcggcggcgagggaggcgcggctgcggcgggagctggaggcggcgctggcgaggctggcggtggcggaggagggggaggagcggctgtgcgtgcagctcggcgagctggaggcggaggcgatggcgcaggccgtcgagtaccagcagcggggtttcctaaaccatcggggccagggttaccgtgccccggcggtaagcacggttacggccgcgcgagaagaagaagagattgatggcggtggcggcgagagtagtggaggaggatccatatctagagaagaggaggagggatcgtggaaggaggtggtggtggagggaggtggctgtggccgccgcaacccgtcgcccaccgctcgccacccgctgcttgctgccaccactcccgctatattcgggggaggggagggcgccgccactgcccgtcgcccgccgccgcctgctgtctcccctctcgctggatctggtggaggggagggtgccgccggcacccggtgcctctcctcatgcgccgccgcctgctgcctcccctcctgccggatccagcggagggtgccgccgccgccagttgcctggcgcctctcctcatgcgccgccgcctgctgcctcccctcccgccggatttggcggaggggagggtgccgccgccacccggcgcctctcgtcatgcgccgccacctgttgcctcccctcccgccagatatggcggaggggagggtgctgccgccgcccgttgcccgccggctcgcctccagccatcgccacacgcgcgataatgtcggcttcgtcagcgtccgccgcccggccggctccttcaacttcgacggcacatgggagacgtggttcagcgtcgacagcggcagcgccgccaccacgccaccgccggcggccgccggattcacgcccgtcgtgttcaccgtcttctttctgtgtgtcagggcgatgcagagccaggtcgcgataagggaacattgtgtcgacggagacgtaaggagacgctacgacgacaggccagacgtcctccaccgcggtgtactccatgatgggaggtag

SEQ ID NO: 4801 - DNA, 1194 bp, Oryza sativa
  Clone ID: PAT_MRT4530_11651C.1
ctacctcccatcatggagtacaccgcggtggaggacgtctggcctgtcgtcgtagcgtctccttacgtctccgtcgacacaatgttcccttatcgcgacctggctctgcatcgccctgacacacagaaagaagacggtgaacacgacgggcgtgaatccggcggccgccggcggtggcgtggtggcggcgctgccgctgtcgacgctgaaccacgtctcccatgtgccgtcgaagttgaaggagccggccgggcggcggacgctgacgaagccgacattatcgcgcgtgtggcgatggctggaggcgagccggcgggcaacgggcggcggcagcaccctcccctccgccatatctggcgggaggggaggcaacaggtggcggcgcatgacgagaggcgccgggtggcggcggcaccctcccctccgccaaatccggcgggaggggaggcagcaggcggcggcgcatgaggagaggcgccaggcaactggcggcggcggcaccctccgctggatccggcaggaggggaggcagcaggcggcggcgcatgaggagaggcaccgggtgccggcggcaccctcccctccaccagatccagcgagaggggagacagcaggcggcggcgggcgacgggcagtggcggcgccctcccctcccccgaatatagcgggagtggtggcagcaagcagcgggtggcgagcggtgggcgacgggttgcggcggccacagccacctccctccaccaccacctccttccacgatccctcctcctcttctctagatatggatcctcctccactactctcgccgccaccgccatcaatctcttcttcttctcgcgcggccgtaaccgtgcttaccgccggggcacggtaaccctggccccgatggtttaggaaacccctagcgataccgagcaatgattcatacggccggaggatgccgtcgacgaaggcgaggcggtcggagagctccctgacccgctgctggtactcgacggcctgcgccatcgcctccgcctccagctcgccgagctgcacgcacagccgctcctccccctcctccgccaccgccagcctcgccagcgccgcctccagctcccgccgcagccgcgcctccctcgccgccgcctccgccgccgccgcctccagcttggcgttcctcctcatcacctcctccgcctccttggcatccat

SEQ ID NO: 4802 - DNA, 506 bp, Oryza sativa
  Clone ID: PAT_MRT4530_11652C.1
tgctctgtgttcgaagttgctgtccgggttcccctgtctccctttatccgctttggcttgtgtcccgtgtttctgcccggtcgtctttgtgacgctgtccaagtccgggttgttgtgccggaacaccggtaggctcaccgagttacgccataggatgtaatccatgctcagagtggccacatgctgtcacaaccatttggatgccagcatggcacacgtctgggtactctcgatggggagtatgaattggtgttggtggtgcacacccgtaccgtgacgtgagctagtcctgtcgcacagatggtggacgacctggtggtggaaacctttgctactattacgcacatgaaagattgtgaagtgcagttatagttttcgtaagtgacacacccggcaaacgtgtaatggaattatgctctacacggtgcagtcacatcacttaattagtcacttcactcactaccactacttagaaatccatttttcaaaaaaaaaaaaaaaaaaaa

SEQ ID NO: 4803 - DNA, 233 bp, Oryza sativa
  Clone ID: PAT_MRT4530_11653C.1
gcacgagctctacacccctcaccctaccctaccctaccctagcagcgcggcggccatggcgggacagaggagcacgaggtgtacggacaggagatccccctctacggagaggacagtctgacatgggccgcccccggcaactaggccagataacatgcagagagctctactagatgaatgggaggctcagggagatggacgaggaatccaacgcactgccatagatgcagact

SEQ ID NO: 4804 - DNA, 1781 bp, Oryza sativa
  Clone ID: PAT_MRT4530_11654C.1
atggagctcaggccgccgccgcccaagcaccaccaccaccgccgccgtcgcggcggcggcggcgaagacggcggggaggaggaggaggaggagactggccgcctgtcgctgcgcggcggcggcttctggcggcgccacgacggggaggaggaggaggagaagggcggcgggaggaggggcgagatcaaggaggtggacttcttcttgggcgccagcggccgcgatgtcgtcgtggcctcccggcggcacgacgacggcttccgcgggacgacgcatggcggcggcggtggcggcgacgtcaacatcgggctagacttgctgaccaccaccaccgccggcgcggcggcgggtggtgcggcggccggcgccggcgaggaggacacggggaagaatcatagaaaggaggcgacgacggcggcggtggatgtggagctccggcgagtggtggaggagaaccggcggctgcggggatgctggacgagctcaaccggagctacagcgcgttgtaccatcagtatctgcaggtcacgcagcagcaaaaccatcgccatcctgatcatcacctgattatgaacaacaacaacaaccggccttcactagctcaaacacaccggaccgcggcgacgacgacggcgacgacgcagcaattcctggagccgcgagcgtcgtccacggcgcaggccaccgccgacgcggacatggcagcgtccgacgacgaggccggccgcggcggcggcgacggcgacgcgtcgtccccttcgctgagcaacgccgccggcggcggcggcggcggcaacaagatgaggagggttggtggtcaagacgagactgcggcggcggcgccggcgagggagaacggcgagcagcaggcggcggcggcggccgagctgccgtgccggaaaccgagggtgtccattagtgatgggtgccaatggaggaagtacgggcagaaaatggcaaaggggaatccatgcccgcgagcgtactaccgatgcacaatggctatcggatgcccagtcaggaagcaggtgcaacggtgcgccgaggacaagaccgtgctgatcaccacctacgagggcaaccacaaccaccagctgccgccggcggccaccaccatggccaacaccacctccgccgccgcggccatgctcctctccggcccggctgccagccgcgacggcgccgccgccgccctgctcggccaccaccaccaccaccacccggcggcgatgttccaccagtccttcccctacgcctccaccatggccacgctctccgcctccgcgccgttccccaccatcaccctcgacctcacgcagacgcctgccggaggcgccggcgccgccagcctgctgcacgcgctccaccgcccgccggtcatccaccctggtgcggctgcccaggcgatgccgttcgccgtgccgccgcagctggcgatgtacctcccgcagcagagggcggcggccgcggggctgggcggcgccggcgccgccaggcagccgtcggtgatggagacggtgaccgccgcgctcgccgccgacccaaacttcacgacggcgttggcggccgccatctcgtccgtcgtggcgggaggggctcatcatcaggctctgtccaccacaccccgtggcagcgccgccggcgccggagacggcaacggaaacgggagctccgccgcggccgtcgccaccggcgccgcctcgccggcggcgacggccgaggcacctgcggcgtccggatcacctcctcggctcgcgacgcagtcctgcaccacgtcgaat

SEQ ID NO: 4805 - DNA, 2403 bp, Oryza sativa
  Clone ID: PAT_MRT4530_11655C.1
atgcgggtgaagggaacatacaggaaatatcttactactgatgttcaatttttgtctgatgtacttgtagaatcatccaccttcctctcttgcattgctctctcggcgggtgatcaccggagcgttctgtggcgcggcggctccatcgccgtggaggacgccgccgaaaacgtcctcgtgtcgccgagcggcaacttctcgtgcggcttctacaaggtggcgaccaacgcctacacgttcgccgtctggttcaccgcgtccgccgacgccaccgtcgcgtggacggccaaccgcgactcccccgtgaacggcgtcggctcgcgcgccgagctccgcagggacggctcgctggtgctgcaggactacgacggccgcgtcgtgtggagcaccaacaccagcggcacgccggccgaccgcgcccagctcctcgacaccggcaacctcgtcgtcgccgacgccgccgggaaccggctgtggcagagcttcgactggcccacggacacgctccttgccgggcagcccgtcacgcggtacaagcagctggtgtcggcgtcggcgaggggcttgccgtactccggctactacaagttctacttcgacagcagcaacatcctcaacctgatgtacgacgggccggagatcagcagcaactactggccgtcgccgttcaacaagtggtgggacaacaaccggacggcgtacaacagcagccggtacggcagcttcgacaggcgcggcgtcttcacggcgagcgaccagctgcagttcaacgcctccgacatgggcgacgagggcgtcatgcggcggctcacgctcgactacgacggcaacctccgcctctacagcctcgacgccgccgccgggcgctggcacgtcacgtgggtcgccgtcgggaggcagtgctacgtgcacgggctgtgcggcagcaacggcatctgctcgttccgtcccgggccgacgtgctcctgccccgtcggctacgtgcccaacgacgcgagcgactggagcaagggctgccggcgctcgcccgacgtccggtgcggcggcgacgacgtcgtcgacttcgtggagatgccgcacaccgacttctggggcttcgacgtcaactacaccgccggcgtcacgttcgacgcgtgccggcggctctgcctcgacgactgcaactgcaaggcgttcgggtacaggccgggcaccggcaggagtgtcaagaaccagatgatcaaccagtcgtcgtcatttctgcacttcgatggacacgcctgcaccgtggacgaacgggacgctagcgtcggcagctcgtacctgcatggcaggagcaacgagataaacttcatctacttctacagcttcctcgcggtcgtgttcgtcgtggaggccattttcgtcgtcgtgggttacctgtttgtcttccgagctgacccggtggcggcaggacgggtccgtgacgacgggtacagcttggtgttcagccatttccggaggttcacctacgacgagctgtcagacgcgacgtgcgggttcagagacgagattgccaagggcgggacgggatccgtgtacaagggcgttcttgaggatggccggagcatcgccgtgaagcggctgggagagctgacgcaagccgacgaggtgttccggtcggagctgagcgtcatcgggcggatcaaccacatgaacctcgtcaggatatggggcttctgctcggagcacccgcaccgcctcctcgtctccgagttcgtcgagaacggctcgctcgacaaggccctcttctgcgacgacggcgagagctccggtgtggtggtgttaccatggcggtcgaggtacaagatcgccgtgggcgtcgcgaaggcgcttgcgtacctccaccacgagtgcctggagtggatcgtgcactgcgacgtgaagccggagaacatcctgctcgacggcgacttcgagcccaaggtgacggacttcggcctcgtcaagctgctgagccgcgacgccggcagccacatggcgctgtcgcgggtgcaggggaccagaggctacattgcgccggagtgctggacggtgggccgcccgatcaccggcaaggccgacgtgtacagcttcggcgtcgtgctcctcgagctgctcagggggcagagggtgtgcgactgggtggcggcggcggacggggcctgggatctccagcggctggccgcgtggctcaaggagaagctgaagcgcgacgacgacgaggaggaggtgtcaacgtggctggaggagctcgtggatgcacggctgcgcggtgatttcaaccatgtgcaggcggccgcgatgctggagctggcagtttgttgcgtggacggtgaaccaaacaggaggccgagcatgaacgccgttgcgcagaagctcctctcgctgcatgatactcgctag

SEQ ID NO: 4806 - DNA, 2572 bp, Oryza sativa
  Clone ID: PAT_MRT4530_11656C.1
atgccctgtggggttaggatacacgatgaatcgagtccatggcttgcacttgatcgtactcacctccctgtgttgcgttgctctttcggcgggcgagggcgatcgccgcagcgttctgtggcgcggcggctccatcgccgtggaggacgccgccgacagcgtcctcgtgtcgccgagcggcaacttctcgtgcggcttctacaaggtggcgaccaacgcctacacgctcgccgtctggttcaccgcgtccgccgacgccaccgtcgcgtggacggccaaccgcgacacccccgtgaacggcgtcggctcgcgcgccgagctccgcaaggacggctcgctggtgctgcaggactacgacggccgcgtcgtgtggagcaccaacaccagcggcacgccggccgaccgcgcccagctcctcgacaccggcaacctcgtcgtctccgacgccgccggcaaccggctgtggcagagcttcgactggcccacggacacgctcctgccggagcagcccgtgacgcggtacaggcagctcgtgtccgccgaggcgaggggctccccgtactccggctactacaagttctacttcgacagcagcaacatcctcaacctgatgtacgacggaccggagatcagcagcaactactggccggaccccttcaagaagtggtgggacaacaaccggacggcgttcaacagcagccgccacggcagcttcgaccgccgcggcgtcttcacggcgagcgaccagctgcagttcaacgcctccgacatgggcgacggaggcgtcatgaggcggctcacgctcgactacgacggcaacctccgcctctacagcctcgacgccgccgccgggcgctggcacgtcacgtgggtcgcggtccagaggcagtgcgacgtgcacggtttgtgcggccgctacggcatatgcacgtacagccaaggcccgacgtgctcctgccccgacggctatgtgcctcacgacgcgagcgactggagcaagggatgccggcgcacgttcgacgtcaggtgcggcgaggacgtcgcgttcgccgagatgcggcacaccgactactggggcttcgacctcaactacaccgccgggatctcgtttgacacgtgccggcgtctctgcctcgtcgactgccgctgcgaggcgttcggttaccggcagggcaccggtgagtgctaccccaagatctctctctggaacggccgggttatgagcattccgtaccaaaccatctacctcaagttccctacgggtgccaagaacctgaacccgtccttgctgcacttcgatggccacacctgcaccatggacgaacgggacgctacggtcagcagctcgtaccttcatggcaggcgcaacacgataaacttcatctacttctacagcttcctcgcggttgtgttcgtcgtggaggccatttttgtcgtcgtgggttacctgtttgtctttcgagctgactccgtggcggcaggacgggtcggtgatgaagggtacagcttggtgtttagccatttccggaggttcacctacgacgagctatcagacgcgacgtgcggattcagagacgagattgctaagggcgggacgggatccgtgtacaagggtgttcttgaggatggccggagcatcgccgtgaagcggctggacgagatgacgcaggccgacgaggtgttccggtcggagctgagcgtcatcgggcggatcaaccacatgaacctcgtcaggatatggggcttctgctcggagcacccgcaccgcctcctcgtctccgagttcgtcgagaacggctcgctcgacaaggccctcttctgcgacgacggcgagagctccggtgtggtggtgttaccatggcggtcgaggtacaagatcgccgtgggcgtcgcgaaggcgctggcgtacctccaccacgagtgcctggagtggatcgtgcactgcgacgtgaagccggagaacatcctgctcgacggcgacttcgagcccaaggtgacggacttcggcctcgtcaagctgctgagccgcgacgccggcagccacatggcgctgtcgcgggtgcaggggaccaggggctacattacgccagagtgctggacagttggtcgctcgatcaacggcaaagccgacgtgtacagcttcggcgtcgtgctcctcgagctggtcagggggcagagggtgtgcgactgggtagcggctgcggcgacggccgacggggcatggaatgtccagcgactggccgtgtggctcaaggagaagctgaagtgcgacgacggcgagctgccggcgtggctggaggagctcgtggacgcgcggctgcgcggtgacttcaaccatgtgcaggcagccgggttgctggagctggcggtttcgtgcgtggacggtgagcctagcaggcggccgagcatgagcacggttgttcataagctcatctcgttggacacgatagaacatcatctctacgccactcatgagctagcagcaaatgcagcagtcgtgagtctcgttggcgacgttgggggcatcaattgcgtctgccgtgttgaagacttgaattgtttttcttgttag

SEQ ID NO: 4807 - DNA, 375 bp, Oryza sativa
  Clone ID: PAT_MRT4530_11657C.1
atggtgcgcagttggccagttgctgaaaatgaaaaacgaagaaaagtgagcgcccagcgctatcatgtgctgctggtcaagaagcacgactacacagcctccctcttcactgcacctgtgaacgcgcctgcgccggcgaaggagcatggatgctgcgagcgcggccatgcggcgcggcgcgcatctgcagtaggcacgacgagggcatgggtcgggtggttgaccccttggctcgatgagcggcccaagggctacctcttcaagcggtcgtcgccgctggcaggggagttccgtaaacctggccgcactagaaagggcgcaaacaggcaacagcaacaggagctgctggtgtccgtggaggcccaggccgagtga

SEQ ID NO: 4808 - DNA, 405 bp, Oryza sativa
  Clone ID: PAT_MRT4530_11658C.1
ttttttttttttttttttttttttttttttttttttttttttttttttttttttttttttttttttttttttttttttttttttttttttttttttttttaacaaaaaaaaggggagcgaggtaaaaaaaccccccgcccaaaaggcaaaccaaagaaaatccggggggatccccccccaaaattaaaaaaggccctccccccccaaaaaaaggggggggggaaatatcccccagaagcaggggggcctccaaaaaacccgcccaaaaacaaaggggggggcgaaaaaaacccccaagatgctggccctaaaacaggggcgccccttattttccagaccccagagacgtacgaggggaaacatcccaaaacggctcccttaaaaagggctttatttgcttgcccc

SEQ ID NO: 4809 - DNA, 1627 bp, Oryza sativa
  Clone ID: PAT_MRT4530_11659C.1
atggcggtgctcgcgcggctgggcgtcattgtggtgttgtgggcggtggtggcggaggggattcttgaccccgtcgacttcctggcgctgcaggcggtgcggcggtcgctcgacgatatgcctggctcgtcgttcttcgaagcgtgggacttcacggccgacccgtgcgggttccccggggtgttctgcgacggcaacaaggtgtcggcgctggcgctcggcgacccgagggcggggtcgccggggctgtccgggcggctcgaccaggcgctggggcggctgtccgcgctcaccgagctgtcgctcgtgcccgggcgcgtcgaaggcgagctcccggagtcgctcagctcgtgccggaacctccgattcttggccgtcagcaagaacctcatctccggccagataccggacggcctcggcgggctgtccaacctccggacgctcgacgtcagcttcaaccagatctccggcaccatcccggcgtcgatcgccacgctgccgtcgatcaccaacctcatcctctgccacaaccatctcaccggcggcatcccgtcgttcccggactcgtcgccgctcatccggctcgacctcaagcacaacgacctctccggcggcgtgccgaacctgccgagcacgctccagtacctctcgctctcggcgaaccggctcaccggcaccgtcgactccgtgctcccccggctcactcggctcaactacctcgacctcagcatgaaccagctcgacggcccaatcccggcgtccgtcttcacattgccgctgtccgtgctccagctgcagcgcaacttcttctccggcctcctccagccggcgaacgacgtgacgatccaggtggtggacctgagctacaaccgcttctggggccccgtgtcgccgctcctcgccggcgtggggcagctgtacctgaataacaaccggttcaccggcgaggtgccggcgcggctggtgcaggagctggtcggctccggcgggctccaggtgctgtacctgcagcacaacttcctcaccggcatcgagatttcgccggcgtcgtcgctcccctccagcgtctcgctctgcctcatgtacaactgcatggtgccgccggtgtacgcgccgtgcccgctcaaggccggctcgacgaacacccggccggccgaccagtgcccggagtggaggggctaatcaaagctggcaacacaacgccgacgccattgccggatcgcctcggatcgtccaagctcaagaaaaccggaaaagaatggaggagattgcaaatggcggtctccgattctttgattaatttgtccagttactagcgttccaatgtggattactattctttttggttggggggagatggatggagatagtcacagacaagaagtaagttccttaataatcttgggtttataggcgtaatttctttctcctttttttgtgtttaggtggtgtatgttcttttgtgtcccctgctgtatagttgcgtgagtagtaaaacattggctcttgatgttatgtgaggtggcgacgatcgattgatgtatctgatgatgatcatgatgatggtggtgttagaaatctgtgatgttatttatatatcgcattgccattgggcaagcatagtatc

SEQ ID NO: 4810 - DNA, 517 bp, Oryza sativa
  Clone ID: PAT_MRT4530_1165C.1
gccggcgagcgcgcggcggcaggcgagagagcggcggccggagctgcacgacatcgccccccctcctccggcgccaccgcatcgatctgcacgagttgcggcgacggcgagctcacagccgcgggacacggtcagcgtggcgctgacggggcccgggactagagctcgcagtcgcagccgccgctgcccacttccccaatcccctccatatgcatcaaagtttttgatattcatggcgttatgctcttgttctggtggattgattgattggtgtgctagtgcggatgatttgtgcaaagacgacgcgaagaacgcccacttggtgtctctggacgtcgccgcggagaggctgcggctgttcaaggccgacctgctcgactacggtagcgtggcggcggccatcgccggctgcgacgacgtcttccatgtggcctgccccattgcaactcgtgcagatcaatgcggcagcgcagcagaagtcttcgtcggcggcggggccgaggtcgtgcagctctag

SEQ ID NO: 4811 - DNA, 390 bp, Oryza sativa
  Clone ID: PAT_MRT4530_11660C.1
atggggacgggtgcatggttgactcggtccaccgcggccggggcagcaccgtggacccggaccacgggagtggtccacgggaccgacggcctaggcagcatggctagggcacggcacggctcaaagccggccagccgaacgacggcgatgggcagcgcgcggccactggcggtgtggaatggtggcaagcggccgagaggcggcgggaagggggacaggaaaggaagggggacgggggaggagggatcctcaccggaagcagcagccggcacggaggaagacgatgacggcgacgattcggtggcttccgacgaaggaggaggggaggccgaggggcggctacacctggggaagctattggagggattagggaaaagggagaaggcgtga

SEQ ID NO: 4812 - DNA, 170 bp, Oryza sativa
  Clone ID: PAT_MRT4530_11661C.1
aaacctgaaggtgatgcagggcagtgagagtgatataatgataaaaccacccacaaccatagtgatgggacacctgtgggtggggtggatgtgctgatgtgcagatgatgcaagtgacctgaaaatgaaaggttgacaaatgttgcttgaaaaaaacagaatgatgaaaa

SEQ ID NO: 4813 - DNA, 140 bp, Oryza sativa
  Clone ID: PAT_MRT4530_11662C.1
gtcgacatcgtgctcgtccaatcttcctcgccccacaaaagggacttttgtcgatgtctgtctgtacaaatgatgaaatcggcggtggttttattctatgtaagatacataactcataaatgaagacggttttcttcata

SEQ ID NO: 4814 - DNA, 708 bp, Oryza sativa
  Clone ID: PAT_MRT4530_11663C.1
atggggaccgtaccccgaaacccgttggggaaaaactctattaggggctctagagctagtccagctcgtatatgtctgctcacacaggacggtggagtggtcgagtggataaggattccacatcgacgacgacgactcagatccaatcgaagcagcgagacgacgacgcctctacgctgcgctgcgcagatcagccatgctccgccgaccgccggtgatcaggtgatgcctctcgaatcaaccacgctgggcaacgccgcgtggatcaaccagctctgtggtgcttcgccgtcatcacatccacgctgcagctcctgccgttgccgcctccgcgccgcgcgacagcgcttggtttcgtcgccatctccccgccgatgctttgctcctccgcatgcgctaccgccgcctctccgcatcacgccgcctctgctcgactactcctcgcaccacactgacgctacctctcagcatggcagacgcttctccttctcaccgtcgggggtgaggaacccagcgggtgtccagtacccgcacggggacggggacgggagaaaaccacgccccgtgtgcggggatagggacagggaacgggggagtttttccgctagggggcggggacggtcagcttccctactacgaagtttaccccgtccttactttggaaacatggggagggggagtttcgtagggagccagaaagataagtag

SEQ ID NO: 4815 - DNA, 279 bp, Oryza sativa
  Clone ID: PAT_MRT4530_11664C.1
atggcggtgaccgggagggaggggacggcgccggcgggggtgcgagtggggcccggttgtcagtgggtcgggatcgccggcgcggcctgcgtcggccatggcccatcggggggaggagcaatgtacggcgccgccactggctcaccggcatgcgccgccacgcacgccgccggcgaggtcggtgcgtctcgctgctccaccgtcttctccacctccggtctccgtctcgcccaccgacttgttctactgttcacatgtcggccgctctttgctttttga

SEQ ID NO: 4816 - DNA, 570 bp, Oryza sativa
  Clone ID: PAT_MRT4530_11665C.1
ggtatgccggatcatactaactacaagatttcaagatttgcgcaacactgttctaagaaagaaatgtacatgtaccatttcaaaggtctaacagacgaagatgctcgtgagctattcttaactaaggagcgcccggtgaccacgagcaggaggatgcatgccgccggtggcggcgcgccagcgacgacacgcgggaggcgcacgccgtcgttggcggcgcactcggcgacgacgcgtgcggcgtgcctgggacttggtgccaacggctggggatttctttttttttgtttcaatttttccagatctagagctaaaaactagccaacatttcccacgagtctccactccacaggagctagctcccactggagtaagagtttgaagctagaagttggagtatggagccctaccaatggggccttcatgtggaagcggcgatcatggcgggtgggccggggagctcggttcaacgccgtgagggagtaacagctgactcgtgttccctggacagagatcgcgttgctatttcataagaggagaattccacctctaaaaaaaaaaaaaaaaaaa

SEQ ID NO: 4817 - DNA, 266 bp, Oryza sativa
  Clone ID: PAT_MRT4530_11666C.1
ctagttctgatcgcgatgcggcgcccttttttttttttttttttttttttttttttttttttttttttttttttggattaattatgtaataatataatggcggcgcttctttctagttcccattccattttggttggatgtaaacaatagaagtggggcatttttttttttgtaagggctcgttgtatattattatatatatgccatgttatttatttgggggggctattgccgtctgtaataacaaaaataagagttgttcatgc

SEQ ID NO: 4818 - DNA, 577 bp, Oryza sativa
  Clone ID: PAT_MRT4530_11667C.1
gcttttattgaatttgagacaaaggaggcttgtgagcgggcattcttcaagatggacaattgtttgattgatgatcgaagaatacatgttgactttagtcaaagtgtttcaaaactgtggggtcagttcagacaaagcaaaagaaatgcaaataaagatggatgcttcaagtgtggcgcccctgatcacatagccaaagactgtgaccagggcactgagcagaaaaacaaaggcccaagttatgtcctgaaagatgaaaacactcagcgtggtggaaataaccgtcgaagctatgatcttgtctttgatgaagatggtgaaaattatactgatcagcaagatcctggaagtactggccgaagaaagattcaaagaacagatgatcgcaaatcagggctgccacctcggggtgaccatgacaggattagccggagaggaactcacagtgatgagaatggtagagaaggtggtaaagaaggtgatagggaccgagggattcgtaagcacgaggactaccaccgttacaataaatctggtgaacggagctctagtagatacgatgatcgtggctacagca

SEQ ID NO: 4819 - DNA, 1803 bp, Oryza sativa
  Clone ID: PAT_MRT4530_11668C.1
atggagttgggtcgaccggggtgtccagttgatcggcttccggattcactgcggcatgaaaggggggctgcccgttgcctgctggggacggggcgaaccctaagctttatgcaaaagaaccttagcctcccttggatataccctgcatcatacctcctcttccggtatgacttgctgagtacaagcttcaagggagatctgttccacacatacatcctgaaggggcagacaccgaacttcaacacattcctgaagctaagggatcactgggacgagttcgttgcttacaagataggtcaacaagggcaggctatgatggaaacaaacaaagaaaatgccgccaagaagaagtaccatcaccacttggggtcaggcggctatagcgtcgcgatgccgaagtgcgaggagatggaggcaagcttgcttgagagagagaaggacgagctgtcactcgccctacagactccggagcatccaagacgaacacgagggaaaggggtgattccttggaagattggattcaaggaggacatccacacgtacaggagtcggatgaggagcaagagagataccgaggcgaagattgaagatcttgagtacagggtatcgagctacgagctcagcatgcaagaggaggtggtaaggaaggtggatgaacgcatggccgcacatcggtcccatgatccccagccgaccattcctcctgcaatgatgagcccttcaggcaatcgtagcagctgcgcctcaacggggcaggtaggatcacagagcatggacgccatccaaacccaggacgaaaccacctgcctcattgatgacatcactcagcggacaccatgtgaggtgcatattcccttcaagaacttatcaataaaggtggcgtcgggcatggccatcctaacggacccttcaaagacttaccactgcaggccgattccagtaggatactccaaggtacctgcaccgtctcctcctcaggctcctgcaccgactcctcctcaggctcctacaccaactcctccgcaagctcctcgtccggcaccttccaagtcaagggccccccaagctccaccgcctgcccccacaaaggcaatgaagaaggcgaaagttgacgccgccaaaaacaaggacccggggtacgattgcacgcaagagaagcttgacgcttatgtggcatcagaagtcaggagacaattgaagcctcgaagtccagaaaataagattcctatagacccgagtgtcaagaacttcttcaggggcgcaccaatcgaaaaggcggaagtgaaatacatgtacgaacttggtaaaccgcttgtcaagcctgagcagctgcagtccctaccaacacaaatgtaccaattccatcaactgtacatggagatgagcgccactagtagagagatgatcggagtgaggatcagggacacagacttcatgcaaggggaagatattctctggatcaattttaaggaatggagattcaacgggcccgacagcgggggggtttttgatactggattcgtcgaccctcggaaagtaaacgtcgcaatgctcgaccagtatccgcaagccacagaggacaatctcgtccatctccttaaagcgcagcattacaagacgtttatactattgccgtacaacacagaggcttggtatcggttccgacatttggtccgctgcaaatggagagaaagacttaggcggaagtttaactttcatgttattcacatgagggataagctcacacataaggaatttatcgcggcggttcaagaacaacttatgggattcatcaacgaataa

SEQ ID NO: 4820 - DNA, 1251 bp, Oryza sativa
  Clone ID: PAT_MRT4530_11669C.1
atggccgcacatcagtcccaggatccccagccgtacatttctcctgcaatggtcagcccttcaggcaatcgaagcagctgcgcctcaacggggcaggtaggatcacatagcatggacaccatgcaaacccaggacgaaaccacctgccccgttgatgacatcactcagcggacaccatgtgagctgcatattcccttcaagaacttatcaataaaggcttttgcaccgtcttctcctcatgctccagcaccgtctccacctcaggctcctgcaccgactcctcctcaggctcctgcaccgactcctccgcaagctcctcgtctggcaccttccaagtcaagggccccccaagctccaccgcctgcccccacaagggcaacgaagaaggcgaaagttgacgccgccaaaaacaaggacccggggtacgattgcacgcaagaggagcctgatgcttatgtggcatcagaagtaaggagacaattgaagcctcgaagttcagaaaagaagattcctatagacccgagtgtcaggaacttcttcaggggtatgtctgcacctgccaaggaggccataaagctatcggcggactatgagcgaacacttaagaaagcatcttctggaaagtccaaaccagtccctcagcttggagagcaaccaaaccaggagatcgagccgttggtgaccggtgaagaatttggaatacaagattttattaatgacaccaggttaactacggatcaattgctacgaggcgcgccaatcgaaaaggtggaagtgaaatacatgtacgaactcagtaaaccgcttgtcaagcctaagcagctgcagtccctaccgacacaaatgtacaaattccatcaactgtacatggagataagcgccaccggtagagagatgatcggagcgatgatcagggacacggacttcttgcaaggagaagatattctctggatcaatttcaagggtatctacgaactataccagctggacgccctcgatgtctctattatgagttgttggactttaatggagattcaaagggcccgacggtggggggttttcgatactggattcatcgaccctcggaaagtaaacatcacaatgctcgaccagtatccgcaagccacagaggacaatctcgtccatctcctgaaggcgcagcattacaagatgttcatactattgccatacaacacagagttagtttttactgtcttcctaccaaatttcattcccgtacgaacaagctaa

SEQ ID NO: 4821 - DNA, 1737 bp, Oryza sativa
  Clone ID: PAT_MRT4530_1166C.1
atggcggcgagggtggtgtgggtgaacgggccgatcgtggtcggggcggggccggcggggctgtcggtggcggcgtgcctgcgcgagcgcggcgtgccgtcggtgctcctggagcgcgccgactgcatcgcgtcgctgcggcagcgccgcacctacgaccgcctccgcctccacctccccaagcacttctgcgagctccccgggatgcccttcccggacggctacccggagtaccccgaccgccgccagttcgtcgactacctccaggcctacgccgcgcgcgccggcgtcgagccgcgcttcaaccagtccgtcacctccgcgcgctacgacgacgccgcggggctctggcgcgtgcgcgccgaggacgtcagcgtcgatgcggcgggcgacgtcacggagtacatcgggcggtggctggtggtggccacgggggagaacgcggagcgcgtcgtgccggagatcgacggcgcggacgacttcgagggccccgtgtcccacgtcgccgagtacaagtccggcgccgcgtaccgcggcaagcgcgtcctcgtcgtcgcctgcggcaactccggcatggaggtctgcctcgacctctgccaccgcaatgccctccccgccatggtcgtccgggactcgaaggtgcacgtcctgccgcgggagatgctgggcgtggcgacgttctcggtggccgtcttcctcctccggttcctgccgctgtgggtggtggacaggatcctggtcgtcctggcatggctcttcctcggcgacctcgccaagatcggcatcaccaggccatccagggggcccctcgagctcaagaacaccagggggaggacgcccgtgctcgacatcggcgcgctcgccaggatccgctccggcgacatcgaggtcgtgcccgggatcaggaggctcctccgcggcggcgccgagctcgtcgacggccgccgcgtcccggccgacgccgtcatactggccaccggataccaaagcaacgtcccccagtggctcaagggaagtgacttcttcacacaagaggggtacccaagggtgccattcccagatggttggaagggggagtcagggctctactctgttggcttcacaaggagaggcctctctggtgtctcctcagatgctgttaaggttgcacaggacattgccatggcatggaaccaccaaaccgccaccacaagatgattgatttaacttgctaaggaattaaccatgatcagcttgcttactgcaaacaaattgcaattaatcaaatatcttgaggcgcaacatggcactcaactggctaagaactgcatgctacaaactctgttccagagacagacaccaaaatattcagaaaccaagtccagggtccaaaaaaaaactataaaacaggggggagatgaagcttcagagtagatgaagcttcagagttcaggagatggatgccacaacaaaggggaaaaaaaggggtgctatggatgctaggtttaacattgatgaggaggccagattaagatgcatcaagtagagcccaaattttgttgtacccatgggcctttatgtacagaatgttatgtagtggagcttgtgtacatctaatggttggtagggaatctagagttgacattcatatgtacttggttaatgtttacgtaatatggaggtgatgatgatgagacgcaatttcgatttataatatttcttaagcttttttaaaaaaattaataaatagcctttagt

SEQ ID NO: 4822 - DNA, 2882 bp, Oryza sativa
  Clone ID: PAT_MRT4530_11670C.1
atggagtataaaattatgtggtccaaagcgaggcgagctctatccattcgcgctcccggatcaggtggccaccgaggcgccaaacctctcctaaacccccgcgtctctcaccgccatgctcgtggccgcctcccgcgatgccgccaccgccagctagaacccacccgaaccctccccttcctccacctcctcgcctcccaccgcgcgccgcagccgctcccgctcacgccggcgcacggccacctcccgccgcggaagcgtccccgcggagtcggctccgcagcggcgccgccgccgccgcgtgccgccgcctccgcggaggccacctactctgaccggagcgccgcgctgcgggcgctctgtagccatggccagctggcgcaggcgctctggctcctcgagtcctccccggagccgcccgacgagggcgcctacgtcgcgctgttccggctctgcgagtggcgccgcgcggtcgacgccgggatgcgggcgtgcgcgcgcgccgacgccgagcacccgagcttcgggctccgcctcgggaacgctatgctcagcatgctcgtcaggttcggggagatatggcacgcgtggagggtgttcgccaaaatgcctgagagggacgtcttctcctggaacgtcatggtaggcgggtacggcaaggtgggcttcctcgaggaggcgctggacctgtactacaggatgctgtgggcagggatgaggccggatgtctacacgttcccctgcgtgctgcgtacctgcgggggcatccctgactggaggatggggagggaggtgcatgctcatgtgcttcgatttggttttggagacgaggtcgatgtattgaatgctctggtgaccatgtatgcaaaatgtggggatattgtggcggcgaggaaggtgtttgatggaatggccgtgacagactgcatatcatggaatgcgatgatagctgggcattttgagaatcatgagtgtgaggcagggttggagttgtttctcaccatgctggagaatgaggtacaaccgaatctcatgacaataaccagtgtgactgttgcatctggaatgttgtctgaagtgggttttgcaaaagaaatgcatgggtttgctgtaaagagaggtttcgccattgatgttgcattctgtaactcgttgattcagatgtacaccagtctcgggaggatgggggatgcaggtaaaatattctcaagaatggaaactaaagatgccatgtcatggactgcaatgatatcggggtatgagaaaaatggtttcccagataaagcccttgaagtttatgcactgatggaattgcataatgtaagtcctgatgatgttacaattgcaagtgcccttgctgcttgtgcctgcttggggaggttagatgtaggcatcaaattgcatgagcttgctcagaacaagggattcatcaggtatgttgtcgttgctaatgcgctccttgaaatgtatgctaaatccaagcacattgataaggctattgaagtatttaagttcatggctgagaaggatgtggtatcatggagttcaatgattgctggattttgctttaaccacaggagttttgaggctttgtactatttccggtatatgctaggacatgtaaaacccaattctgttacatttatagctgctctaagtgcttgtgctgctactggggctttgagatctggtaaggaaatccatgcatatgttttaaggtgtggtattggatctgaaggttatgtacccaatgctcttctagacttgtatgtgaaatgtggccagacaagctatgcttgggcacaattcagcgtgcatagtgaaaaggatgttgtctcttggaatataatgctttctggttttgtagctcatgggcttggagatattgctttatcactctttaaccaaatggtagaaatgggagagcatccggatgaagttacatttgttgctttattgtgtgcttgtagtagggctggaatggttattcaaggctgggagctttttcacatgatgactgagaaattttcaatagttccaaatctcaagcactatgcatgtatggtagatctattgagtcgtgttgggaaattaacagaagcttacaacctcataaatcgaatgcctatcaaacctgatgctgcagtgtggggagccttgttgaatggatgccggatccaccgacatgttgaacttggcgagcttgctgcaaaagttatccttgagttggaacctaatgatgttgcatatcatgttcttctgtgtgatttatatactgatgctggcaaatgggctcaagtggctagagtgagaaaaaccatgcgagagaagggattggagcaagataatggatgtagctgggttgaggttaagggagtaactcacgcatttcttacagatgatgaatcacatccacagataaaagaaataaatgttgttctacatggcatatatgagcgaatgaaagcatgtggttttgctcctgttgagtccttagaagataaagaagtatccgaggacgacatcttgtgcggtcacagtgaaagattagctgtagcttttggtttgatcaatactacacctggtaccactatttctgtcacaaagaaccgatacacttgccagagttgtcatgtgatattcaaggcaatttctgaaattgttcgaagagagataactgttagagacactaagcaattacactgctttaaggatggagattgttcatgtggagatataggatatggatgaaaaacttatagaaagagggctgtataacaatacaagatgtggccatgcattattatgcatctgctgcaagcactgctacagaaatcctttgcaacaacagttattaaccacgtctaacaatacaaatactc

SEQ ID NO: 4823 - DNA, 2535 bp, Oryza sativa
  Clone ID: PAT_MRT4530_11671C.1
atgaacttaacaaaagacgtcgtcatcgtcgtccctcaagccggagtgtacttgaacgaggaagggaacgtggagagggatgcggaggggaaccaggaagggaacgtggagagggatgcggaggagaacgaggaggaggaggctagtggaagtcaaccctccgctggacagaagagggcacgcggacaacgaggtgccgcgaagaagctagagggtcggcacatcataacggaagtggacgaagacggccgacctagtgccccggcagaagcagccaagaactacgtacgacacagcggttgggttgtgcgggataacgtgcctgtcagtacggtgtactggcgcaaaacaagggcatgcggagatcatgagagctttgtcccagattcggagaaagagatgctgtggaccacaatgctcgagacattcacccttcccgcgggtacagaggacaaagtgaaaaggtggactctaaagaaaatagcagaacagtttcagagcttcaagagagttctgtaccagaaatacatcctgaaggggcagacaccgaacttcgacacattcccgaagctaagggatcactgggacgagttcgttgcatataagacaggtcaacaagggcaggcgatgatggaaagaaacaaagaaaatgccgccaagaagaagtaccatcaccacttggggtcaagtcgctatagcgtagcgatgccgaagtgggaggagatggaggcaaacttgcttgagaggggtatcgaaccggccaccgctaaatggccgtatcgatcgaagttctggtactatgctcacggtggaacgctcaacccagttgatggctccctggtcttcagcgatcagatacgcgaggctgcacgtcgactaacggacgcagcggaagcctcttctcagggcacgtttcgacccgatagagagaaggacgagctgtcactcgccctgcagactcccgagcatccaggacgaacacgagggaaaggcgtggttccttggaaaattggattcaaggaggacatccacacgtacaggagtcagatgaggagcaagagagataccgaggcgaagattgcagatcttgagtacagggtatcgagctacgagctcaccatgcaagaggaggtggcaaggaaggttgatgaacgcatggccgcacatcggtcccatgatccccagccgtacattcctcctgcaatggtgagcccttcaggcaatcgtagcagctgcgcctcaacggggcaggtaggatcacagagcatggacgccatgcaaacccaggacgaaaccacctgccccgttgatgacatcactcagcggacaccatgtgagctgcatattcccttcaagaacttatcaataaagatggcgtcgggcatggccatcccaacagacccttcagggacttaccactgcaggccgattccagcaggatactccaaggtcgaagttgagttggtggaaggcgcgtacgaggacctcgagttggactaccctggaggagacggctcctgcaccgtctcctcctcatgctcctgcaccgactcctcctcaggctcctgcaccgactcctccgcaagctcctcgtccggcaccttccaagtcaagggcccccaagcttcaccgcctgcccccacaagggcaacgaagaaggtgaaagtcgacgccgccaaaaacaaggactcggggtacgattgcacgcaagaggagcttaacgcttatgtggcatcagaagtcaggagacaattgaagcctcgaagtccagaaaagaagattcctatatacccgagtgtcagaaacttcctcaggtgtatgtctgcacctaccaaggaggccataaagctatcggactatgagcgaacacttaagaaaacatcttctggaaagtccaaactagtcccccagcttggagagcaaccaaaccaggagatcgagccgttggtgaccggtgaagattttggaatacaagaatttattaatgacaccgggctaactacggatcagttgctacgaggcgcaccaatcaaaaaggcggaagtgaaatacatgtacgaactcggtaaatcgcctatcaagcctgagcagctgcagtccctacccacacaaatgtataaattccatcaactgtacatggagatgagcgccaccggtagagagatgatcggagcgaggatcagggacacggacttcttgcaaggagaagatattctctggatcaatttcaaaggtatctacgaactacaccagctggacgccctcgacgtctctattatgagttgctggattttaatggagattcaaagggcccgacggcggggggttttcgatactgcattcatcgaccctcggaaatttattcgcatgagtgataacctcgtacacaaggaatttatcgcggcggttcaagaacaactcatgggattcatcaacgaacaaatccttgatcccaagagtgaattctactacgacggaaatacaattcataggtccttagcttctgagataacgactactgcgtcaaaatcgtag

SEQ ID NO: 4824 - DNA, 330 bp, Oryza sativa
  Clone ID: PAT_MRT4530_11672C.1
gggaaagaaaggaccttgacattagggttccaccaggcccaaatgggggccccctgttcaaaacacacaggcaggaacaacaacaatactttggacacgaattcaaatttggaagtacaaggctacaaaaagaatgggggcgaccatttgggggggccgattaaccgaagccgtttgggagacactcccaaaagggccgtttgcaggaaaaactttggagctcccagggaagcccggaatattgccgccagccttcccaacttctggggcaggttatggaccaaggaataaaccttggtttaccggaattgggggccccccgaggggggg

SEQ ID NO: 4825 - DNA, 1713 bp, Oryza sativa
  Clone ID: PAT_MRT4530_11673C.1
atgacgatagacaataatttattccgtaaagcccatttcacggttctgcaacaatcttcattggtggctccttacatcgaggagcacttggctctaattcgcgccagaaacatcgaactggccttcctggcgaggggaccatctggctcgatcgcgacattccagggatatgagatcaataggtacacattgtacacgagagcccaagacatgaagagcacgaaccaaaatagcgttgttcgtatcgatgccatgggacacgatggaacaactggcacgtattacggtgtcatcgaggatatatgggaacttgactatggtcctctcaaggtccctctgttccggtgccaatgggttaggttgactggtggaggcgtaacgattgatgacagtgggatgacaacggttgaccttaacatggttggatactcggacgaaccttttgtccttgccaatgatgtaacgcaagtcttttacgtgaaggacatgtctagcaaaggaaagaagggcaaagggcctgacgagccgaagcgccacgtggttctcccaggcaaaagaaaaatagtcggagtagaggacaagactgacgagaattacgatcagttggatgggcaaccccctttcacggtgacgattgaccctagcatcctcctatcaaatgaagacaccccttactcacgtagagataacaaggaaggaacaatagtgaggagaaagtatgtgcggtcaaccgtcaccgctgatgtattgccccgcgcctccacgccgccgctccgctgccgcccctgccgccccatcagtgaacgaaaagcgaacgaacaaaagaagattcctatagacccgagtgccagaaacttcttcaggggtatgtctgcacctgccaaggagaccataaagctatcggactatgagcgaaaacttaagaaagcatcttctggaaagtccaaaccagtccctcagcttggagagcaaccaaaccaggtgatcgagccgttggtgaccggtgaagaatttggaatacaagattttattaatgacaccgggctaactacggatcaattgctacgaggcgcaccattcggaaaggcggaagtgaaatacaagtacgaactcggtaaaccgcttgtcaagcctgagcagctgcagtccctaccgacacagatgtacaaattccatcgactgtacatggagatgagcgccaccggtagagagatgatcgaagtgaggatcagggacacggacttcttgcaaggagaagatattctctggatcaattacaagggtatctacgaactataccagctggacgccctcgacgtctctattatgagttgttggactttaatggagattaaaagggcccgacggcggggggttttcgatactggattcatcgaccctcagaaagtaaacgtcgcaatgctcgacgagtatccgcaagccacagaggacaatctcgtccatctcctgaaggcgcagcattacaagatgttcatactattgccgtacaacgcagagtatgtgtcagtgcttagtgagctcagcgtcgaacttgctacatccgtttcccggcaacagcacgatggggtggatatcgacgacggcgtggtggagcagacgacggcgtggtggagcggtgggagggcgctgccgtcgatgaggaagaaggggacaacagaggaggagcagcaggaggaaaggtagtatgtccat

SEQ ID NO: 4826 - DNA, 1187 bp, Oryza sativa
  Clone ID: PAT_MRT4530_11674C.1
ttttttttttttttttttttccaggttcgcaggaagctgaatacatggttgcctggtggcagttggccaatgccaccctgtgctctcatagttgggatactggttaacgtgcacatgccaggcacgtcgacatatattgaagagtattggtttacactaacaatgaaaaggaaagaaatatgaattcagtttggtagaggctagaagattcaatcctggataaaagaaacaatgcatattatgagatttaaactgaaaggcgaagttataaagtagcgtaaaaaaattaaatggaacatttgagatgtaaacagaaatctcaaattattgtccttttatctcaacataaccactttacagatacccaagctgtaatctttgttatactcatgaaactttgagtacttcaggcaatcagtaatttcatccataatgggcaccaccagaaacttggcaagtccatgggcgatggctgcgaaacatgggtggcgggttacatcttcaaatttcatcaaggaacctgtgttctaattccattactaattacatccccttcactgaccaaaacttatagtcaaccttgagcaggatgagctgctacagacccatggaagatgtgctccaatatgaaggaccatcataagcaaggtagagctatttgttttttcttcaatttagtgagtcctacttttaagtgtttaggatactgcctgccacaccatgtgcgttgactgatgcggaaaaggaggcaggacaaagatgagcatttataatgcaaactattaaaaatcacaattcgtggacatgtgccatcaaatttgcttggaaactctctctgctagtctgattcatcattgttagtgtaagagcagttagtgagaatacatatgctacccgtgcaatcacattgagataatagagaacatacttgcaacaccatatgcgatgacagctacggaagagtctctcagtgcaagcataggggggcaaacctgccgttcccgctgcccccctgatacaaaaacaaaataaaatgatcacacataaaatcaataatcaagcatctaggaaactaatcagattgttagctggagcacagggggtgccattcttccaccatcaggatttgatcttccttgtcaacaagcaattatcccacagcgtgtacctcggccgcgaccacgcta

SEQ ID NO: 4827 - DNA, 2237 bp, Oryza sativa
  Clone ID: PAT_MRT4530_11675C.1
atggaagaagatgaagtggaagacgacaatattccgaactttgctcagtatgttggatttgaaggaaatcaaacgggcgaggaggaaatagctgctgatggtaacgacgttgtggatgatcttggtcagatgttgcaggacgccagggaagactgcgaaggtgaaaaggaggcccataaattggacaagatgttggaggaccacagaacttcgttgtacccaggttgcgagcaggggcacaaaaagttggataccactctggagttgttgcaatggaaggcaaaaaatggggacgggatgctgagacacctcgccgatggttcgcagtgcggctatagcagttggcccattacgatgtgtatctacaacctccccccttggctatgcatgaagaggaagtacataatgatgccgattattattcaaggccccaagcaacctggtaacgacatcgatgtgtacctaagaccactggtcgaagatattaaactgttgtggaaaaaggaagatgtccccgtgtgggacgaggacaaacaggaggagttttacctacgagcgctgctgttcgtaaccatcaacgattggcctgcacttagcaacctttccgggcagtccaacaaggggtacaaggcttgcactcactgtatggatgaaatagaaagtacgaatcttaagcactgtaggaaggttgtgtacatgggtcgtcatcgattccttgccacaaaccaccaggtacaaaagaaaggcaagcactttgaacataaggcggaccaccgtacgaagcctaaacattgcagcgggaaaacagtgtttgctatggttaaagatcttaaagtagtatttggaaaggggcctggaaaccagcctatagagagcaaagatggtcacgcggcgatgtggaaaaagaactctatattttgggagttaccttgttggggattcttggatgtccgccacgcaatcgacgtgatgcacctcactaagaacctttctgtaaaccttcttggcttcctaggtgtatatggaaagtcgaaagatacactggaagcacgtaatgatctgaagtgtatggaacaacgcggcgaccttcacccggaaccaaaggagaaaggaagccattacttcagtccagccagctacactcttagcaaggcagagaaggaaagtatgtttgaatgcttggagagcatcaaggtaccgtctggatactccacgaatataaagcgaataataagcacgaaggataagaagttcacaaacctaaagtctcatgactgtcacgtgttgatgacacaactgctaccagttgtaataaggggtatccttccagataatgtccgggcaacaataacaaaactatgtgctttcatgaacgcaatttcgcagaaggtcatcgatccggatagattagaagcccttcagaatgatgtggtgcaatgtcttgtcagttttgagttgatatttccacctttatttttcaatataatgacgcatctgctttgtcaccttgtcaaagagatcggtattctcgggcctgtgtacctacacaacatgtttcctttcgagaggtacatatgcgttctgaagaagtatgttcgtaatcgtgctcgtccagaggcaagcatcgccaaggggtatggaacaaaggagggatatgatatcaatgggtacacattctacacgagagcccaagacatgaagagcacgaaccaaaacagcgttgttcgtatcgatgccatgggacacgatggaacaactggcacgtattacggtgccatcgaggacatatgggaacttgactatggtcctctcaaggtccctctgttccggtgccaatgggttaggttgactagtggagacgtaacgattgatgaaagtgggatgacaacggttgaccttaacaaggttggatacttggatgaaccttttgtcgttgccaatgatgtaatgcaagtcatttacgtgaaggatatgtctagcaaaggaaggaagggcaaagggcctgacgagccgaagcgccacgtggttctcccaggcaaacgaaaaatcgtcggagtagaggacaagactgacgaggattacgatcagttggatgggcaaccccctttcacggtgacgattgaccctagcatcctcctatcaaatgaagataccccttactcacgtagcgatcacaaggaaggaacaatagtgaggagaaagtacgtgcggtcaaccgtcatcgccgatgtattgcc

SEQ ID NO: 4828 - DNA, 1989 bp, Oryza sativa
  Clone ID: PAT_MRT4530_11676C.1
tcctgtccgcttccgactccccaacggcggcggcggcggcggcgtggtgcggcggcgagggttttaagtaggctgcgcggcggagaacgccggggacgcgagcggagtgatctagccttatcctccttcgtcgcctccggattggtttcgcggcggccggccgtgtctcctgactgcgtctgtggccgggatgagggtgaaggtgatatcgcgctccaccgacgagttcacgcgggagcgcagccaggacctgcagaaagtattccgcaattatgatccagcacttcgttctcaggagaaagcggttgaatacaccagggctcttaatgctgcgaagttagagaagatatttgctaggccatttattggagcaatggatggccatgttgatgctgtatcatgcatggcgaaaaaccccaattatttgaaagcaatattttctggctcaatggatggggatattcgtctgtgggacattgctgcaaggaagacagtctgccagttccctggacatcagggtgctgtgaggggtttggcgacatctactgatggtgatcttctagtatcatgtggtgttgactgcactgttcgactatggaaagtccctatgctcaagatggtagacactaacgatgctattggagatgctttctcagccttcagcggtctacacctggaagcatgcgttttggggtgttgaccaccagtgggatggcaatctttttgcaactgtaggtgctcaggttgatatatgggatcaaaacaggtcagagccaataaatagctttgaatggggtaaagatacagttctgtccgtgagatttaatcctggagaacctgatgttctaattacatcagctagtgatcggagtataacactttatgatctacgcatgtcatcccctgctagaaagctaatcatgaagacaaggtgcaactcaatatgctggaaccctagggagcctatgaacttcactgccgtaaatgaagatacaaattgctattcctttgatgctagaaagcttgatgaagccaaagttgttcacaagggccatgtttcagcagtgatggacattgattattcaccaacagggcgtgaatttgttacgggttcctacgatagaacagtgcggatcttccaatataatggtgatcatagcagggagatataccatactaagaggatgcaaagggtgttttgtgtgaaatacacctatgatggaacctatttggtttctggcagtgatgatacgaatcttcggctgtggaagtccaaagcttcagaacagttgggagttcttcttccaagagaacgcagaaaacaagaatacctagatgctgtcaaggagcggtataagcaccttcccgaagtcaagcggattgtgaggcataggcacttacctaagccaatctacaaggcggccaacttaaggcgaacgatgattgaagcagaaaaccgtaaagaagaaaggaggcgtgcgcacagtgcccccgggagcatgcctgtgcagcccttcaggaagagaagaataatcaaagaagtagagtaaaatggaagaatatgtgtggcacaaaaccaaacgccgcgattttacaggtctagctcaagacggggacatgtctaatcatccaccaaaccattcatcggagagtgacgtctgttgcaaacagtgtttagaaagcagccccagcagcagcagaaatcgaagggtctatggttcatcagtttataaagggctgaaatttttgcttctgctcaatttgttgtatcgttttgcttgtaacgatttatgaaccttctagttatgtatctcgtattacttttctgatgagtaacctgtgtaatagctatgtcgaatggaacaatacatgtgtggctctgtcagcacgctgattgttctgcttggactttgttaacgttaaaggtcactatacagcagatctttggctaataaaaaaaaaaaaaaaaaaaaaaaacctgcagcccgg

SEQ ID NO: 4829 - DNA, 762 bp, Oryza sativa
  Clone ID: PAT_MRT4530_11677C.1
atggacgagattgtcctctgtggcttgcggatactggtcgagcattgtgatgtttactttccgagggcggtggagcttggggggcccttgacttggaaggtgccagacgaggagcttgcggaggagtcggtgcaggagcctgaggaggagtcggtgcaggagcctgaggtggagacggtgctggagcatgaggagaagacggtgcaaaagcctgaggaggagatagtgcacgagacgccggtggtttcgtcctgggtttgcatggtgtccatgctatgtgatcctacctgccccgttgaggcgcagctgcttcgattgcctgaagggctgaccattgcaggagaaatttcacgtttcgttcacgttgcggaaacggagcggcggcgtggcggcgcagctgcggcttggcgcggtggcggcgtggcgcggcggcggcgtggcggcggcgtggcggcgtggcggtggcgtgccgtcgcggcggtgtggcgcagcctggcggcatgtcgaggcgggggcggcgacgtggtagtggcatcggcatacgtcgtcggcagtgccggcgtgacgtcgccggcagtggcggccgcatcgaggttggggtcggcatcagcgggaggcggagtcagggtcgaccgcgtcaacgtcggcggcggcgtcggcaacgaggcggcggcgagatgcggcggcggcggaggcggcgacgatgacgcccgcgagacgacggcgagatacgacggccgcatcggcgcggggatgccctag

SEQ ID NO: 4830 - DNA, 4934 bp, Oryza sativa
  Clone ID: PAT_MRT4530_11678C.1
atggatcggcaatggatgtacgctgaccggcggtcgaaagagtttattgatggcgtgcattattttttgagagtggccgaagctaataagcataagggttttatttgtcgtccatgcaatatgtgtaagaaccagaaggagtattatgcatccaggactattcatttccacttgtttgagtcggggttcatgccaagctataattgttagacattccacggtgagaaaggggttgaaatggaagaagatgaagtggaagacgagaacattccggactgggctcagtacgctggatttgaaggaaatcaaacgggcgaggtggacagggatgctgacgataacgacgctacggatgatcttggttagatgttgcaggacgccaaggaggaccgcggctaaggcgtttgttcaggaacaaggggaatgctagaatgatgcgttggcacgctgaagaacgtcaacaggacgggatgctgagacacctgccgatggttcgcagtggcgaaacatcgacagaacatttaaagactttggaaaggacgcacgaaacatacggtttggtttaagtacggatagcatgaatccttttggagagatgagcagcagccatagcacttggcccgttacgatgtgtatctacaaccttcccccttggctatgcatgaagaggaagtacataatgatgccgattattattcaaggccccaagcaacctggtaacgacatcgatatttatctaagaccactggtcgaagatctgtaactgttgtgtaagaaagaaggtgtccccgtgtgggacgaggacaaataggaggagtttaacctacgagcgctgctgttcataaccatcaacgattgacctgcacttaacaacctatctgggcagtctaacaaggggtacaaggcttgcactcactgtatggatgaaactgaaggtgtatatggaaagtagaaagatacactggaatcacgtaatgatctgaagcatatggaacaacacagcgatcttcaccctgaaccaaaggagaaaggtagccattacttgagtccagccagctacactcttagcaaggcagagaaggaaagtatgttcgaatgcttggagagcatcaaggttccgtctggatacttcacgaatataaagcgaataataagcacgaaggagaagaagttcacaaacctaaagtctcatgactgtcacgtgttgatgacacagctgctaccagttataattcggggtatccttccagacaatgttcgggcaacaataacaaagctctgtgctttcatgaacgcaatttcgcagaaggtcatcgatccagataaattagaacaccttcaaaatgatatgaggtacatgggcgctctgaagaagtatgttcataaccgtgctcgtccagaggcaagcatcgccaaggggtatggaacagaggaggtcattgaattctgcgtagaatttattgaagaccttcgcccaattggggtgcccgaatcacgctatgaagggagactacggggaaaagggactctcggaaggaaagcaataatgatggtagacaacaatttattccataaagcccatttcacggttctgcaacaatcttcattggtggctccttacatcgaggagaacttggctctagttcgcgccagaaacatcggtaagtccgatgcatggattacacggcatcacattgatactttccccgcgtggctgcgacttctcatgggtaacgagacgattaaccaacaactggccttcctggcgaggggaccatctagctcgatcgcgacattccagggatatgagatcaatgggtacacattctacacgagagcctaagatatgaagagcacgaaccagaatagtgttgttcgtatagatgatatgggacacgatggtacaactagcacgtattacggtgccatcgaggacatatgggaacttgactatggacctctcaaggtccctctgtttcggtgccaatgggttaggctgactggtggaggcgtaacgattgatgacagtgggatgacaacggttgaccttaacaaggttggagttgaccgaggccacgccaccgccgctgcgccacgatgccgccgccactaccgacagccacgccgccaccgccgccgccgccgcacgacgcctatgccaccgccgccgcgccacgccaccgccgtcgtctcgcggaaatatttcttgtatgaacagatggctgatcgcgataacgaacagatactgtatgatacaatcgcagagggaagcagccagtactggaacgaagaagaggggaacgaggatccaaaccaatacttgaacgaggaagttaatgaggaggggaacgtggaggaggggaatgaggaggggaacgtagaggggaacgaggaggggaacggggaggaggctagtggaaatgaaccctcgtctgcacagaagaggggacgcagacaacgaggtgccgcaaagaagatagagggtcggcacattaaaactgaagtggacgaagacggccgacctagtgccccagcagaagcagccaagaattacgtacgacacagcggttgggttgtgagggataacgtgcctatcagcaaggtgtactggcttagaacaagggcacgtggggattatgacagctttgtcccggaatcagagaaagagatgttgtggaccacaatgctcgagacgttcacactccctgcgggtacggagaacatagtgaaacagtggactcttaagaaaatggtagaacagttctagtgcttcaaggaagaactctacaagaaatacatcctgaaggggctgacaccgaacttcaacacattcccgaagctaagggatcactgggacgagtttgttgcttacaagacagggcaacaagggcaagcgatgatggaccgaaacaaagaaaatgctgcaaagaaaaagtaccatcaccacctggggtcaggccggtatagcgtcgcgatgccgaagtgggaggagatggaagccagcttgattgagaggggtatcgaaccggccaccactaaatagccggatcgatcgaagttctggtactatgctcatggtggaacgcttaaccccgttgatggctccctggcgttcagcgatcagatacgcgaagctgccagtcgactaacagacgcagtggaagcatcttctcagggcacgttccgactcgatagagagaaggatgagctgagtcggatgaggaacaagagagatactgaggtgaagattgcagatcttaagtacagggtatcgagttacgagctaagcatgcaggaggaggtggcaaggaaggtggatgaacacatggccgcacatcggtgctaggatccccagctgtacattcctcatgtaatagtcagcccctcaggcaatcgtagcagctgcacctcaacgaggcaggtggcgtcgtgaatggccatcccaatggaccctttagggacttaccactgcaggccgattccagcagtcgaagttgagttggtggaagtagcgtacgaggacctcgagttggactaccctagaggagacggtgagacgcatctacgagacacaagccacaccattatactatggcgcaagcgctacatcatccttcctaggcaacaagcagcgtctcctgcaccatcacctccggctccgccatctcctccgccacctcctcctgcaccatcacctccggctcctccgcctccttcgcctccatcgtgtccgcctacacctcccaagacaaggtctcaccaagctccaccacctgcccacacaagggcaacgaagaaggcgaaagttgacgccaccaaaaacaaggagccgcctcacgattgcagtcaagaggagcttgacgcttacgtggcttccaaagtgaagaggcaactcaagcctcggagacctgaaaagaagatacctgttgacccaagcgtgaagaacttgttcattaaaatgtccacaacaaacaaggaggccttaaagctattggactattaccgaacacttgagaaagcctattacaagaagtccaaaccagtccctcagcttggagaacaaccaaaccaagagctcgagccattggtgaccggcgaagaaattggcataacataattcatttctgacactggtctaactgtggatcagttgattagaggcgcaccaatcctgaaggcagaagtggcatacaagtttgaactcggtaaaccgcttgtcacgcctgagcagcttcagtccctaccgatatagatgtacaagttccatgaacggtacatggaaatgagcgccaagggtagagagatgttaaagagcaaggatcagaaactccgacttcttgcaaagagaagatgttctctggatcgaattcaaggatgtcttcgaactataccatctggacgccctcgacgtctctcttctgagcgcatggattttaatggagattcaaagggcctgatggtggggggtgtacgatactgggttcatcgaccgtcggaaaatcaacgtcgaaatgatcgacaagtatgagaaagacacagaggacaatctcgtccatctcctgacgcagcagcatttcaagacattcatactactgccgtacaacacagaagtcaatgtgtatgactcaatgaataaagaggacaagacttttgacaagttttttcaactgatagacagggcttgggatcggttccgtcaattggtccgcgggacttggaaagaaaaacttggacggaggtttaattttccacgtattcacataagagacaatctcccacacaaggattttatcacggctgttcaagaacaactgatgggattcatcaacgaagaagtccataatcccaagggtgaattctactacgacggatcgacaattcataacatcggtccttcttcttctgacataacgccggcgtcgaagtcatagcta

SEQ ID NO: 4831 - DNA, 414 bp, Oryza sativa
  Clone ID: PAT_MRT4530_11679C.1
ccggccgggattgcccacctggcatcgcacccatagctcacgacccctacatctcatcacgtgctttacctatgcactacaatcgaaataagtaaatggttgaacactatatcgcaggtcactggagctggaagtgatgctgagggagccagcccgggaggacacggcaccacgtctgcctggagcatagctgcagccacgaacgagccaattaccaggcggtccacgacatacatgagaacggatgacgctggggccggaccaggtgatcctgaaccggctgaaggggcggactgcgaagccactgaatctaccggacactcgacgccaccgagttcacctaccttaatcagtgcacagatcccaccacccatgacagtgtgcgtttgtgtgtgtgcagatcactgctgaatt

SEQ ID NO: 4832 - DNA, 915 bp, Oryza sativa
  Clone ID: PAT_MRT4530_1167C.1
atggcgaccgatcaatcccaatcacttgatttaagtatatatcgacggaagtattatataccattagtatcttcagccgatcgaatagatttagttctttcttgcctatttacgactgccgatcgactcaaatatgacatcggctcaaagattaatgatacgtcatcggcgactggccgatcgggggcgccttcgaccgccgtcttcgcccaaccagcttcgacgtcagcaacgatcaccacctcacaagccaacgccaacctcgaagcacaagccgaagctgatatggggctatgcgtcagaatatggctaagcttcaagacacgcttcgccagatgcaagagcagcagcaagcgtacgaagccgcaagacaagccaaggcccactcccagcaattctatgctcagccccaagttctacttccacacgctgtgcaagcaccggtgtacttcgccagcccacccaagccaacgccgcgcgtccgacacggcagatggtcccggcaccggtccgcccggcagcacatcatgcccagtacccgaagcccactcacaacccgcaagcaatgatgaaagaagcttcgaccttgcaagcacagttccaagcttttccgcaataactcaatcaacaccacaacaacataccaagagcttcgcctccggctcaggccgagggaagcccaagtcagggtgtatcggcgggccagctgttgggacagttcgccttgctaagtcaaattcaagggccctcgcctcaaggtccaccttcattgttcgacccaagtacaatggcccaagcaccaacgactttcgcacaagccgtacctccagagtacagaatggccccaccatcgattcaagtctggaatcaacccatgtccgacccagccacggtgatgcaagtcacttcgattga

SEQ ID NO: 4833 - DNA, 180 bp, Oryza sativa
  Clone ID: PAT_MRT4530_11680C.1
atggatctgcaatggatgtacattgactggcggtccaaagagtttatcgagggcgtgcattattttttgagagtggccgaagctaacaagtgggttgaaatggaagaagatgaagtggaggacgagaacattcccaactgggctcagtacgttggatatgaaggaaggggatcctctaga

SEQ ID NO: 4834 - DNA, 500 bp, Oryza sativa
  unsure (1)..(500): unsure at all n locations
  Clone ID: PAT_MRT4530_11681C.1
atttgggtttaaattttttggaaagggaaaaaagggggggaaaaaatttgggccctttaaccccaaaaaaaaaaaagggaaccccaattttnnccccccaaatccnccccccaangggccctttttnggaaaaaagggccccccgggcccaaaggtttaaaaacccaaaaaagggtttggcccaaagggtttggaaaattttttgggcccttgggggaggtttggtttgggggcccaaattttttaattnccccttgggaanttttttaanccccccgggccttttaaancccccccccccaattttcccaaattgggaacccaattttttttggggggggaatttccccccttggggttaaattnttatttttnncccccaaattgggggttnttttnttaaaatnttnttgggtttggncccccccttaacttgggtnttnttggggttaattccccanaaaananananananananananananananaaaaaaaa

SEQ ID NO: 4835 - DNA, 5388 bp, Oryza sativa
  Clone ID: PAT_MRT4530_11682C.1
atggatctgcaatggatgtacattgactggcggtccaaagagtttatcgagggcgtgcattattttttgagagtggccgaagctaacaagtgtacggttttatttgttgtccatgcaataagtgtaagaaccaaaaggagtattctgcatccaggactattcatttccacctgtttgagtcagggttcatgctaagctataattgttggacatctcacggtgagcaaggggttgaaatggaagaagatgaagtggaggacgagaacattcccaactgggctcagtacgttggatatgaaggaaatcaaatgggcgaggtggacagggatgctggcgataacaacgctgcggatgatcttggtcagatgttgcaggacgcaaaggaggactgtgaaggtgaaaaggaggcccataaattggagcggatgttagaggaccacagaacgtcgttgtacccaggttgcgagcaggggcacaaaaagttggataccactctggagttcttgcaatggtaggcaaaaaatggtgttagtgacaaggcatttggcgatttattgaaactcgtcaagaacattcttccggagggaaacaaattgcccgagacaatgtacgaggctaagaagatagtctgccctctaggactagaagttcagaagattcacacatgtccaaatgattgtatcctatatcgcggtgaggagtacgagaacctagaagcatgccctgtttgcaaagcactacgatacaagattagacgagaggatccaggtgaagttgacgggcagccaacaaagaagagaattactgctaaggtgatgtggtatttccctataataccacggctaaggcgtttgttcaggaacatggggaatgctagaatgatgcgatggcacgctgaagaacgtcaacaggacgggatgctgagacacctcgccgatggttcgcagtggtgaaacatcgacagaaaatttaaagactttgaaaaggacgcacgaaacatacggtttggtttaagtacggatggcatgaatccttttggagagatgagcagcggctatagcagttggcccattacgatgtgtatctacaacctccccccttggctatgcatgaagaggaagtacataatgatgccgattattattcaaggccccaagcaacctggtaacgacatcgatgtgtacctaagaccactggtcgaagatattaaactgttgtggaaaaaggaagatgtccccgtgtgggacgaggacaaacaggaggagttttacctacgagcgctgctgttcgtaaccatcaacgattggcctgcacttagcaacctttccgggcagtccaacaaggggtacaaggcttgcactcactgtatggatgaaatagaaagtgtatatggaaagtcgaaagatacactggaagcacgtaatgatctgaagtgtatggaacaacgcggcgaccttcacccggaaccaaaggagaaaggaagccattacttcagtccagccagctacactcttagcaaggcagagaaggaaagtatgtttgaatgcttggagagcatcaaggtaccgtctggatactccacgaatataaagcgaataataagcacgaaggataagaagttcacaaacctaaagtctcatgactgtcacgtgttgatgacacaactgctaccagttgtaataaggggtatccttccagataatgtccgggcaacaataacaaaactatgtgctttcatgaacgcaatttcgcagaaggtcatcgatccggatagattagaagcccttcagaatgatgtgaggtacatacgcgttctgaagaactatgttcgtaatcgtgctcgtccagaggcaagcatcgccaggggtatggaacaaaggaggtcatcaaattttgcgtaaaatttatttaagaccttcgcctaatcggggtacctgaatcacgccatgaagggagactacggggaaaggggactctcggaaggaaagcaataatgacggtagacaacaatttattccgtaaagcccatttcactgttctgcaataatcttcattggtggctccttacatcgaggagcacttggctctagttcgcgccggaaacatcggtaagtccgatgcaaggattacacggcatcacattgatactttccccgcgtggctacgacaacatctcatgggtaacgagacgatcaaccaataactggccttcctagcgaggggaccatctggctcgcgacattccagggatatgatatcaatgggtacacattctacacgagagcccaagacatgaagagcacgaaccaaaacagcgttgttcgtatcgatgccatgggacacgatggaacaactggcacgtattacggtgccatcgaggacatatgggaacttgactatggtcctctcaaggtccctctgttccggtgccaatgggttaggttgactagtggagacgtaacgattgatgaaagtgggatgacaacggttgaccttaacaaggttggatacttggatgaaccttttgtcgttgccaatgatgtaatgcaagtcatttacgtgaaggatatgtctagcaaaggaaggaagggcaaagggcctgacgagccgaagcgccacgtggttctcccaggcaaacgaaaaatcgtcggagtagaggacaagactgacgaggattacgatcagttggatgggcaaccccctttcacggtgacgattgaccctagcatcctcctatcaaatgaagataccccttactcacgtagcgatcacaaggaaggaacaatatacttgaacgaggaagggaacgtggagagcgatgcggaggggaaccaagagggaaacgtggagagggatgcggaggggaacgaggaggaggaggctagtggaagtcaaccctccgttggacagaagagggcacgcggacaatgaggtgccgtgaagaagctagagggtcggcacatcataacgaaagtggacgaagacggccgacctagtgccccggcagaagcagccaagaactacgtacgacacagcggttgggttgtccgggataacgtgcctgtcagtacggtgtcctggcgcagaacaagggcacgcagagatcatgagagctttgtcccagattcggagaaagagatgctgtggaccacaatgctcgagacattcacccttcccgcgggtacagagaacatagtgaaaaggtggactctaaagaaaatggcagaacagtttcagagcttcaagggagatctgtaccataaatacatcctgaaggggcagacaccgaacttcgacacattcccaaagctaagggatcactgggatgagttcgttgcttataagacaagtcaacaagggcaagcgatgatggaaagaaacaaagaaaatgccgccaagaagaagtaccatcaccacttgggatcaggcggctataacatcgaaatgccgaagtgggaggagatggaggcaagcttgcttgagaggggtatcgaaccgaccacggctaaatggccggattgatcgaagttctggtactatgctcatggtggaacgctcaccctagttgatggctccctagtcttcagcgatcagatacgcgaggctgcgagtcgactaacggacgcagtggaagcctcttctcagggcacgttccgacccaacagagagaaggacgagctgagttggatgaggagcaagagagataccgaggcgaagattgcagatcttgagtaaagggtatcgagctacgagctcagcatgcaagaggaggtggcaaggaaggtggatgaacgcatggccgcacatcagtcccaggatccccagccgtacatttctcctgcaatggtcagcccttcaggcaatcgaagcagctgcgcctcaacggggcaggtggcgtcaggcatggccatcccaacggacccttcagggacttaacactgcaggccgattccagcagaatactccaaggtcgaagttgagttggtgaaagccacgtacgaggacctcgagttggactaccctgtaggagacggtgagacgcatctacgagacacaagccacaccattatactatggcgcaagcggtacatcatcctccctgggtgactaccggcgtctcgtgcactatctcctccaccgtctccacctcaggctcctgcaccgactcctcctcaggctcctgcaccgactcctccgcaagctcctcgtctggcaccttccaagtcaagggccccccaagctccaccgcctgcccccacaagggcaacgaagaaggcgaaagttgacgccgccaaaaacaaggacccggggtacgattgcacgcaagaggagcctgatgcttatgtggcatcagaagtaaggagacaattgaagcctcgaagttcagaaaagaagattcctatagacccgagtgtcaggaacttcttcaggggtatgtctgcacctgccaaggaggccataaagctatcggcggactatgagcgaacacttaagaaagcatcttctggaaagtccaaaccagtccctcagcttggagagcaaccaaaccaggagatcgagccgttggtgaccggtgaagaatttggaatacaagattttattaatgacaccaggttaactacggatcaattgctacgaggcgcgccaatcgaaaaggtggaagtgaaatacatgtacgaactcagtaaaccgcttgtcaagcctaagcagctgcagtccctaccgacacaaatgtacaaattccatcaactgtacatggagataagcgccaccggtagagagatgatcggagcgatgatcagggacacggacttcttgcaaggagaagatattctctggatcaatttcaagggtatctacgaactataccagctggacgccctcgatgtctctattatgagttgttggactttaatggagattcaaagggcccgacggtggggggttttcgatactggattcatcgaccctcggaaagtaaacatcacaatgctcgaccagtatccgcaagccacagaggacaatctcgtccatctcctgaaggcgcagcattacaagatgttcatactattgccatacaacacagaagttaacgtatatgactcaatggataaaaaagagtctacgtttgacaaggtttttgaacttatagacagggcttggtatcggttccgtcgtttggtccgcggcaattggagagaaagacttaggcgaaagtttaaatttcctgttattcgcatgagggataacctcacacacaagtaatttatcgcggcggttcaagaacaactcatgggattcatcaacgaacaaatccttgatcccgagagaaatacaattcataggtcgttagcttctgagataacgcctactactacgtcgaagtcg

SEQ ID NO: 4836 - DNA, 384 bp, Oryza sativa
  Clone ID: PAT_MRT4530_11683C.1
atggagcaggagctcacctcgtcggggccgtacaaggacctcaaatccatgggaagctcaaacaactcgttcaagttcggcggcgggctagagctgacggcgggttccagagcggcaacgggcagctcgatgaccggcaaggaggcgggaaaggacggcagcgccgacgccgatgccgacgacatcgagcgggggggcggcggggcgagggccgccatcgagctacgccattcagcattgcaacgacgacgtcgtcaagtcattgctcgagctcgctgcgtggccgtcaactcccgcgccagccccatcatcgccaccaactcatcccccgttacgtctccttcaactagtgctgctaaggccacaagcatcacaaaaatctag

SEQ ID NO: 4837 - DNA, 329 bp, Oryza sativa
  Clone ID: PAT_MRT4530_11684C.1
aggggacatacccaccacggacaacatagacgccacaaagccacaagccaatacaagccaacatacgccaagacaagacgccagatatcgaattcggagataggcacagctagtcccctacggtgtctccggatactgtcaggagagacgaaagcgctatctttgatctcgccgggcacggattcgaggaggaagactaccctgttgtcgactacgagtcagaccttcagaccgccatgtcgacaacagttagataggctaccccaaattttgtactggtgtgattatgaagaaagtaatccattcctctgttgtgggtcagaaaaaga

SEQ ID NO: 4838 - DNA, 192 bp, Oryza sativa
  Clone ID: PAT_MRT4530_11685C.1
gtactacatgattaataagctactattaattgtactatatgggtttggttctagctagctagtcgtagtactgtacagcgccatgtgtatatactctactaatttaattagtagtaattaataaaaatgtgtcaaattaaataaattgggatatattccacgatcgatatatcgatccaccagttaattttc

SEQ ID NO: 4839 - DNA, 803 bp, Oryza sativa
  Clone ID: PAT_MRT4530_11686C.1
gccatcgccacagccaccactgtcaccagccgccaccgccatcgccacagccaccaccgtcgccagccgccaccgtcagccaccaccgtccagccgccaccgtcgccagccagcgccgccaggcgccagtcatccagattcagccggggtggcacggatctggaggtgcagcgcgcagcgcgggtcaccggcgtcatggaggaaggtttcacgggcacggcgttcatggccggagcattaacgagggcgccacgcctccctcgtggcggcgaggttcttgacacggtcaccggcgtcgcggcacgcgccgcagtccgccgccgtcgtcgcgaacttcgtcgcagccacatccaccaccatcgccaccgccagccacccccctgccaggtgtgcgggcagccgccgccgccgcctccggccagatccggccaccccggagaggggcaaccggatctggcaactccgtcacccgtcgctggagccagagccggagccgaccgccgcggagagccccgccgccgtcgccgtgaagagccctaccgcagcgccgtcgccgcgccatccccgtcgccgcgacctcgtcgtcccgccgccattgtcgccacgccctcaccgggcgagatggagccgaggagaatggccccgccgccgccatcccagcgcgtcacccggctttgccggcgacgagctccggcagcggcgaggcacggaggatggaggaggaggggcggcggcggctagggtttcgcccgattggctggacacgttttatgatattgagattggtaggagagggagagtat

SEQ ID NO: 4840 - DNA, 227 bp, Oryza sativa
  unsure (1)..(227): unsure at all n locations
  Clone ID: PAT_MRT4530_11687C.1
tatataggggttggtcttgccctctacaggccctcctccacgtccaactcagggtagaaaccaaaggaaacccgaaacatgccttcccgagcaaggaaaccttaagacctgacgaaacacaatcggactcggacctgccggtcagaccggncacacactgccggtctgaccggccctaaaccggcgggctgaccacccagcacacgggggtcaaaccggcccacttg

SEQ ID NO: 4841 - DNA, 489 bp, Oryza sativa
  Clone ID: PAT_MRT4530_11688C.1
atggcggcggcggggccattctcctcggctccatctcgcccggtgagggcgtggcgacgatggcggcgggacgacgaggtcgcggcgacggggatggcgcggcgacggcgctgcggtagggctcttcacggcgacggcggcggggctctccgcggcggtcggctccggctctggctccagcgacgggtgacggagttgccagatccggttgcccctctccggggtggccggatctggccggaggcggcggcggctagcggcgagcaaggccacggcggcggaggcggtgggggtcgacgcgcggggagacgcggctggaggccggcgtgtgtgctggccgcggacggggggtggctggcggtggcgatggtggtggatgtggctgcgacgaagttcgcgacgacggcggcggactgcggcgcgtgccgcgacgccggtgaccgtgtcaagaacctcgccgccacgagggaggcgtggcgccctcgttaa

SEQ ID NO: 4842 - DNA, 594 bp, Oryza sativa
  Clone ID: PAT_MRT4530_11689C.1
atggcggcggcggggccattctcctcggctccatctcgcccggtgagggcgtggcgacaatggcggcgggacgacgaggtcgcggcgacggggatggcgcggcgacggcgctgcggtagggctcttcacggcgacggcggcggggctctccgcggcggtcggctccggctctggctccagcgacgggtgacggagttgccagatccggttgcccctctccggggtggccggatctggccggaggcggcggcggctaccggcgatcaaggccacggcggcggaggcggtgggggtcaactcgcggggagacgcggctggaggccggcgtgtgtgctggccgcggacggtgaggaggctgcggaggcccggcgccagaggaaggcccgcagtcccgcagcgaaggctcggccgagagcggttttccggtgccggctgcccgcacacctggcaggggggtggctggcggtggcgatggtggtggatgtggctgcgacgaagttcgcgacgacggcggcggactgcggcgcgtgccgcgacgccggtgaccgtgtcaagaacctcgccgccacgagggaggcgtggcgccctcgttaa

SEQ ID NO: 4843 - DNA, 171 bp, Oryza sativa
  Clone ID: PAT_MRT4530_1168C.1
atgcagccgtcgaggatggcgcggccgatgtcgccgccggcggcaagcgcgttgaactcgctggcgcgcatccgcacgggtagacgactattgtcgctagctgcagtgctggcaactgatcctgctgcttatgttgctgttgctgttgctggattatgtaaggttaattaa

SEQ ID NO: 4844 - DNA, 1019 bp, Oryza sativa
  Clone ID: PAT_MRT4530_11690C.1
tccggaattcccggccacgcgtccgcttgaataacaactagaaaagcttcattagcagagtgatcgacaaggaaattaaatggcgtcgtcgttgttgtccatggcgatgttcgtcgtggtcctgatgtgcgcctcagcaatggccgcccaggcgcgcctcccgccggggtctagcccgctggtggcggcgtgcacggcggggccgttctccaagctgtgcgtcaaggacctgggccaccgcctgctggacatccagacggtgctgacgtcggtgtcgaaccacggcgccgccatcgccggcgcgccggggcaggtggacttcaggtccctggtcgccgtcgccatggaggccgccacggagtccggcgcggtggcggcgacggtgttcgaggggaagctccccgggttcaacaagtccgtgccggacttcaaggcctgcctcgacaactgcagcgtgacggtgtcgagcgccatgaaggagatccacggcgccgccgccgcgctcaaggccggcgacgacgaggtcgccaagacgctcgtgcttcgcgccatcaacgacgtcaccatgtgaacgtacagctgcagggagctcaacggcgacatggcggtcatcctggagcacagcctcgtccagttccagaagatgatgaggatcgccgtcaacttcatcagcaagatgaagaagtcaccgcttcctcctcctcctcgttctactcctcctgctcctcctactcctcatcggctgcactgaatatgcttgcttcttcacttcagttcgctggactggattatccagcgattatcccttaattaagagagccccctagttaaccctcttcagtacgtacgttctctggttgcgatcatagttagctagccttcgttttgatttttcagagttgagtaccctaatttcttccccagctgtatcccgtcttcgtttttttccctctctctttttgttggtttagctcacgtgaataaactgcaagtaaagtaaatattgttattacagatcc

SEQ ID NO: 4845 - DNA, 477 bp, Oryza sativa
  Clone ID: PAT_MRT4530_11691C.1
gcctggaaaagaagtgtggccgcgtgcgcccctggcgcgcactcgccgagtaggacccccgttttgatgttaagctgctccacgatgtcgacgtttgatatcgcaactgcggtattttgcatagtatggggatcgttggtactagggtatatgcgagattgagataaaagagatagagacagggatttttatacaggttcgggcccctgaattgtcagtcgacaacagggtagccttcctccttgaattcgtgcccggcgagatcagagatagcgctttcgtctctcctaacagtatccggaaacaccgtaggggactagccgtgcttatctctaaagtcgatatccggcggcgtgtcttagcgtatgtaggcttctatgttgtggcttctatgtcgattgtgttgaattgcttccgtatgggatatagtatgtagtgggtcctgccgagatttagtcaactactattaggtatatg

SEQ ID NO: 4846 - DNA, 306 bp, Oryza sativa
  Clone ID: PAT_MRT4530_11692C.1
atggagacgaggatttttatacaggttcgggcccctgaattgtcagtcgacaacaggatagccttcctcctcgaatccgtgcccggcgagatcagagatagcgctttcgtctctcctgacagtatccggagacaccgtagggtactagccgtgcttatccctgaagtcgatatccggcggcgtgtcttggcgtatgtaggcttctatgttgtggcttccatgtccattgtgttgggttgtttccgtataggacatgtgagatctccaaaccctggtcagattaggctacaacaaatcaaagccaaa

SEQ ID NO: 4847 - DNA, 337 bp, Oryza sativa
  Clone ID: PAT_MRT4530_11693C.1
ccaatagccataatgagtggcataacacataaaactggaccgacggctcgaaagggaaagattctttgtttagccctcccccacaacacagagagccaaccggcaagctaacacgttacaatagagggaagcgaagccaccgaacccgtagcgtcccgtataccataaccggtcgagcgaggacggcaaccgcacgcagcgactagatcattatctcttagaaacacttcgcatatgaaggttgtgctatgaccacaagaggccgtctctgtggggagcatggcacttgccgagcgaccttgaccgagacctaactgcgtgagcgaggatgacggcg

SEQ ID NO: 4848 - DNA, 118 bp, Oryza sativa
  Clone ID: PAT_MRT4530_11694C.1
atttttcctagggggtacaacagtcaaacagcggcctaaaaagctgggccgatggcaagcaacaaagagacagcccgaaacaccctataacaccacatagacacatatctagagctgg

SEQ ID NO: 4849 - DNA, 213 bp, Oryza sativa
  Clone ID: PAT_MRT4530_11695C.1
atgtccgtcagccccctcaccgggccgccagtaagaaaacgtagcgcaggtgttaacggtgctggtgctgccgcgatgcgcgtgcgaggtgcggggacagttgataggtggagcatggttggagcggtgggtgcacctccctacaccgctgttccgaacggctggtgctgtcagaaccctccacggagctggccgaaagctcccgcgcagcgc

SEQ ID NO: 4850 - DNA, 187 bp, Oryza sativa
  Clone ID: PAT_MRT4530_11696C.1
cgtccgcccactcgttcgttgacgcgtgggcggacgcgtgggctggtctatagcaacagcagcaggaagggccggcttcgacgaaggatgcacagcctcccccgccaagccgtgcctggcgcgcgcgacgtcgaccacggccgcgcggttctcggtgaagagctcagcgtagggcaacaaaggcgga

SEQ ID NO: 4851 - DNA, 564 bp, Oryza sativa
  Clone ID: PAT_MRT4530_11697C.1
atggcgaggtcaaaagagaatgctagatatttttaccatctcctatctcctgtaaaagagaggcctaacttcggtggtataagcatagaggagctgcacaggcttgtttatgctcaagttttgtgctctcatgctttaacatggcagattgcaccaacttatctgtcctcatgtctaaaccaaggcctagggctgttggagattctgcttctgaagcaacccatacaagataatcgtgttgtattgaagactttggaaatttgccgcttgtatgagctggagaatgttagtacaaatatcatgaagcaatgggaggggctgcttgagttactaggttctgacatcggtagtgcaggtggtcttgagttccttcacaggtaccgagatttcaaaaggtcccttcagatggcacaagaaggaaggactggcgagtctgttcggcaaaccgtggagtttcttatacagctgatgagaaatccttctacacctcaacgtttctggctaccacttttacatgactcggcttttgattctgtttctatccccggttgtttctgcaggtga

SEQ ID NO: 4852 - DNA, 390 bp, Oryza sativa
  Clone ID: PAT_MRT4530_11698C.1
atgggtcatgatgagctcctttcatctcggctcctttttccactctcccagcgttctccctctctcccaagcgcggccgggcgcccggccgtgtcccccgtctccccggcgccactgcgcagggagacgtacggtaaagggaagtttaaagccgagcaagagccagcgattgttgtttgtttgcttcttgcggtgggggcagcagctgcctgcctctctgcccccgtacgtgtacgtgagaatatgaccaaaaggtgcccatgtctactgggctttttcttcttccatggccacgccctcggcccggcgcccctgcgtaaacagcgagcagtggcagtgaccgcctgcctgtgcgtgtgtgttgttgggactgcagctactagcggctag

SEQ ID NO: 4853 - DNA, 2183 bp, Oryza sativa
  Clone ID: PAT_MRT4530_11699C.1
atgccaggcatgataatggacgggtcccgcgccttcgtgccgttagctcatggtcgtcggccggcggggatggcaggcctgctgatggagagcgtcggcgccatcgtgccctcgccggtcgaacccggccacgcggtggtggctgccccgaacgtccggaaggtcccccacgtccgggcaccgacccccgccggcgtctgcgtttgcttggcggagcggcaccctcctgcgggtcgcctgcatgtgcccaccgaatctggagggtggcggagtccgggggccgaaggggggctgcgggaggagggtggtgtaggtaagcctgagaggtggcggttgcgggcctgtcggcgcggttgcagaggagatcaatggggcgtagatgggtccggtctgttacgggtggggacagtctgttgcgatgcagcagagcaggaagaactcgctcattgcaggcaccggagcggtgggcttgctcgcagtctcggtccacgcagtttgttggcaatttgtgcttgaaagaagtacaacaagattaagtctacttctaatcgtttagagcctttgtggtagttttaagaaatattcattgttgatacacagggtcaaacttggcttccagagcgtcttgttgattggttagccgactatgacagcctcttgaccaagacagagaacacgatatatcgcacgctgatcaatttccagaaaaagctcatcaacctgcaggttgttgaagatgatcctgattattggagtggattatcagcagctctatcggttggatggcttgatattgtggtgaatatgctacgttttcatggatcataccaattggatcagatggacagccgtgagacagaaaatgggttggttgaagctgttgctgttcttgtgtcaacaatgccacgcatgcgaccagatttgccatcgggtaaattaggccagtgttgtaaaacaagaccagattttataaaggcattggaaaaatggcgaggtcaaggttttgaagggatgcatcagttagcacaaaagtgcatacagcttaaaccgtctgctgacaatagcggattgacaggcctccttactggtatcctttcagaaaatagagaggttgtcttggctgaatgcacaaaaaattttggtccttggatggtcacacatgctatggagctgctgactgctgacaatgactatgcggatatgatgttgcatgaagagaggcctaacttcggtggtataagcatagaggagctgcacaggcttgtttatgctcaagttttgtgctctcatgctttaacatggcagattgcaccaacttatctgtcctcatgtctaaaccaaggcctagggctgttggagattctgcttctgaagcaacccatacaagataatcgtgttgtattgaagactttggaaatttgccgcttgtatgagctggagaatgttagtacaaatatcatgaagattgctggcatttatcattggaaacatggtaggaaaggaactggagtttactggttccagcaagctaatgataaagttcgtcttgacagaattgctcaacaattattcgaacatattggcaagtcggtcacagatgatagttttaagcaatgggaggggctgcttgagttactaggttctgacatcggtagtgcaggtggtcttgagttccttcacaggtaccgagatttcaaaaggtcccttcagatggcacaagaaggaaggactggcgagtctgttcggcaaaccgtggagtttcttatacagctgatgagaaatccttctacacctcaacgtttctggctaccacttttacatgactcggtgaggcttctcaattgcaaaccctgcccattgttaaatgttgctgaaacgactttgttgctcaacaagctacaagaactgtcattggccaaacttcggcctgacttttccaacattcacctaccaagccatgcattgaactccgtcagattagctctagcatcaaaccttgcgcgtgcaattcttgaagaaccttaagtaatagttctatttggggtatgagtgccacatccactttgctggaagtttgacggcgttaatcgtcagttgattaccagtaactgtatgttccttgggaagaggttgaacttgtgttcactctgaatgagcaaaggttgaacttgtgttccttcatg

SEQ ID NO: 4854 - DNA, 543 bp, Oryza sativa
  Clone ID: PAT_MRT4530_1169C.1
tagtggatccccgggctgcaggtgctaccttgggccacttggttcctgcagtaccttgtgcgtgcatgttgttggatcctttttctgagaaataatttcatgtcgcagttcgaccagaacatcgtttgcacagccatctgggatttcattagctcctggtatttctggttgattccttttttctctcctttgtgctctgatgccagagagcacagattcacatgaactatcggcacagaattgcaggagttgattgttgctgatagtgaaagcagctccattcgagttgttaatttgaaatctgggggttcaagatcgctagctgggggagacccaatgattccagagaatttgtttagggtatttatatatcctgatactaaaggattctgcctctctttttttcagcattaatgtgactgaacattttaagattttttttgttctgctctaaattttattgaagtataaagttaaatttgtttatttgtttgcagtttggagatcatgatgggactggctcggatgtgctactccagcatc

SEQ ID NO: 4855 - DNA, 630 bp, Oryza sativa
  Clone ID: PAT_MRT4530_116C.1
ccccccctctattctttggcaacacattatcaagaccttcgcgctctttttacaaactctttatgagatatcactccacactcccacatcttgtgtctgggcgcacaaacacttgtctcgtcgacctcttggtgtggccgcacacccacactgtctcgcaccatctcgcacggacgcacttctatacccactctgtgtgtctcatcagcgccacttaagccgcacactcaagctacaaaatctcctccacgcctcgctttggttgtatatcttcttatatctctttgattgcgcgcatatattcttgggtctctcacagagtctcccacagatctgtcttattggggctctcttttgaaacgctgcgccccattctagaaatatataggtgtatatctaccccctctagggttatctctattggtgccaccccacgctacccacttaccacccctctggcgcgctgatacttgtaatgagtctgttaaccacgctattagtggttcggaagttataaaattaagctcacgagtagtcactcactagtgtgaccactgtgaaacctttgggtgatattaaattagaaataaattttctttcatatttaaataaaaaaaaaaaaaaaaaaaa

SEQ ID NO: 4856 - DNA, 183 bp, Oryza sativa
  Clone ID: PAT_MRT4530_11700C.1
gctcacacactttatttatggatgaatataatatttcaagtttgatgtgtttacttccaaggctgaagaatgcaattgttggtttccaaccttcaattgtgtgggagttgatgctgattgcctaccttgaattttgattcggttttgggcacgcgtgtacccttgatctttacataccttgat

SEQ ID NO: 4857 - DNA, 354 bp, Oryza sativa
  Clone ID: PAT_MRT4530_11701C.1
atgcccaccacgaaccacccgctgccgaaccaccacgcacgccacgaaccacccgttgtcgacgccatcgccgccgccacctcatggacacgggcccaagcaccagacactgccgccaacaccacctcaccaccgcagcccacggaccagccaccacctcctcgtcgcctcccatggaccacctactcgccacctcccacgctgctgccgccgccgccgcctcccacgaatcagctgtcgccaccgccgcctacggatcagccgccgccaccacctcccaaggaccacctcgccgccgcctctgagcgttgctcccgtccagcaccaccgccacctctcacggatcagagctga

SEQ ID NO: 4858 - DNA, 184 bp, Oryza sativa
  Clone ID: PAT_MRT4530_11702C.1
gcggacacgcgccctcatgtgtgacgacagcgcgaccacggccactagtgcagcattaaagtgtgtttcctacaaccctgaggacgaaagcaggagtaacgaggctggtagcgtgtaacgagagaagagcagctgctgaggacttcttcatcaagggttgagatcaatagtggatgttttagaa

SEQ ID NO: 4859 - DNA, 354 bp, Oryza sativa
  Clone ID: PAT_MRT4530_11703C.1
atggcggcgacagcgttccagcgaggtgtagcacgcgtgcgacgacaagcgccgagcggcttccatttgcgccggctgggggggggcacccgagaagggcgccaagccgtgccatggcgttggcggtctagcgaggcggcggagcccgaaggcagctgccaagccggtgcttcccgtccccggcgagggacggtaaggaggggactccaaggcggcgcgcacatggaggtcaaccaggatgaccgtgatggagagatggcgagggcgcgccgtggcacacgcgggcgaaggagtagcccgtgcggcgacgacggcgatgccttcttcccggcaaagcccgtacggcggtgctaa

SEQ ID NO: 4860 - DNA, 476 bp, Oryza sativa
  Clone ID: PAT_MRT4530_11704C.1
ttgacgcgtgggtttttatgctttttgacacagccgacaggataagcagggatatcggtggcttggctcctagcagcatgaagatcaacgtggtcgcccctcctgaaaggatgaacacagtctggattgaaggatccatgttggcatctctcaacacattgcaccagatgtggatcgccaaggctgaatacaacaagtctggcccatccattgtgcacaggaaaagcttctaattcttcaaacataagaatgctcatccaagacgagctgttatcgccgacctcctgcttgttcctctctttttgaagcatgtactacataagcgtggacaaagtcatcaaccgccctatctgctatcataatcttctattcaaagactggtgtacctattgctacctgaggttctcacttcagatcatggaacacatatgttcagattattcaaatttaataagacccctgatgagggttccagc

SEQ ID NO: 4861 - DNA, 2953 bp, Oryza sativa
  Clone ID: PAT_MRT4530_11705C.1
tttttttttttttttttttgcttccttgaaattcattcatggtgctgctttgttagatatctcagttttattgtttacatgatatgtaaacggaagaacaaaacaaactgagaaagaacggtcctttctatcagaatataaataaatagagctacagttttaggccatcctagaaaatgctaagggtagtagaacatgatgatcaaacatacatctcctctgcctctccaaaatgtcgacatagcaactcatatacacagttgctattcaggcgcctgaatcaggccaaaagcattgcatggcatctctgacgtagcacgcaccacaacaggaccacacactcaaaagggtttcaaaggctgggtcagtaactatttggccacatttggttagcctgagcggcagcggcagcagagcttaagttgccgtcactagggttccggtgctcatggcccaggccgggctgtgtcggtgcaagtggagcaccaaactgtgaaggcagctgcccctgccgaaggccgccctggtgaccctgctgcccttgataatacaaggcatttgctgcaagaggtggcattgttcgcgaactggcaccatgcatccacatcgcagcgttctcgctctgctgaagagatacaaattgattcccttctttgtattgcgcgggcactgttccatcaaacccaggagcagcggttgctgatggtgtgctttggttcagggcaaaatttcctggcatgctgcttgcagctccaaagcccccaacatagcttgagagcagtgaggcttgctggggtaagctcgcaagggaaacattgcctttgtactgtggcaaaggatattttacactggaattgggaactgcagctgctgcttggtggaataggccactgttcatgtatggttgctgaaaggcaggaggcgggagatatgtataacttggggctagagatgggtagccaatcatgcttgcatacccaagaggaagagttgcttgagcataagggtgaagcgtgagatgctgagggagtggaggaccagaagcaatgctggtgctggtgcttggctgagattgattcaattgagggttggatgaagcacctggattcacaatctcttgtggttgtgtagaaacagtagttgcattgcccatggacgatgatgttgtgccatgaaccatcgtagccaatggtgggttagtaagtaataatgagaaagcaggatcaaagtcacgcaaaggtggaagtgctggtggcaatagtccattcgggatatttccttgcataaagctagagagaggggaaatgttttgcaattgtcgatgttcttgcagataaatgtgtgcggaagaatctggttgcactgcacttggagttgcataatcggaggttgataaattattgtacatggtgttgtttggaacatctattaaatcggctgttctcaattcaggctgttgtacaggtgcaacatcaacattctccgtgtcactttttgttgaagaggcaacatgttcgtcagctgcaggtgctactgtatccttattttcgtactcatggattctgacatctgactgatcaatcgaatggttatcagaaactgctgcaacctcctcatcaccattggcagttttcaaggagactggcgcatcaagtgttccagacacaaaactaccaaatgtcaagtgtgcacaatcagcatttgaaacctgaagatgatcaggaattattacagccgggttatcttcagatgattttgattttttttcctcatgtagaatcaactgttcaaactgtttgtcagtagcagacatatttccctctgaatctgcaacacggttattctcaaatgcattgccatcagactgagagtcctctgtttccactatcaagtcattgtgatgggtggcaatttgagtatgttctgagtgtacttctttgctagatgcaggatatggtcctgaagatgttcgatcgtctgcattgcttgcactcatatccttatttttatcagaatccatgtcttcttcaacttcatctttgtaaacatctgcagttgacgatccaggtttaactgtggcgacagattctggcacctccaacccctctctgggaggtaatacatcaatagaggagtcattagatgcaggggagacctcattggtaccatttggtattctatcagttgcaacagagttcacttgtgaaggcaaaactaggtcttgtgaatcttttgaagtatgatttgttgcattggaaatgactgaaccaccaatggttggcatcccggtattacatgcaacagatctcacaggtttagcttggggtttgcccatcttgacaatatcagccatggaagggcgccctggcatcccaccccaaccatgcttcacttgagaagggggctggagaggagtggactttgcatcagcttggccacttgataaaataagactgtcattgatagtagcatggtcggctgctgaaatcttctcagttggattgctttccttcacagaatcagagactgatgatttaggaagagaatgtaactccgtttctttcttggtagggcctttaccactgccagttgaatctcctccagtcttagatcctcgaaatgcaggtttataaaatggccgaggcctggtttcctgaggtgctttgatctcctttttcttgtcacgctttcttctcacttcatgaaaaggatcttgcgagatgaggcgctcgacggcgacgtcggggtccatgccgcaatccaggagcgtggcgtagatctcggcctcggagcggtcggtcaggatccccttaagcccctgcaccagcttcctcgacgccggcgggatcgcggccgcatcccccgcccgaggctccgccgccgccgccgcggcgtagaagggcaccctcccaccgccgcccccgcccccgccccggccgcccccgcctctcat

SEQ ID NO: 4862 - DNA, 337 bp, Oryza sativa
  Clone ID: PAT_MRT4530_11706C.1
gttttattttagctacgaagggaatgacaatggcatggggggtttttttaataatgtcacggggggcctgccctacactgttggaaaaataaagcaaccgcaaactgaagatagcacggctcgcatccatattatgcagccaatattaaaggctatgcccgagtgaaacacctgaaaaaggctaacaccgatcgatatggacctcctgctaatgcattcagtgattctccctataactaagcagtgggccatggcacgacgagcatcgtgtaacaagagtggagacacaatcgtagtctctacaagatgtgccagcagagaaatgctcagcacttct

SEQ ID NO: 4863 - DNA, 480 bp, Oryza sativa
  Clone ID: PAT_MRT4530_11707C.1
atggctgctggtgaacgggcgccattgatggccatcggccgagctccccctcggccgttcctctccccggcaccctataagaggtggcatgagacctcctttcccccgtctgccctcccctaccgtcgtgccactccgcttgagctacgccgcctccagccgccgcaccggcgaggccaccagcgcgctcgtcgtctccgtccgcaccccatccacccctccaccttcttcggtgagcacgggaactccctctccaccccctaccccaaccggctccctctctcctccgccgtgccgccgtgccgtgcgcttgcggcgccgccttgcacgttcaccttgccgctcgccacccatgccaccacgctgtggccgccgctggtggttgctagtgggtgctgccgtgcgcccagccgcccactgacaagcaactgcctctccggccccgtgagccgcccgtgcgcccgacgcatggtgggctaa

SEQ ID NO: 4864 - DNA, 518 bp, Oryza sativa
  Clone ID: PAT_MRT4530_11708C.1
atgagagtgacagaggaatcggcggggagtagattaggagctcaggtggatcgagtgaaaggtgcgccagcatggtcaagccgctgcgccgtcgtcgttcctgttgcgtcagaagctgcccgcatgtctctatggcccacatggccacctccgcgcctacccgtgctcgcctccttaggcctcgtggtcgcctccacacctatcacagccgatgccaactcgtggccccacgaggccaaagttgtcttcgtgtggcccacactgccagcaccgcctccgcgtgttcaccccagccgaggtaggcccaaaagcgtcttcgcttcgcaccgccgccgtctccgcctaaagcaccagacacaagtagcacgtgcagcggctagcaaccaatcgccccctcctgcgaccaaactctggagccgcgttgtgcccttcctcaccgtgacaagtgaccaagcgtcccctgccccacaccggcgccatcatgtccttcatgtgccacgcgctagagtctgacgggg

SEQ ID NO: 4865 - DNA, 156 bp, Oryza sativa
  Clone ID: PAT_MRT4530_11709C.1
cccacgcgtccgcttcgcgaaccttctagaaccccccaaaaccctatccatggcggccaccctcctctaccgggccgctggcgccgccgacgtcttcctgcgaggggcccggttgcaccacatactggtcttcttcctgcccaaggaaacccttct

SEQ ID NO: 4866 - DNA, 345 bp, Oryza sativa
  Clone ID: PAT_MRT4530_1170C.1
atggatatcaccggcggcggcggcctacgctccccgttccccgaccttggcgcccccctctccgccacgaacacctcctccccgtcgctccaagggtggaagccctgggagcggcggctgcggtggggcgaagtcggcgccgccgcggtggccggcgaccgtcggggagttgacgcgtgtgcagatgcggatttcggagcccgccgacacctcaagacaccgacgacctcaagccgccgtccacctcaagatgccgccacctcaagccgccgtccccgagcccgacacatgctcaaggacgagcggctcgcgcagcaccagccgacgcagtacccgacgtcgtag

SEQ ID NO: 4867 - DNA, 1292 bp, Oryza sativa
  Clone ID: PAT_MRT4530_11710C.1
attgcaattatatattaatgccttgtagcttaattacacaccaaaagtcccacatttatgtgctacatgacggtacatacatttgggttcgcgtcactgaagtcctctggcacatgatgtggatagtacccatacattgcaggataattaccagcggcgtatatgttctgctgcggatattgataatactgatgacacggatacggatatgccgggtagtagtagtagctgtagcagaggctgttcatggccatcttctcactctccggcggcgcaaccgcgacaactgatctcgggagagcaactctgaacaggtgatccttcgtgctgtggctctcttccgcgacgccattgtagcttgcgtcgtcctccgttaggggcttcaggtcatcagcttcgcctccttcgttcttctcatctggttcttccttcttctccttctcttccggctcttctttctgatccttcatctgatctgcttcctccccttccttcttctcctgcgcatcgtctgatggtgatgggtctcctccttgctttgtctcctcctcctcggccggctcagtacttccggctacctttggaggctcgttgtcatcgtcgacctttggcggagactcagatggtgggggcagcggatgctgtggttctgccctgaaaatggcggctctccttcctgtccacttgtggatgagccctactagggttgctggctcaacctttcctctcaccatcacctgggacgatttcatatgcggcgtaacttcctccactcctttaatcttgagtatcctccgtttgatctcctcgcagcatgcctcacagtgcaggtctatcctcatcaccactaccatttccatgtcctcttctgacatctctttgcccatgtcctgctctgcagcatctttcttcgccgtctcagaactcctcttctccggtgacagcggtggcttcaggttggccgacggcaacgagctcaaaagcagggccttcttcccggtcctcctgtccaagacctccacaatcccagccgggtccaccgctgccttggggcccctcacgatcaccgtgttggtccggcaatccacggtcacctcctccacaccatcaagacgctgcaccgagcggcgcagcttccgggcgcagccgtcgcagtgcaccggcacgctgatcaccgcctccgccacctcaccgctcttcttcttgtcttctccatcacctccgccgtcgttagcgccgccaccggaaccacccgctggcgtcgccggcatccacgacctccacttggccat

SEQ ID NO: 4868 - DNA, 464 bp, Oryza sativa
  Clone ID: PAT_MRT4530_11711C.1
ttgctttgctcgacacagctccgaatggttcggcgagatcgatggcaaccatgcctgctcctgcttctgcagcgacatgcttcgtctttgccgcgtcgggcgtcaggtgcagggcattctctacgccgatcaccaagaatgcgcggtgcgtcgtcgctgatctcctgaagctgctgcggcgtccggggaacccgcagctgcctccgctcgcccagccgcgcccgcagctcatcgtcgctcgcccagccgcacccgccacccgcgcccaacgatgccagagagagagacagagagagaggggaagaggagaaagcgacgcagccgccggctccgcatcccacgccgccgccgcctccgcatcccacggcgccgcccatcgtccgccgccgcgcgctgctttgctgagaaggcgagaacgccaagagagagggaagaggaggaagagggtactgaaggctgcctaa

SEQ ID NO: 4869 - DNA, 1154 bp, Oryza sativa
  Clone ID: PAT_MRT4530_11712C.1
ttagatgaacctttaatgccatcagcttcctatttctagtcagataccttgaatgcttcttttgaaccatgggtcgatgactccaacattacttgatatctctatgctgaccggcctagatacaacctctttcatcaacatcgtaagtttgagaacaaagtgcaactataagttggacaccaaaggtggaggtggttggtcagggtatatcaccagacattccaaccaaggttctgttattgagaaggagcatgtagccttcttgaatctttggctggacagatttgttttctgtggaactaagttgtggaccaacagctaatatgccgttgctttagggcccgtttagttcccgtaaagagatgcctttaggaaaatatctattggggccacgtatcaacttctgcataaaacaacaagaaaattgctaactggcaagccgataggatgtggagggcctcggtggtttgtccaactttggctcaatctctatacagttcaagttgctaatcgtatgtccaaccctcgaagaatatgtatttccaacgatgccgatgaaataactcaccaatgtatgtcctttagagaagcaacatcaatctaccctagattaggaccattggatgaaaaacttcaaatttggtttgaacacttctataatggtttcccagaagcactagaatttggtactccaacactgatttcagttcctatgagctcccaattgatttgagattggatgaaatcaacagtgacaacaagtccagagatatatttatatcagttgtctcaccctgcatcctttcgactggtatatctaccggccgttactctgaggtctcttacgaattctatcatttaatggtggcagcccgacaactaggatatggccaactcccaattggtctatacttcttaagaaaaattcaaactaggggaatagtgatctcaactctcttatttgatcggctgctaaaccttgaaggacctatcttacgctctcctgccgatatcgatatccatcccatgcgcagccgattgtttgattaatggtggattgagtggatgaaacatctttacgtcttgggatctaacttttacttaaccatagtcaatccttcaattagcccttgcaattcataaacttctctacc

SEQ ID NO: 4870 - DNA, 360 bp, Oryza sativa
  Clone ID: PAT_MRT4530_11713C.1
gcgatgagtgcggcggaggaggcagcgaatgggaaagacctcgcctccggttcagtgcgcgacggcggcggaaggggacgacctcgtgggtagcggtgaactgtggcggcggcggtggatggggaagacctcgtctccggcggcggcggatggggacgacgtcgactccagccgcggcggatggggaagctccggcggtggctggggaagacctcgcctctggttcagtgcgcggcggcggcggaaggggacgatgacgcgagaagggttcggcggcgtcgcaggattcgggtgacggcgatctcggcggcgtccgcagccgctcgttgggaaggggaggggggggagggcgccgccgcc

SEQ ID NO: 4871 - DNA, 305 bp, Oryza sativa
  Clone ID: PAT_MRT4530_11714C.1
cgcgtcctcgatcgttttacgaaaccatcggggagaagttctgctcacggcctggaaaaccatccggaactgcgactcggcagaagaagctgaagtcatagcctgtcgggagagggtgagtttatcggtagactggatcagacagccgataatccttgaagctgactgcgctaatgtgatcgcgtgcctcaaggccagagaaattgaccggtccaagctgtgccatatcctctacagtattaagtcgtccctgcaagtcttgccggattttcgcctggagaagattagaagagaaagcaacggtg

SEQ ID NO: 4872 - DNA, 279 bp, Oryza sativa
  Clone ID: PAT_MRT4530_11715C.1
atgtcgaaaggctttcccgaccaatgtgcgaccggcggcatgtggcccacagatgccttcatgtatatcaaggaggaggtgtctaccatcgtcggacgagacgcatttgagaacctctgcgtcgtcctcgggcaactcttcgctgttgatgaatttgatcagtggggtgcgccagtcgtctgtgatctcgatatcggcaatggcgcgttccgcctctgtggcctccaagctgatgtcgggggcggctgtgttgatctcgccgatcacctctttcactga

SEQ ID NO: 4873 - DNA, 600 bp, Oryza sativa
  Clone ID: PAT_MRT4530_11716C.1
ggctgagatcctggtaatcatccttctgtgaaaaatgtacagagatgcaggtctgtaatataaaaatcttaaacattatatagctcttcctgcactgttttattttatttctttattttcttattcatttgctaaatacctataatattttgtcaaatgcactaaacatttgggttgaaatctcttttttattttgtggggattttggttttgccctttttaggggggtggttatttttgagggtttaacgtgcccagaagctgttgtgtctgacacttgtcatgatcaacaacagcaacaacaaaggtagaaaatactcctactgacatagctacctgtgatgtacttccttagggcttttaaggatgagccattcaaatagagtgacccttcattgaccgaaacttgaatcactgcaaaatgaatctaggttgctgtcactttttcttttcttttcttgtgggtggcggggctcgatgtagattttactctatgtacagaatttaatgttgaatatattaaaataacaaatctggcatggtttggagaggttagatttactggaaatgtattcatactgtgaattgtgctctgacggt

SEQ ID NO: 4874 - DNA, 455 bp, Oryza sativa
  Clone ID: PAT_MRT4530_11717C.1
aaacaaatcattttttttcaattttaaaataaggaatagatcatgtatacatctaaacaaccctttcataaatccaagcaaacttttcgtaaatctaagcaaccttttcgcaaacccaaacaaccttttcgtaggcgtcctcggattggcccgggggatcaaattaattataaaaacatgagtttaattaatcgatttattgaacaaggaaaaatattatcgagacgaataaatagattaatcttgaaacaacaacaattaattactcttgctataaaacaggctcgtattttatctttcgtactatttcgtaactagtttcaataattacaggtcctagacctagaaaaaatagacatattcctcaattaacacaaaagttcaattccaatggaaacttaagaaactctaactagactttaagaaacaacaatcggtacttaagttccgattgt

SEQ ID NO: 4875 - DNA, 1326 bp, Oryza sativa
  Clone ID: PAT_MRT4530_11718C.1
atggggtcgacggcgatcaccgtgtcgaacagctacttctcgcaccacaacgaggtgatgctgctggggcacagcgacgagtacctgctggactcggcgatgcaggtgaccatcgcgttcaaccacttcgggatccagctcgtgcagcggatgccattggggcgggaggaggaggggaactccccaatgggccgccggttgcgggccgtctcggcccacctcctgccgccggcgtccaccaccaccaccaccggcggcgttgacctcgccgccaaccccaccgccggcgagtacgcgcacgtgcagggctacagtgctgtgctccctgagaagttgcagaccgggaagtggaatgtataccggaatgcgaagacacctcttaggttaatagatagattccctgatacccctgatattgcaacgcttcatgataatttcgtgtatgcagttgagacctttagggactgtagatacctgggcacaagaatctgcgctgatggaacagttggggactacaaatggatgacatatggagaagctagtacaaacaggactgcaataggttctgctgttaagctttataactcaaatgccatgtgttcgccttatagtggtaattggtggagacaatgcaaatatgccatctaccccaacatctactggagtggaaattataacttactccagactacttaaccagggaaagatgagttctcaatcttttcgccctccaaaacctgaagatattgccactatttgttacactagtggcactactggcacaccgaagggagttgttctttctcatgggaatttaattgcaaatgtagcaggatcaagcctagtcattaagttttacccatctgatgtgtatatctcatatctacctttagctcacatctatgagagagttaaccaggtctcagtggttcactatggtgttgccattggtttctaccaaggggataatttgaagctgatggatgatctggctgcattgagaccaacagtatttcctagtgtgcctcggctatataatagaatttatgctgcgtaatccaactacacccgtaacttagatactttcatgttgggaaaaactatttctagtcatatcctttttgaggttagcatttttttcccttttcagtacagctaagtgggtagctgtttatcattttgtagaattacaaatgctgtcaaggagtctggagggttgaaagaaagattgtttcatgctgcatacaatgctaagaggcaagcgattattaatgggagaaatccgtccccaatgtgggacagggtggtatttaacaaaataaaaag

SEQ ID NO: 4876 - DNA, 558 bp, Oryza sativa
  Clone ID: PAT_MRT4530_11719C.1
ggtcccgagaatttccccgggttcgaccacacgccgtccggattttggactcggattgggagcgccggtggcttgggtgctgcgcccaatcgttttcctacacggggaccaccttcgcgggagtaatatttctcgagtccatgaaaaatttgctctgatgatatttctccagtttgtggtgaatccatggaagaaggacagattttatcacattttctggtgtggtttatgccacgtctaatcacttatttagcgccagaaaaaaaaatgtgtgtacaaaagagagaaagtacaacctcatgggctagcgtcaaggacatctgggaattgagatggcgatttttttttagttgttgaccaaacctaagccctagaagcgtcctggtctggtagggaggacgataggttatcaaagtgttcaactgtcaaggaggttggtgccctaaaaccccttcggctccaccacctcagtgcccagtgttctgctgtgatcgcaatcgtgtctcaccagaaactcatggcgtgtgaataaggaagaaaaaaaaaaaaaaaaaaaaa

SEQ ID NO: 4877 - DNA, 705 bp, Oryza sativa
  Clone ID: PAT_MRT4530_1171C.1
cagttgctggcgcataataagcaagagttgtggcacaagaactgaatcacactgcaaaggattttagagggcctcttagtggagaaaattaacagataatcagcaggtatgcatatgttatggaggaagcaaggttgatgaaaaccacaaaagtcgcatgtcaacatgttgaagcgatttttcagctgcactaggcacaagctaagctacgtcaactcaatgtttgctttacaaaagttcttcatttacactactgctaaccgttaaaggacacactgattttatatatagaaacaatttcagatatatgcaacaaattcacaattaatagacgctaccttgtcagcatggaaaaagttccaatatggaagatggcatcataatttacaaaaataatagcaataaacaattacatctaaaagaagcctcagtagcacacctgatggagcaaagtaggatgagtccaacattaaacaggaacgagttcatcaaagttcctccccatctgaaaaaaaatgcgttatcaatgattccaaaaaagatactacatagaaaaggaaatgccatgggatatgtcaaatacttcattgggtgaatggtgatgaaaactaatttcaaacccagcatcatttccccagcaatcactgctatgaggagatagaaacagaagaatgcaaaggcagcagtcccaagcggacgcgtggg

SEQ ID NO: 4878 - DNA, 2701 bp, Oryza sativa
  Clone ID: PAT_MRT4530_11720C.1
atggcgcggcagcagcagcagcgggaggaggagagggccccaatgggcgcggcccagcggcggctgcgcgccgtctccggccacctccagccagcgacggagaccggcggcgtggaccacgccgccaaccccaccgccggcgagtacgcgcacgtttacaactcactgctcatagcggctccagtgcagggcaacactgctgtactccctgacacggcgcacactggagagggcaatgtctccaactccgcagagtacagtcttgtgctaataaatagattccctgatagcccggagattggaacgcgtaatgcgaacattgtttatacagttgaaactattagcgcctgtagatatgttgttacaacacttcgtgataatgtagcagatggagatgacacatggatggcctatagatacgttagtacaagaatgtgcgcggaaggttcagttgttgtttacaaatggatgacagatggtgaaggcattggtttgtattttgcaatcggacctgggttgatcaaagatgataatgcttatgcggcatatttttatgtatccgtgccactttatgactctctaggtcaaggtgcagtttagttcattgttaaccatgcgacagttcaagctatctttatgatacttctggtcctgatgcctctaattagctttataaccaagatgccgtgtgttcgccttatagtggtaattgatggagacaatgcaaatatgccatctaccccaacatctactggagtggaaattataacttactccagactacttagccagggaaagatgagttctcaatcttttcgccctccaaaacctgaagatattgccactatttgttacactagtggcactactggcacaccgaagggagttgttctttctcatgggaatttaattgcaaatgtagcaggatcaagcctagtcattaagttttacccatctgatgtgtatatctcatatctacctttagctcacatctatgagagagttaaccaggtttcagtggttcactatggtgttgccattggtttctaccaaggggataatttgaagctgatggatgatctggctgcattgagaccaacagtatttcctagtgtgcctcggctatataatagaatttatgctgcaattacaaatgctgtcaaggagtctggagggttgaaagaaagattgtttcatgctgcatacaatgctaagaggcaagcgattattaatgggagaaatccgtccccaatgtgggacaggttggtatttaacaaaataaaagctaggcttggtggacgtgtgaggcttatgacttcaggcgcttctccattgtcagctgatgtaatggaattcctaagaatatgttttggtggtgaagtactcgaaggatatggaatgacagagacatcatgtatcatctctgcaatgaatattggtgataggttaattggtcatgtcggatctccaaatccatcttgtgagattaaactagtggatgtcccagaaatgaattacacctctgaggatgaaccatatcctcgtggagaaatctgtgttaggggacctacgatattctgtggttactataaagacgaaatccaaactagagaggctgttgacgaggatggttggttacacactggagacataggtttgtggatgcctggagggcgtctaaaaattatagataggaaaaagaacattttcaagttagctcaaggagaatacatagctcccgagaagattgagaatgtctatgctaagtgcaagtttattgcgcagtcctttatatatggtgatagtttaaactcttctttggttgccgtagtagcagttgaaccagatgtgttgaaggcttgggctgcatctgagggaatccagcacgaggatttaagacagctttgtgctgatccgaaagcaagatctgctgtcctggctgagatggactctattggaaaggaagcacagctaagaggttttgaatttgccaaagctgttacccttgttgctgaacctttcacattagaaaatggtctcctcaccccaactttcaaggtcaaaagaccgcaagctaaggcatactttgcaaaagaaatcgcagatatgtatgcacaactgcgccaagcagaacagataaaacctaagctgtaactacccgagtgacaatcggagtaaaagttctagcaacaaactacaaatgactggcttggtatagtgaaggcaactgtgaatgaactctgttggatatgtccacgaatgcttgataatcatctaataggatgatcaggtaaaagaatagcctgttttatgtacatctgtaagatgaaatgaaaaaagatgtagacatgttaaatgtcatatatatgaatccattgaatttcacctgactatcataggaatataaggtaaaactttccctcttaaaaaaaaaaaaaaaaaataatatttgtttgttgctagccaagcaaaaaaaaacagaagtatttcacgagcccttccatctgacgaggaaatgaaacttcaccgatcaacagcagggatcagttgtatgtagaggccggtttcttaatccgttgttttaaattcagcagggaacagtgcttgatgcataattcatttaagttttttatttgagtgaagtaataatacatgttaagaaaaaaagaaactactcatttgtttggaacaagtatttggt

SEQ ID NO: 4879 - DNA, 190 bp, Oryza sativa
  Clone ID: PAT_MRT4530_11721C.1
aaaacggggaaaaccctcccaaaatgggggagaaaaaaccacgggcgcttgccaacaaaatttttttactttttttaagggggggttacatcaccgcacgggggtttacaaggggttttttttttggggaaccctaaaagggatgattatccctacggcaaaagcttgttttttttaagtgcaaatgaat

SEQ ID NO: 4880 - DNA, 625 bp, Oryza sativa
  Clone ID: PAT_MRT4530_11722C.1
ccggccgggactcctcccccactctctctctctctcctctctctctctctcgcccctcgcgccaccgcgccaggagctcgcgccgcgcctcgcctcgccgacgaagacgacgaggaggtcggtggtcgtggtggtctggtttggtgtccatccatggcggggcagcagccgccgacgggaggagccgaggacgacttcttcgaccacttcttcagcatcccctccgccgccgcggccggcgccggcggcgtcggcggattcggctcgggtgaccaccaccccttcccgctcgcgctcagccccggccaaaggtgcgggcgcggcgcgggcaggccaccgatccccacagtatcgctgagaggctaaggagagagagaatagccgaaaggatgagggccctgcaggacttggtccccaacacaaacaagacagacagggcagctatgctagacgaaatccttgattatgtgaagtttcttcggcttcaagtaaaggttctgagtatgagcaggctgggtggtgctggtgcagttgcgcagctggttgctgatattccaatctcagttaagctgttcttgcactgtacattgccggtgatcacacggaatgtccagggtttctcttt

SEQ ID NO: 4881 - DNA, 2473 bp, Oryza sativa
  Clone ID: PAT_MRT4530_11723C.1
atgggccgccggttgcgggccgtctcggcccacctcctgccgccggcgtccaccaccaccaccaccggcggcgttgacctcgccgccaaccccaccgccggcgagtacgcgcacgcttctccagtgcagggctacagtgctgtgctccctgagaagttgcagaccgggaagtggaatgtataccggaatgcgaagacacctcttaggttaatagatagattccctgatacccctgatattgcaacgcttcatgataatttcgtgctacatgctttacaagaaaattattattcttcaaatttaagttctgtgctaagttctgaggcaatataccccaaattgcgcagctacaaatggatgacatatggagaagctagtacaaacaggactgcaataggttctggtcttatttatcatggaatacctgaaggtgcatgcattggtttgtattttataaacagacctgagtggatcatagttgatcatgcctgtgcagcatattcattcgtgtctgtgccactttatgacactcttggtccagatgcagttcagttcattgtcaaccatgcgacagtagaagctattttctgtgtgcctcaaacactaagcactctgttaagctttataactcaaatgccatgtgttcgccttatagtggtaattggtggagacaatgcaaatatgccatctaccccaacatctactggagtggaaattataatttactccagactactcaaccagggaaagatgagttctagaccttttcgtcctccaaaacctgaagatgttgccactatttgttacactagtggcacaaccggcacaccaaagggagttgttctttctcataggaacttaatcgcaaatgtagcaggatcaagtgtggtcattaagttttacccatctgatgtgtacatctcatatctacctttagctcacatctatgagagagttaaccagattgcactgcttcactatggagttgccattggattctaccaaggggataatttgaagctgatggatgatctggctgcactgagaccaacagtattttctagcgtaccccggctatataacagaatttatgctgcaattacaaatgctgtgaaggagtctggagggttgaaagaaagattttttcatgctgcatacaatgctaagaggcaagccattatgaatggacgaaatctgtccccaatgtgggacaaattggtatttaacaaaataaaagctaggcttggtggacgtgtgaggcttatgtcttcaggtgcttctccattgtcagcagatgtcatggaattcctaagagtatgcttcggttgtctcgtaattgaaggatatggaatgacagagacatcctgtgtcatcgctacaatggattgtgatgataggttaattggtcatgttggacctccaaatccatcttgtgagattaagctagtggatgtcccagaaatgaattacacctctgaggatcaaccatatcctcgtggagaaatttgtgttaggggaactacgatattttttggttactataaggatgaaatccaaacgagagaggtcattgatgaggacggttggttgcacactggagacataggtttgtggctgcctggagggcgtttaagaattatagataggaaaaagaacattttcaagttagctcaaggagaatacatagctcccgagaagattgagaatgtctatgctaagtgcaagtttattgcgcagtgctttatatatggtgatagtttaaactcttctttggttgccgtagtagcagttgaaccagaggtgttgaaggcttgggctgcatcggaaggaatccagtacgaggatttaagacagctatgcgctgatacaagggcaagagctgctgtcctggctgacatggactctattggaaaggaggcacagctaagaggttttgaatttgccaaagctgttacccttgttgctgagcctttcacactagaaaatggtctcctcaccccaacattcaagatcaaaagaccgcaagctaaggcatactttgcaaaagaaatcgcagatatgtacgcacaactgcgtgaagcagaatcaacaaagtccaagttgtaattacccgagtaacaaacagaataaaggttcaaccaacacaggagatttagttcgccaattgtatattcaacaggatgaaataagcgccttctatttactggccaagcaaacaatgacagcagtatttctcgagcccttccatctgacgacgaaatgaaacttcaccgatcaacagcagggaacagttggatgtagaggccggtttcttaatccattatctaaaaaacagcagggaacagtgcttgatgcataattcatatttgtttcttatttgagtgaagtaatactactgtttagtgggatatggactactcatttgtttgggacagtatttggtgcggaattaatatttgtttgttgctagccc

SEQ ID NO: 4882 - DNA, 1196 bp, Oryza sativa
  Clone ID: PAT_MRT4530_11724C.1
ctctctctctctccgcgagctgctccccgcccctcgcgccacgcgtcgccgacgtcgaggcggcggtcgccgtcgccatcgagacgacgaggaggtcggcagccgtggtggtctggcccaccggccatccatggcggggcagcagccgccgacgggaggagccgaggacgacttcttcgaccacttcttcagcatcccctccgccgccgcggccggcgccggcggcgtcggcggattcggctcgggtgaccaccaccccttcccgctcgcgctcagcctcgacgccgagggcgccggtgccgccaggcgcctcctcgacggcggccacgacggcggcaggacggaccgggaccccgtgcagctcgccggcctcttcgccccggtgttcggcgccgccgccggagtccagccgccgcacctccgcgccccgccgcctccccaggtgttccacgcgcagccgaagcccggggagggggccatggcggcgccgcagcctcagcagccaccggcgccccggccaaaggtgcgggcgcggcgcgggcaggccaccgatccccacagtatcgctgagaggctaaggagagagagaatagccgaaaggatgagggccctgcaggacttggtccccaacacaaacaagacagacagggcagctatgctagacgaaatccttgattatgtgaagtttcttcggcttcaagtaaaggttctgagtatgagcaggctgggtggtgctggtgcagttgcgcagctggttgctgatattccaatctcagttaagggggaggcaagtgacagtgggagcaaacaacagatttgggaaaagtggtcaaccgatggcacagaaaagcaggtagcgaagctgatggaagaagacatcggagcagcaatgcaattcctccaatccaaagcactatgcatgatgccaatctctcttgcgatggcgatctatgacacacagcattcgcaggacggacactcagtgaagcctgaacccaacactccttcatagtatagtaacaataacactagcatgcacacctactactactaggcgtcgacctatccaaagtgtaggatatactggacattttgatttgctaactggaaaaggcctaaggatcctctcctcaaagtagtacccatggtatatgatgtcgtctcctcttttcttcttttcttcaaaaggtgctttg

SEQ ID NO: 4883 - DNA, 402 bp, Oryza sativa
  Clone ID: PAT_MRT4530_11725C.1
atgtcgtgcctctacctcctcaccgtgcaagtacatgttgtcactggacattgtgcctccgccttccccaccgcgcaagggcatgtcgtcaccggctgtcacgcctatgcctctccaccgcgcaagcccaccacgttcgctcgtcgtcgtgccacccctcctctctgcatcgccgtccccaccttcccgatgtggttgtccctagtccctaccaccacctccaccccattagggtgctggtgctgccaccacctgagtgcagctcctaccaccatccacttcttcccctctctccaccctgctatcgcggccgcttcccctttcgccgccactattgccgccagttggtggtggagaactggaggatggatgattggaggtagtagttggaggaaggtgtag

SEQ ID NO: 4884 - DNA, 327 bp, Oryza sativa
  Clone ID: PAT_MRT4530_11726C.1
atggcaaagagcagtagaggtcatccagctgtccatgttcgatcgaaccgtctgcccaggaagcgcatcaaatacagccgtgctcgtactcctcgtctggccaccgccatcgccgtcattcttgtcctcctcgccgccctcgctctcaccgtcgtgctcgtcctcctcaccgccctcgctctcgccgtcaggctgcggtactcggctgagaagatggggaccggaaggcgcgcaagatgcagcgcccggtcacggccacggcgcatcggtgccacgagctcgatgcagggagaggaggaactcctcatcgccatctctcagcagtga

SEQ ID NO: 4885 - DNA, 741 bp, Oryza sativa
  Clone ID: PAT_MRT4530_11727C.1
gcacgaggcacaccgcactctctctctcaccccctacactgaccgatccactcctccacttcacagaggtagtggcagttcgtgtgtgagaccgagacagtgagagtgagcttgctagctagggggtgtttaccgcagagcccgctgcgcatcacgcacgacggcgagttctacgcgcggctgctcaccaaggagagctcccagggcaacccgtcgttccgctactacggcgccggcaccggcgccgtccccttcgtctgggagtcccacccgggcacgcccaaggtcgacgcctcctcccccttcgccgaggccggcggcgtcccggccatcaccccgccgccgtcctaccacctccgcgccgccgccgccatgtcgtcgtcgccgcagccgcacggccgtagcggccgcaggaatgttgttaatggtcgcggcaagtactgcggctactgcaggctcaagtggatcaagatcggcttcatcgccgccgtcttccgccgcctcgcgctcggcaagccatcccgcgcgtcgtcttcctcgtcggccgtgcagccctcgccgtccacccgctggctcttctccggctccggcagcgtcgagaccagcgacgagccgcagccgccggcgatttcgccggcgtcgacgaagcagggaggcctcctctgcctcggggtccggccgagcccgtggatggtgcagctctgcggcgtccagagcatcaggagggtcgacaccggcagc

SEQ ID NO: 4886 - DNA, 333 bp, Oryza sativa
  Clone ID: PAT_MRT4530_11728C.1
atgccgctggaggaaaagagcgaaagcgagaaagaaaaggaggaagttgatgcaacaagagaacattgcactgggcagaggaccgaccgagcagttcttttgagggcggcagggctcgccggctcgggctgtgccgcggggtgcggccaggacgcgacggtgctcgccgggagggacagggtgggggccggccggcgtgcgcgctgtccgaggcatgacgacatgggacgcgacgtgtgtggcatggacgagcgcggcgggaggggcaccaatcattgtgcagttggggggcgttttctggggaaatggaaggctgcgtgcctgcgtcgctga

SEQ ID NO: 4887 - DNA, 239 bp, Oryza sativa
  Clone ID: PAT_MRT4530_11729C.1
tttttatccattggcagatggcattctacatgagctctgtcaaatattatagggactgtatcactttgcttgtgctggattgcagtcaaagacatgtatttagtgtgtctgtgatcaggccgaccctaactgaattcgggaaagttgaaatctcaatgttcttcgtgttatttaaacggaattggtagaaaactttttctgttggctgacggcaaggatctttttcaagaacaaattct

SEQ ID NO: 4888 - DNA, 306 bp, Oryza sativa
  Clone ID: PAT_MRT4530_1172C.1
ctactcctcttcactatgtcggacctggactccatgatgccaacacaatcgtagccaccgcgttccctcctcatccccagcgctggccaatgttgcttcctttatgaccccagcatcaatcgtcgccttcacttccccatccagagtagacgttgtcatgccctcatgctccactcctactattgttgcgctagggatccactcgtctccacctctagattcggcctcaacgacgatgatagtccatagtggatctgaccttggaagaggcggtgagcagctcttattcctttgtcgtgctcccat

SEQ ID NO: 4889 - DNA, 563 bp, Oryza sativa
  Clone ID: PAT_MRT4530_11730C.1
tatgacgatgtctgatgaatatggatagcttatatttgaccgcccagttgtatggctggatttaatgaccttatcataatcagatatggtaccatttttttctcccaaacaagtgataaattccttctgcacacgtttctggggatggtcctaggcatcatccttcagagttcagactatctggacaaagtgtgcgttccgacatatgcacatttttatcgaggaacatataactactgtagtactagtatttttcaaaaccacattacatcccaagaccaaacctttctcgcttgttgaatcaatcaccatttccttttcgtttactgcaccatgctatagtaattaggctattcccaacccaatgattaggatgatgtctatatcattaaataagttgtcatataggataaaaaatgatgtgacaagtgaataaatgagtaaagagaagaaaattatgttttgcatgagacattgtttctacacaacatccaagacatcatgtgagataagaagcattaaattgaagtatggaatagtgatgtttgtattggaagagtagt

SEQ ID NO: 4890 - DNA, 459 bp, Oryza sativa
  unsure (1)..(459): unsure at all n locations
  Clone ID: PAT_MRT4530_11731C.1
agagagggagagtaaagctgatagcctgatactgaccaggaattggattaggctagctaacagcgcaagaaaagcctccgattcctttcgtcgtcgccggattgccgaaaggatggacagctcaaggttgcaggtcccaacgcctgttcacatggtcaagaacatgttctgagtaatctgttggctcttcttgtatgtgacttgctgagtgagagagaggagaggaggggagaaagagagggccggttgctggagcttctcttcatgatctctgcattcccagtgtttctgaaatccggctagcggtgaactncctgatgaactgaacaatcaatagaagatacaagaaaagttatttccactacagaaagaccgctgattatctnaaatgggaaggcgaccnccaaagcggtccacttgaacaagagggaaacaatntaggcttccgtttnggggcct

SEQ ID NO: 4891 - DNA, 523 bp, Oryza sativa
  Clone ID: PAT_MRT4530_11732C.1
ttttttttttttttttggaacgaaataagtacgtgcaactcttgtgatgaagggagtacaaaggatgattacatatttgtagcacaagaagggcatggaagaccataggctatatggcccatcacagtgcacgctcggacgtccatcactggtcggatggccctcgggcagtcgggctcaaaaggcagagcacttaaacactactcagaaacattagtaataatttatgaaaccaagcactataatacatgcaacactaactagacaataatcattgggataaagttagaaactaggtctctcgacgttaaacaggttcacaagatagtgatatggggatcaattcaacacaggatggcctcttgtcttcttattttagctgcaagtttacgttggaccagatcctcaggaagagtccaatacggcataggaaccggccatctatcagggtgaacactatcatctccagcaatcttccaatcaagcacatcagatggattaccatggctatgttcagcaacag

SEQ ID NO: 4892 - DNA, 876 bp, Oryza sativa
  Clone ID: PAT_MRT4530_11733C.1
atttagcgcttgtctacgagtagggctccatgggctttgctgtttctgctttcggcttttcactgtttggcctcggcccgatgggaatttatcgtttcgtctaccaccggacacgtgtcgggctctgattggttggtagacgaaacgtcgcgtgacgggaaagccgggtcaactggcaaagaccccgggggcctcggcgaaggttggtcgtgttaccttggcaagtcacttgtcaaggaatccgacctggctgagttcgtccactccggcgcccttgcaaggggccaggcaacgtgcgggggcgaggccgttgtcccttcgcctggtgataggcgaacgattgttttcgccgccttcctcaccgcagggcttcgccttccatgcgacaattttcttccgcccgtgctggagatgtacgagctcaagctaccccagctcagtccctcggcgttccctaagctggccgtcttcacatggatgtgccgaacatgcgggttcgctcctaccgccgagctgttcgccatcttgttcacggcatgcgctatgaccaaagacgtaaacataccggccagttcaaggaaaacggtcttcagctgtgtcaactttatgcttcggccggagcgttcggatgcatggccggtgcctgcgttgatgtggttctacgttgccaacccgtaccctactgaggacgacaaggcgaactggcttcgctttcgacggctacttgtttccatcgtcgctaagccaagtgtggaggtcgaccgcacactcgagtccaggctcatcctccttcgcaaggttgcacggaggctaagtgcccgcgacctttgtgaggagttctgccttcttcgaatctctctccttgctcatgaatga

SEQ ID NO: 4893 - DNA, 766 bp, Oryza sativa
  Clone ID: PAT_MRT4530_11734C.1
ctagggttatctatgcattttgttcatacaatatatatctgatcgttagctcttccccaggttagaggtctctgcacaacttacagttacagccttacaggggggaagggcgccatatcgagagagcgaacatgaccctctaaaaaccaccagcatgggggcgataaaaaagaaaaagaataacatatattgtctttgcttgagcttgaaagctgtcatcaaaagtacagaccatactgtcaacgaaagaaagagaaaccacagtccataggcaagcagagagggccacagaaacaaggtatccagcatcttgatgatctcattcacaagcatctcacccatcctcaaaattcattggatgcaaatacatgcttgacaccactttatcatctttgttgacaatcacagatcatagatcatggaactagctcatgtactcaaatgctcttcatgggtttctgagagtggtccatgcggcgtgtcttcacaagggaagtttccaattcctgaacagaaatgtttggagacacttcttttgtccaaatgctttccaaatcataatattctcttgctctttcttcaagtgcatgaatgatgatacttccagaatcaatgacaatccactttccagcttgctggccttcaacacttggcatcaatattctatcagaacccttctgcttctgttttatcttgtagagtagagcctgggcgatgttgcggacgtgcccggacgcgtggacggacgcgtggacggacgcgtgga

SEQ ID NO: 4894 - DNA, 438 bp, Oryza sativa
  Clone ID: PAT_MRT4530_11735C.1
atgccaccaaaggcaaggaaaccgtcagcaaggtcggcattgcaccccctccacagggcacaccaaatcagccgtgctgcccctgcctgcccgcggccatttcgccggcgcttacgtctgtgtgggaggtggaaaagcaaatgcggtggcaatgggaatcatgtgtggcgttcactagggagcggaggcagaaacgcggatgtcgtggctgtggcggcggcgctggcggcgcagattgagcagattggtgggcgtagggaggcagagcggttggcggtgttcttccatttttcacagatcgggggcggagcggtggagggagagccggcgattgggagcactggaggcggcgacaggagagggtgtggaggggttgtgggaaggaggcggcgaggaaggcggaaaaatcacgtggcatatgggagggaagcaatttga

SEQ ID NO: 4895 - DNA, 1350 bp, Oryza sativa
  Clone ID: PAT_MRT4530_11736C.1
atgtgggagtatcatcaccagctgtcgacgcacgcggccttgcagccctcgtcctcttttccctacagttactggagcccctactccgggtcgacggcgctcgccggctcggccttcgccgccgactcctcctcgtcgtcgaccgacgtcatgcgtctcccggctgccggcgagcacgcccacggacacggctggagccacggcgaactaagcaacagcaccaccggcggcggctacagggagaacttcctcgatctgctcgcgtcgaagaacgtgacgccggaaatgttcgaggaagtccccgcctccgagcactacaatgtcgcacccgcggggacgaccctgacgacgacggcacggtcgttcgatcatcatgctcgctccgacgtctcgccgatcaagtacgagatcgccggctcgccgctgtacttgggtggcactaacaccgtcctccaggtccaggacatgaccatgatgagtagcacgccagcatgctacggcgaacaccaccaccaccaccatcatcagctgacgaaggaaggcagctgcaaccatcagcagcaggagcagcacgagcttgcgattagccccatggcctcatttctgcagcaaataagctccggcagtgctagcgttggcgtgcacaacagtagcctggattattcaggcttaggagatcagcctgacaagatttgctgccaggacggccgggaaatggaggctagtccttttggcatgaggagcttgccggatcttgggtcattcgccggctacacgccggccatcgagtcgacgtcggtgcaaccgtacatgagatgcgccaattcgtctgacagcaatcgacaagaacaggagactgtcccggcaaggagtagtagcagcggcagtggagcggcggcgactgatcgtaagaagaggaagtcagaggaaaggcaggaaagcactgtcaagaagtccaagcaagaggcttccaaagcatcacctcctaagcaaccagtgcctaaagtaaagctaggggagaagatcacagcacttcagcaaatcgtttcgccgtttgggaagacggatacagcatcggtactgtttgaaacgatcaagtatatcaagtttctgcacgaacaagtacagttgctaagtgagccgtacacgaactccagcaggagcaacaagcagggtaacagcgttccatggggagatcaagcagaagcgagcaagggagagacgatggagcatgacctgaggaatagggggctttgcttggtgcctgtctcgtggacgcccgaagtgtaccgggatggcaacgcgatggactactggacgccggcgtaccggggctgcctgtaccggtga

SEQ ID NO: 4896 - DNA, 310 bp, Oryza sativa
  Clone ID: PAT_MRT4530_11737C.1
aatgattattagaaaatggaaaacaaaaaaactagaaacagggtccagaaagaatcagatggaaaccttgcaaacaattaaggcattctagggggcccgtccgcatgccagaggaaaataaaccaagctagaaaccaacgagctgtatttggaccctcgaaggacattcgatgtgaatggaaaaaaagcaaaccagcaattggcggaccttggggccgccccggggggggtggaggggacaggggcgccggaccccctgtcggccaggggcggaagccgcctgctgctggggaaggaccctgaagcaggg

SEQ ID NO: 4897 - DNA, 2422 bp, Oryza sativa
  Clone ID: PAT_MRT4530_11738C.1
atggagatcgaggaggcgggcggcgccggggaggatgagctggaaatggaggctccgagcgtgagcacggtggcgattgcggtgaacgggagcaggaacagcaagcacgcactcaagtgggctctcgacaagttcgtccccgaaggaaaggtcctcttccagatcttgcatgtccgccccaccatcaagatggtgccaactccaatgggcaatttcattccaatcacacaagtgcgtgaagacgtagcaactgcatacaagaaagaagtggaatggcaagcaaacaatatgttgcttccttacaagaagatgtgtgctcagagaaaggtagaagctgaagctgttttactcgaatctgacgatgtgcctactgctataagcgaagaaatcagcaaattcagtgtctgcaagttagttttaggttcttctagcagcatattccgaaggaaaaacaaaggaagtaagactgcgaccaaaatctgtgagtgcattccaagcttctgcacagcatacgttgtctcaaaaggaaaactatcatctgtgcactcagctacatctgatgccatcggaacacctgaatccatttcttcttcaactgtttcatccccaagctctagtggcctttcttcctgggttcccgcagaatggggagacacatatgggtcagcaaatgtgtcattccaccagccatctctgtcatctcagcgtgaccaagcaattgcaaacatgaataagttatccaacaggagagctagcccttcaggcagtggtgggagtgagatctccaaccatgatgatacagtcctgacaagttcacactcgatcaattcagaaacacggttcagtagcagcagcagtgggaattctatctataagagcttcaatagagatcgttcatttgataactctgatcaggcatccgtgtcagatatggcaacaaatctgaaacattctcatgaccaggagtatctaaagcttgagattgagaggctgagggttaaactacggcatcttcagaagcttaatgagttagctcagaaagaatcattggacgccaatcagaaattacataagttgggcatccaggacattgaggatgaaattaagcttaaagagacagaactgacagaagaaaaggtaaggagattgataaggaaaaaagagagagaagaacaggaagttgccagaagagaagatcaattaagaaatgaaaatgctgaaagtgaagcaacaaaacagagtaatggcaatcaggaaggtgatgagaataagacaggagagaggattttcgtgcgctgttttgacgagtataacaggggatcatatggtacagtgtacaaggctaagtttcatcatacagttgcagcagtaaaagttctgaactcccctgaaggctgtggaactcagcaattacaacaggagcttgaggtcctaggtaaaatccggcaccctcacttgctcctgatgctaggtgcatgccctgagcatggttgcttggtctacgaattcatggaaaatggcagcttggatgacatgctgcaacggagaaataatacaccgccattgacctggtttgaccgtttcagaattgcttgggaggttgcaactgctcttatgttccttcacagttccaaaccagagcctatcatacaccgggatctgaagcccgcaaacatattgcttgacaggaacttggttagcaagataggtgatgtaggtctatcaactttgcttccaagtatggatcagtacctgtccacaatgatcaagaacactgctccagtgggcactttctgttacatagacccagagtatcagagaagtggcgtggtctccatgaagtccgatgtttatgctctagggatcgtgatcttgcaattgctgacagcgaagtcaccaatggggattgcccatgttgtggagactgcactagaagatggacacttcgtggacattctggatgcagctgctgggcagtggcctttgaatgaggcacaagaattggctttcctagccctaaagtgtgccgaaatgaggcgcagagaccggcccgacttgagcgatcatgttcttccagcattggagcggctgaaggatgttgcaaccaaggccagagaaatggcttttaatggccaccaaacagcacctccaagtcacttcatttgccccatacttcaggaagtgatggctgatccatatgtcgcatcggatgggtacacatatgaccggaaggcgatcgagctgtggctaagtatgaatgacaagtcccctatgacaaatctgagattgcctcacaagagccttataccaaatcactcgcttcgttctgcaatcatcgactggagaacaaagagttagtagctggtacacattctggcctgcattctccagaatgtagcagttgatgattgattttcttctc

SEQ ID NO: 4898 - DNA, 678 bp, Oryza sativa
  unsure (1)..(678): unsure at all n locations
  Clone ID: PAT_MRT4530_11739C.1
gtcttcattaacagatacaaatgggaagcatcgatgctgcagtgttgggttcagagaagaaatcaaacccgggaaaagcccaattcttgctctgggaaaagcctttcctcaccagctagtaatgcaagagtacttagtcgatggctacttcaaaaccaccaagtgtgatgaccctgaactcaaacagaaacttactcgtctctgcaagacaacaacggtgaagacaaggtatgttgtgatgtcagaggagattctcaagaagtacccagaacttgccattgaaggaggatccacagtgacgcagcgtctagacatctgcaacgatgcagtgaccgagatggcagtagaagcctccagagcctgcatcaagaactggggacgttctatttccgacataactcacgttgtctatgtctcctcaagcgaagctcgtcttcctggtggggacttgtacctggccaaggggcttggactcagtcctgacacacnaccgtgttctgctctactttgttggctgttctggtggcgttgcaggtctccgtgttgccaagacttcgccgagatattccggcagtagagtttgcttgcccgtctgggacaccctctttgggtcattcccccagtggtggtggaccggntgatcttgttggggcccctttgtttggggtggggccccgg

SEQ ID NO: 4899 - DNA, 276 bp, Oryza sativa
  Clone ID: PAT_MRT4530_1173C.1
ctagtcggcctccttgatcctacaatgatgctggagccgatcctcggcatcaaatccagctgaatcctcgatcctacaatgatgccggagccgatcctcggcatcaaatccagctgaatctttctcgatctcctgcccaccggctgatcgcctcatcgcatcggctgttcgcctcctctcgtcgacagttgactcgtctcctgccgcgtgccgcccgatctccgactccaggtccaggacaccgccggacgccgttgccacgccagattgcgccat

SEQ ID NO: 4900 - DNA, 645 bp, Oryza sativa
  unsure (1)..(645): unsure at all n locations
  Clone ID: PAT_MRT4530_11740C.1
atcatccttcaccacaattcaaatattatagctgaacataggaaacaagccaaaacaatgaagacattttcgtattggctctccttgctattgatacatgcgatgcctctgcgcgaattgatcctcttagtcgaagctatacggaatatcaactacagtcgcatctcctactacagtaacaagtgctcagcccatgcagcgagttcgtaaggcaagcaggatagcatagtggcagcccccttctgccaaccagctactgttcaattgatagacaaccaagtcatgcaacagcagtgtggccaacagatcaaggtggtatcacaacaatcgcactaccaggtcattaatattgttcaagcgattgtgcaacagctacgactgcatcaatttagtggtgactactttgatcagactcaagatcaagtccaagctctgctgaccttcagcttgccatccatatgcggcatctaccctaactactatagagctcccagacagcgattgccactgatgatggtgtctggaactgaattggaacaatataatagttcgtatgttagaaataaagtcatacatcatcctgtgtgactgttgaaacttagggtcatataaatctaaataaaatcatcttacctatttanaagg

SEQ ID NO: 4901 - DNA, 357 bp, Oryza sativa
  Clone ID: PAT_MRT4530_11741C.1
atggagctagagggacatggtcgtggtcacaagcggcggcgactcagcggccaagctacgacgcagctggtcgaagaagttgataagcagcaggaggaggaggcgccggcgccgacctgcagcatttgtctgcaaccctggacctgcaacggcgaccatcgcatctgttgcattccctgtggacatgtttacggcagatcgtgcctggagaagtggctgctacatgctgttcttcaacgcggcactggacaagcaaagctagtgactatactgagcagtgtcctcaatgcggtgaaagttcgagccacagcgcattttttagcgaacgcgcaaaagaattgctcgtcaatatattag

SEQ ID NO: 4902 - DNA, 1666 bp, Oryza sativa
  Clone ID: PAT_MRT4530_11742C.1
ctagatcgaggggttgacgacagcagcctcctcaacatcaacctcaggccatgtggttacctcagaaaatgagaattggttggtggcgccaaagaaagatgcaactcgcaacaggcagcattgggaaagcatgctctctgcatcaaccgactctggcaaaggaggtgtgcaagttgggaggaagtccaccttatggtacgtaggtttgaagatcgaatgcgcagctctgcagaatataaacctgagaagaagccgcctcaagagtggatcgcctaaaacttcaacccaaacaggatgaagtgaagatgatgcaaccaaagtagtggcccattcatttaaggacaatgatagtaactcttcagctttgttataggtatccctatcaatgtcgaccccattattgccaatcagatggcagaaagcttgcaatggagctgtgagaaacatagtaaattgactgccaatctgccgtacagaatccccactgaatcctgccgaggaagatcggcaacttggagaaagtaacatggccgttgtctcccctttttcaaacccatgaattgacttggagggacctagattaaaattatcaaacttattcaagctgctcacaaccatctcatttgtatcagggcaaaatccagaagatcccacctcgcctgcagctgaaaggtatattaacatcataccatttgacgggagctcctcacatttggtggcaaggactgttaggaaatgagtcactgagggacgatagagaattgttttaagtgggtttggaggcagcgcagcatctctcagatcttttaagagattgggatgattttgtccactttcatcgcgggtactgtaaccattggttagtgcaaaagaaccgcatggttcccattcgaggcattgaagcattctgaaaacatctatggtgaggtctgtaaatttgatctcgttttgatagtagctgcatagcatggcatcatttaagaccagacctcgcttcttgacagtaggtgggacggtaggaagagtatcagggggaggatcaaatgcgtagctgtacctgagtggtctcatgttgataaagggggagtcagctctgagaaacctcgcgatttcttggacgacgtgcttccactccttgtagtcggcttcttggagggtcttcttggagtcgtcgaggagcgtgcggatgtgggtggtgaggcgagggacagtgtcggcgcgcctggcgagtagaagcgcaacgaggaggaacctggcgaggaagcggaggtgcttggtgggggcaaagagatggtcggcggcgtcggcgaggaagtagccgcggtcgaggacggcgtggtagaagacgaaggcctcggagaggagggcggtgtccgaggtgcgctggtactgggagtagtagaggtgagcgatgcgggcggcgatctcaccgacctgccatcggcggagcccggcgtcgaggaggcggtgacggtgctcctgctgcatgcgccacagctgggtgtagatgcggaaggccttgccgtattcatcgggctcccggcggccgaagagggggaggtcgcgcacgcgggcgaagcgccggtctgccttgtccagcagcgaccagaactgctcggccgtcccgccaccgccgccgccgccgccacctgctgggctgggatgg

SEQ ID NO: 4903 - DNA, 1246 bp, Oryza sativa
  Clone ID: PAT_MRT4530_11743C.1
gtctgtaatcttgttcgtccaatgtcagatcattcggtgctcaaagacgcttggcctcgagggctacaggaggcggggccagtaacggaaattttagcacgacgataaatagggtattgcaaatttggctgtacacacaccacattaaggtattacaatggatctcttcatcttttgataggtagaaactaaatattgtgatgcgcaagagtcacagttggtaccgctagatcgaggggttgacgacagcagcctcctcaacatcaacctcaggccatgtggttacctcagaaaatgagaattggttggtggcgccaaagaaagatgcaactcgcaacaggcagcattgggaaagcatgctctctgcatcaaccgactctggcaaaggaggtgtgcaagttgggaggaagtccaccttatggtacgtaggtttgaagatcgaatgcgcagctctgcagaatataaacctgagaagaagccgcctcaagagtggatcgcctaaaacttcaacccaaacaggatgaagtgaagatgatgcaaccaaagtagtggcccattcatttaaggacaatgatagtaactcttcagctttgttataggtatccctatcaatgtcgaccccattattgccaatcagatggcagaaagcttgcaatggagctgtgagaaacatagtaaattgactgccaatctgccgtacagaatccccactgaatcctgccgaggaagatcggcaacttggagaaagtaacatggccgttgtctcccctttttcaaacccatgaattgacttgaatgaatagctggcattgctgtcgatcaccaaaaagagtggtcttcttgtaaatggaatcagatcacaagggtatatacagtttgaaccttcaccttcacggcagcctagccatagacgaggtccattgtcttcatttacattgatggtactagtattagatatatcaaacttattcaagctgctcacaaccatctcatttgtatcagggcaaaatccagaagatcccacctcgcctgcagctgaaaggtatattaacatcataccatttggcgggagctcctcacatttggtggcaagttttgttcgtgggttagtcttttatgttcgtatattgaaaatgtcaagtcagcatgagtatatattgatttctatcacgctaccataaatagggcgcctttacatcactgcatgcactacattactagcactaaatgatccgtttggttctag

SEQ ID NO: 4904 - DNA, 292 bp, Oryza sativa
  Clone ID: PAT_MRT4530_11744C.1
agagggcggcgacaacgaggtagagcaggatccgggatgggcaccagcggttttaatagtgggagcgctgcagaattgcaaggagctgctcgggtgcgccatagacaacctcaacacgtccttccacaagctcggtggcttcgatatgaccaatttcaacaaggccgtcgacgacctccgcacgtggctcagcgccacgctcacctaccagggcacctgcctcgacggcttcctcaacaccaccaccgcgatgccgccgccaagatgcgcaacggcgctcaacagctcgtag

SEQ ID NO: 4905 - DNA, 828 bp, Oryza sativa
  Clone ID: PAT_MRT4530_11745C.1
atgatgatatcatccagcttcgccgagttgaagctcgagtacccagggacgacgacgacgacgaacagcttcgccgtcggcgacggggagcagtcgtgggtcatcagatgctacccgcgcggctaccgcgaggaggacaatggcgagtacgtctccctgcgcatcggcgtgccggcgagatcgaacaccgtcagggccatcttccacaccttcctgatgcgccgcgacggcggcgtcggcgcgccgtcgatcatctgctcggacagggccttcccgatgagtgtccccggccacccccgcggctacggcggcgcgttccggcacctcgtgaggcggagcgacctcgagccgctctacgccgtcgacggcgtggtcacgatcgtctgcggtgtcgtggtcttcgccgacgccggcggcggcggcggcgacgacgacgacggcggccctatacccgtcccgcggtcgaacctcggcggccagctcggcggcatcgtggaccgcgccgactgctccgacgtgtcgttctccgtcgcggcgagacgttccacgcgcaccgcgccgtgctcgccgcgcgctcgccggtacgcattggagaggttgaagctgatgtgtgcacagaagctgtgggagagcgtgtcggtggagacggtggcgacgacgctaggctacgccgagacgtaccattgcccggagctaaagagcaagtgcctcaacttcttgatggcggagagcaacttcaagaaggtggccgtcaccaatggctactttcatcttaggcaggacttcccgttaattattgaagagattaaaaaacggattgagagttaa

SEQ ID NO: 4906 - DNA, 360 bp, Oryza sativa
  Clone ID: PAT_MRT4530_11746C.1
atggagcagcggtctggcgttgggggcgatggcgatggcagtgagcggggaactggtgaccacggcgctggtagcggaacggagcaaggcgctactgagccgggcgtcgcgggcaggggcgagcttcgtcggtgcccggtgttggcggttgtggatctcggcatgtggcggcgagcttccttgccggcgagggcgacaagcgaagacatcgtcgtcgatgcaatatattttatggggtgcgcaagatcaaggagagatggtgacgcaggggtttatcctggctcaggccctcaatatgagatctggcgattctctatgtggaacatggttaatcttaggtttggacttgtgccgggataa

SEQ ID NO: 4907 - DNA, 774 bp, Oryza sativa
  Clone ID: PAT_MRT4530_11747C.1
aaattcgatgataagctgtcaaacatgagaattggtcgacggcccgggcggccgcaaggggttcgcgttggccgattcattaatgcagctggcacgacaggtttcccgactggaaagatggatcgtgtggacacagccttgccatgtttctcaagtcagtgtatgaatatatccttgcgcacactgtttccccctatttttacttttcttaaatatatattatatgccggtgatgacgacggcactatacccatcccgcggtcgaacctcaacggccagctcgacgacatcgcggaccgtgccgacggctcggacgtgttgttctccgtcggcagcgagacgtttcatgcacaccgcgccgtgctcgccgcgcgctcgccggtgttcaagatggagctcctcgggtccatggcggagtccaccatgccgtgcgtcaccctgcacaacatcgacccggccacgttcaaagctctactacacttcgtgtacatggacgccttgccgtcgccgaccgaggcggtacgcattggagaggttgaagctgatgtgtgcacagaagctgtgggagagtgtgtcggtggagacggtggcgatgactctaggctacgcgcctacgccgagaggtaccattgcccggagctaaagagcaagtggctcagcttcttgatggcggagatcaacttcaagaaggtggccgtcactgatggctactttcatcttaggcgggatttcccgttaattatcgaagagataaaaaagcggattgagagttaa

SEQ ID NO: 4908 - DNA, 642 bp, Oryza sativa
  Clone ID: PAT_MRT4530_11748C.1
tttccccctatttttactcttcttaaatatatattatacgccggtgacgacgacggcactatacccatcccgtggttgaacctcaatggccagctcggcgacatcgtggaccgtgccgacggctcggacgtgccgttctctgtcggcggcgagatgttccacgcacaccatgccgtgctcgccgcgcgctcgccggtgttcaagacggagctcctcgggtccatggcggagtccgccatgccgtgcgtcaccctgcacaacatcgacccggccacgttcaaagctctactacacttcgtgtacatggacgccttgctgtcgccgactagaggcggtgccagctcgacgtcgacgacaaccggatttttcaagagcttgctcatggcggtggacatgtacgcattgaagaggttgaagctgatgtgtgcacagaagctgtgggggagcgtgtcagtggagacggtggcgacgacactaggctacgccgagacgtaccattgcccggagctaaagagcaagtgcctcagcttcttgatggcggagagcagcttcaagaaggtggccttcactgatggctactttcatcttaggcaggatttcccgttaattatcgaagagataaaaaagcggattgagagttaa

SEQ ID NO: 4909 - DNA, 199 bp, Oryza sativa
  Clone ID: PAT_MRT4530_11749C.1
ccctcggggccaaaacgggagcggcccgacccctcggggagacagagggaggggtggcctcgtcaccctcaggcctgacccccccgagggggtcaggccacgtggggccggtctctacaggcgggcagaaacccagtggtcgcaaatcgcgcacatcggcaagggaaaaacgaccgtcaataatgagcggtctctttaa

SEQ ID NO: 4910 - DNA, 282 bp, Oryza sativa
  Clone ID: PAT_MRT4530_1174C.1
atcaataaccatctatatacttttcacgttagttcattttttataacccaacacaccttctaactataaattaactaacaccttaaatccataacatttatcaattccatttactcttaaactaccatatcaaacaacatacaataaaaattatcatccctaatcatatcaatatattaatcatcctcctaaaacaataacactgtttttcctattattagatattatattttcttcaaacattttatttatcctaactttcctactttattaaatcttttt

SEQ ID NO: 4911 - DNA, 1026 bp, Oryza sativa
  Clone ID: PAT_MRT4530_11750C.1
atgatgatatcatccagcttcgccgagttgaagctcgagtacccagggacgacgacgacgacgaacagcttcgccgtcggcgacggggagcagtcgtgggtcatcagatgctacccgcgcggctaccgcgaggaggacaatggcgagtacgtctccctgcgcatcggcgtgccggcgagatcgaacaccgtcagggccatcttccacaccttcctgatgcgccgcgacggcggcgtcggcgcgccgtcgatcatctgctcggacagggccttcccgatgagtgtccccggccacccccgcggctacggcggcgcgttccggcacctcgtgaggcggagcgacctcgagccgctctacgccgtcgacggcgtggtcacgatcgtctgcggtgtcgtggtcttcgccgacgccggcggcggcggcggcgacgacgacgacggcggccctatacccgtcccgcggtcgaacctcggcggccagctcggcggcatcgtggaccgcgccgactgctccgacgtgtcgttctccgtcggcggcgagacgttccacgcgcaccgcgccgtgctcgccgcgcgctcgccggtgttcaaggcggagctcctcgggtccatggcggaggccgccatgccgtgcgtcaccctgcacgacatcgatccggccacgttcaaagctctactacacttcgtgtacacggacgccttgccgtcgccatcgacgtcgtcgtcgtcgtcgtcgacgacgaccggttttttcgagagcttgctcgtggcggcggacaggtacgcattggagaggttgaagctgatgtgtgcacagaagctgtgggagagcgtgtcggtggagacggtggcgacgacgctaggctacgccgagacgtaccattgcccggagctaaagagcaagtgcctcaacttcttgatggcggagagcaacttcaagaaggtggccgtcaccaatggctactttcatcttaggcaggacttcccgttaattattgaagagattaaaaaacggattgagagttaa

SEQ ID NO: 4912 - DNA, 276 bp, Oryza sativa
  Clone ID: PAT_MRT4530_11751C.1
atggcgggcctaggagtagtggatccaacgaccatggttcttggagcgcatattgacggcaatgggaccgagagctatggatcccggtggtggtgggccttgggagcgacggatctaggccacgtgtttcaaaagcaatggatcaaagatggcaggcctaggagcactccattgtctctatcccctaatctcgctttctgggctgcccaccgcttgcatgggacccaccccatggagatcgatttcctcgatcttggtctccaagggatgggctag

SEQ ID NO: 4913 - DNA, 213 bp, Oryza sativa
  Clone ID: PAT_MRT4530_11752C.1
gctgctgctgctcctcccgttcttcgagcgagggcgtgggaacccgaaccgtggccttggtgctcctagcgggcgggcggctccaagccctcctccccgttcaagcagaggagggattgcagcggatcgcgctcaataagcgcccgatcgacgagaacagtcttgtagccgggctactataccgccaggaaggggcgcgcacagatgggcctc

SEQ ID NO: 4914 - DNA, 222 bp, Oryza sativa
  Clone ID: PAT_MRT4530_11753C.1
atgggagatggaatcgggaggccgactggaatccacatgaactcatccacggcggtgggggtagatccacatgagctcatccacacggtggcaaagtggatcaatgcaagcttgtccccggtggtggcggaccatggcaagcctgtccacagtggtggcgggcgaatcgagcccatccatgatgggagtggtgatgccctagcagcaatagagtacgagtga

SEQ ID NO: 4915 - DNA, 3384 bp, Oryza sativa
  Clone ID: PAT_MRT4530_11754C.1
atggcgtcgaagggcatcctcaagaacggcggtaagccgccgacggcgccatcgtcggcggcgcccacggtggtgttcggtcggcggacggactcggggcgattcatcagctactcccgcgacgaccttgactcggagatcagcagcgtggacttccaggactaccacgtccacatccccatgacgccggacaaccagcccatggaccctgccgccggcgacgagcagcagtacgtgtccagctcgctcttcaccggcgggttcaacagcgtgacacgcgcgcacgtgatggagaagcaggcgtcgtcggcgagggcgacggtgtcggcgtgcatggtgcaggggtgcgggtccaagatcatgcgcaacgggcgcggcgccgacatcctcccctgcgagtgcgacttcaagatctgcgtggactgcttcaccgacgccgtcaagggcggcggcggcgtgtgcccggggtgcaaggagccgtacaagcacgcggagtgggaggaggtggtgtcggcgtccaaccacgacgccatcaacagggcgctgtcgctgccgcacgggcacgggcatggccccaagatggagaggcggctgtcgctggtgaagcagaacgggggggcgcccggcgagttcgaccacaaccgctggctcttcgagaccaagggcacctacggctacggcaacgcaatctggcccgaggacgacggcgtggcggggcaccccaaggagctgatgagcaagccatggcggccgctgacccgcaagctccggatccaggcggcggtgatcagcccgtacaggctgctggtcctgatccggctggtggcgctggggttgttcctgatgtggcgcatcaagcaccagaacgaggacgccatctggctgtgggggatgtccatcgtgtgcgagctgtggttcgccttgtcgtgggtgctggaccagctgcccaagctgtgccccatcaaccgcgccaccgacctgagcgtgctcaaggacaagttcgagacgcccacgccgagcaaccccaccggcaagtccgacctccccgggatcgacatcttcgtctccaccgccgacccggagaaggagcccgtgctggtgacggccaacaccatcctctccatcctggccgccgactaccccgtcgacaagttggcgtgctacgtgtccgacgacggcggggcgctgctgacgttcgaggccatggcggaggcggcgagcttcgccaacctgtgggtgccattctgccggaagcacgagatcgagccgaggaaccccgacagctacttcaacctcaagagggacccgttcaagaacaaggtgaagggcgacttcgtcaaggacaggcggcgggtgaagcgggagtacgacgagttcaaggtccgcgtcaatggcctccccgacgccatccgccgccgctccgacgcgtaccacgcccgcgaggagatccaggccatgaacctgcagcgggagaagatgaaggccggcggcgacgagcagcagctggagccgataaagatccccaaggcgacgtggatggcggacggcacgcactggccggggacgtggctgcaggcgtcgccggagcacgcgaggggcgaccacgcggggatcatacaggtgatgctaaagcctcccagtcccagtcccagcagcagcggcggcgacatggaaaagagggtggatttgtcgggcgtggacacccggctgccgatgctggtgtacgtgtcgcgggagaagcggccggggtacgaccacaacaagaaggcgggcgccatgaacgcgctggtgcgggcgtcggcgatcatgtccaacgggccgttcatcctcaacctggactgcgaccactacgtgtacaactccaaggcgttccgggaggggatgtgcttcatgatggaccgcggcggcgaccgcctctgctacgtccagttcccgcagcgcttcgagggcatcgacccctccgaccgctacgccaaccacaacaccgtcttcttcgacgtcaacatgcgcgccctcgatggcctccagggccccgtctatgtcggaactggctgcctcttccgccgcatcgcgctctacggcttcgacccgcccaggtccaaggaccacaccaccccgtggtcctgctgcctgccacgtcgccgccgaacaagatcccagccccagccccaggaggaggaggaggagacgatggccctccgcatggacatggacggcgcgatgaacatggcgagcttccccaagaagttcggcaactcgagcttcctgatcgactccatcccggtggcggagttccagggacggccgctggcggaccacccgtcggtgaagaacgggcggccgccgggggcgctgacgatcccgcgggagacgctggacgcgtcgatcgtggcggaggcgatcagcgtggtgtcgtgctggtacgaggagaagacggagtgggggacgagggtgggttggatatacgggtcggtgacggaggacgtggtcaccggctaccgcatgcacaaccgggggtggaagtccgtctactgcgtcacccaccgcgacgccttccgcggcaccgcccccatcaacctcaccgaccgcctccaccaggtcctccgatgggccactggctccgtcgagatcttcttctcacgcaacaacgcactcttcgcttcctcaaagatgaaggttctccagcgcatcgcttacctcaacgttggcatctaccccttcacctccgtcttcctcatcgtctactgcttcctcccggcgctctccctcttctcggggcagttcatcgtgcagacgctcaacgtcaccttcctcacctacctgctcatcatcaccatcacgctctgcctcctggccatgctggagatcaagtggtccggcatcgcgctggaggagtggtggcggaacgagcagttctggctcatcggcggaaccagcgcccacctcgccgccgtcctgcagggccttctcaaggtcatcgccggcatcgagatctccttcaccctcacctccaagcagctcggcgacgacgtcgacgacgagttcgccgagctctacgcggtcaagtggacgtccctcatgataccgccgctcaccatcataatgatcaacctcgtcgccatcgccgtcggcttcagccgcaccatctacagcaccatcccgcagtggagcaagcttctcggtggagtcttcttcagcttctgggtcctcgcgcatctctaccccttcgccaagggcctcatgggcaggaggggaaggacacccaccatcgtctacgtctggtctggcctcgtcgccatcaccatctccttgctctggattgcaatcaagcctccttctgcacaagccaactcacagctaggaggatccttctctttcccctga

SEQ ID NO: 4916 - DNA, 507 bp, Oryza sativa
  Clone ID: PAT_MRT4530_11755C.1
atggctggcttgtatcgtctcagccaggggcacaagcgtccatacggaaatacttacgaggacaaacggcatggatggcgattcagacaagaagacgccttcaggacggggagcgtgcagatgaacggcgaggtcgagcccgaagacccgctggggatccgctgccgctgccgctcccttcctccgcttcccaccgccgtcgctccctcccttcatggccgggcgccggcgggggtcggcttcacgccgtcgccgcccctcaaagcacccgcagtcgccgccgtcgtgtcgtccaacgccgctgccgctccctttctccacttcccgccgccgccgctccttcccttcacggccgggcgccggtgcggatcccaccgccgccgccctctacgttcacgagcgggcgccggcgggggtcggcttcacaccgctgttgcccctcagagcgcccgcagacgccgccgccgccgcaagcccgagcgggcgccggcgggggtcggcttctag

SEQ ID NO: 4917 - DNA, 509 bp, Oryza sativa
  Clone ID: PAT_MRT4530_11756C.1
tgttcattatccagattgatacaaaaaacattctcttcatttgtggtggtgcttttgttgatttggagaagactatttcggaaaggagacatgattcttccattggtttccaagcaccaattcgttcaaatatgcggactgggggtgtgataaatgctgagatcacatcctcgttactcgaatcagttgaaagtggtgatctcattgcatatggattgatcccagaatttgttggtagatttcccattcttgttagtctatcttcccttagtgaagaccaacttgttgaggttcttacaaaaccaaagaatgccctaggcaggcagtatacaaagttgtttgaaatgaatgatgtcaagttgcattttactgagaaggctttacggcttatttccaaaagagcaatagcgaagaacactggagctcgaggtttaaggtcaatattagaaagtttattgactgaatccatgtacgagattccagaaatacgaactggaaaagacaaaata

SEQ ID NO: 4918 - DNA, 111 bp, Oryza sativa
  Clone ID: PAT_MRT4530_11757C.1
gaaagggatcatccaaaacatcatcaggaaatctgtggattcgaggcatcgatgtaagtaaatgtatgagaggcggtcacacatactggtaggctacaagtgttgtcgaca

SEQ ID NO: 4919 - DNA, 964 bp, Oryza sativa
  Clone ID: PAT_MRT4530_11758C.1
atgccccgtgtcgttgttaatgagccattagactgctctgaccgtgtagacctacagtccgaccacacctctgactgccgtcaacttatgcaaaaagctctagctcaagaaagccgagttaaagaaactaagatgtttgttaggtctaatgataagaagcctaatgttagtattgttgatttccatgatgagaatgatgatgatgatgatgatgatgatgatgatgatgatgatgatgatgatggtgatcatgatatttatattgttgagtggtcatggactaataagaataaaacttttgtttgttctaatttgatgcctactcctcgcaaggatcgacaaagtgagattaagcatagctttcacgtggttcaatcggctatagaagaagaacgattgaaattaactgaaggttctaagatgaagctagatcatgatccttttcatgtgaacactattgattttaatgataaaaatgtgttgattcggctagaagtaggaccaagagatgcagcttttgagaagcccgatgagtctaaccgtcatatgaggcctctctaccaaaagggtcacattgatgggaagccgatctctaggatgttggtgtatggaggtgtcgctgtgaatttaatgccatactcactattcaagaagttggggcgtggagatgaggatttgaagaagaccaacataccactcaacggctttaatagtgaaccaatggaggccaaagggagaatacacatgtatatatttgaggaaagacatgatacatgtagaaggggatggaaggcaagtggaggtgggaaggatcctttaaggattaagggttaagtaactatagtttttgtgttagaggtgacacatagtggcaggtgagcgttcaagaatatatttatgtcacgtgctttttatggaaatttgaatgccatgcaaaatgtagtagtatggtgtgtagctgtat

SEQ ID NO: 4920 - DNA, 588 bp, Oryza sativa
  Clone ID: PAT_MRT4530_11759C.1
cctcaagggttggggggggctggtgtcaatattatttgaagactggaacatgcaaatttggagcaacatgcaagtttcaccacccccgagaaaaactgcaattgcaacccgagtacagctgaatgctttaggctacccattgcggccgaatgagaaggaatgcgctgagtatttaagaaccggacagtgcaaatttgggagcacatcatacttacccaggggctgtaacaaactggcccttgtcaagatctgcttcgtttattgcaagtccaaggtggccaggccattctagctatgcacaagtgattgttcctccagggctcgttcaagttccagggtggaatccttatgcagcacaaattggttcttcatcctcagacgatcaacagaggacagctggaggtgcacaatactatactggctcacgtcacagtgaaacacctaacatgggtgaccagggaatgttttcatcataccaagctggttctgttcctcttgggctatatacagtacagagggagagcatatttccagagcgacctgaccaaccagaatgccagttctatatgaagactggggactgtaagt

SEQ ID NO: 4921 - DNA, 225 bp, Oryza sativa
  Clone ID: PAT_MRT4530_1175C.1
atgggcaagctcgtgggctcggcttggccggcgttgtgcagcggctatgcagggcgctgcgcgcttggtgcggtgcgcagccggcgccgtgcatggtgcagccggttgccagtggtggaactccgtcaatcggcgttcgccggcgactccaagtggtctgtaccaccattcgcctacgataatgtcagcttagagaaggcgggcctcttaactgcattatcgtag

SEQ ID NO: 4922 - DNA, 2040 bp, Oryza sativa
  Clone ID: PAT_MRT4530_11760C.1
atgtccgccgccgccgtccgctcccgcgccgccgccgtcgcggccaccgcggcccgccgcatccacgcgggccgcgcggtggccgaggagcagggccagggccccggcctgcgccgcccctgggcgtacttccgcaggcgccaccagcagcagcagcagaaggcgtcgttcccgggggccgtcgcggcgcccccgttgcggggtccggtcccccagaaaggggtcgccggcgggtcgaatgggggcgggaaaccgccggagatctggcggcagcccggggaggcgccgcccggcggcggcgcgcgcggggcggaggtggggaggatcgatgtggttagggttgcggcggggggtggtggtggtggtggggatgggtctgatgggaacgaggggggtggtggtggtgcggggtggggcggctccaacctggggcgacggttccccacgcccaaggagatttgccgtgggctcgataagttcgtcatcggccaggagcgcgccaagaaggtactgtctgtagcagtttataaccactataaaaggatacactgcgagttactctccagcaggtctgctggagattgtagcgagactgattcttgcgcgagtgatactgatggagtggagcttgagaaaagcaacatccttgtgatgggtccgacaggctcggggaaaacattgctggcaaaaacccttgcaaggtttgtgaatgtgccatttgttatagctgatgcaacaaccctcactcaggctggatatgttggcgaggatgttgaatctatcctgtataagctcctagcggctgctgattttgatgtagctgctgctcagcaagggattgtctatattgacgaagttgataaaataacaaagaaggctgaaagcatcaaccttagtagagatgtttcaggtgaaggtgttcaacaagcactgctaaaaatgcttgagggaacggtcgttagtgttcctgagaaaggggctagaaggcacccaaggggtgacaatatccagattgatacaaaaaacattctcttcatttgtggtggtgcttttgttgatttggagaagactatttcggaaaggagacatgattcttccattggtttccaagcaccaattcgttcaaatatgcggactgggggtgtgataaatgctgagatcacatcctcgttactcgaatcagttgaaagtggtgatctcattgcatatggattgatcccagaatttgttggtagatttcccattcttgttagtctatcttcccttagtgaagaccaacttgttgaggttcaagtttacttggcaacattcaagtttatttccttatactttgttaagcattctaggtcctacgttcttacaaaaccaaagaatgccctaggcaggcagtatacaaagttgtttgaaatgaatgatgtcaagttgcattttactgagaaggctttacggcttatttccaaaagagcaatagcgaagaacactggagctcgaggtttaaggtcaatattagaaagtttattgactgaatccatgtacgagattccagaaatacgaactggaaaagacaaaatagacgcggttgttgttgacgaagactctgttggatctacaaatcagcatggttctggagccaagattctttgtggagaaggagcattggacctttacttggatgaacataataaagaatcaacgctacgacggtcggagaaggtggatggagaacctgacattgatacagaagccccttctagagtggccagcatgtagggattcctgacaacagtaattatgtatataacttgttatcggccatgtaactgtagccaattcaaatgtaaagtcatcctcctcatacattcatgtataaggtccatgtcgggggtgcaatttctcttggcgatcaaaaccttccctttctgtgacatttttttaaaaagaaaaggtaaaggggaatagattctcatggccaaaaaaaaaaaaaaaaaaaaaaaaaaaaaaaaaaaaaaaaactcgagactagttctctctccctcgtgc

SEQ ID NO: 4923 - DNA, 627 bp, Oryza sativa
  Clone ID: PAT_MRT4530_11761C.1
gtgttgggggtttttttttagtcatacagcattccttctttctctatacatgtcgtatccttcctgtagtaatcctaatgctatattgaaagcaaaaaatttcttgataaatcttctattaatcttacaaggcaaaaggagtatcaacgccgggggggggcggacttgtcgatgtgccatatttctttctgcactctggttacttacagtgtgcatttctgtgggtacgtgcagcagttccccttatcaagcatttgtgttaagaacactgtacagcttcggctcctcaagttttgttgcgggtaatttactcagagagtcaagaacaggaagcagcatgaaacatttgcaccgaggatggcttaggacgcctctctctcggtgcctctttcaccagagggtatttgctgggaatctgaatgggtgatcctccgagacctccctgagacattgtcaggcgatacttctgaatgtgctggtacaggtgccagcatacgtcgggcagacacatcaccagttggtgatgttgcgagaccatacatcacagttcccattggatgatcaaatttgcaattcggaccaaacttgcagatgccatagcgagaatagaatgtgcatatgggctct

SEQ ID NO: 4924 - DNA, 1506 bp, Oryza sativa
  Clone ID: PAT_MRT4530_11762C.1
atgtccaaggcctggggcggcctcggcggcgccggcgcgtgggcgctggacgccgagcgcgccgaggaggaggagcgggagagcgccgccgcacccgccccggccgcggggttccccagcctccgcgaggccgccgcgggtgcggccgccggcaagtccaagaagaagaaggggaccaccctctcgctctccgagttcaccacctacggcgccgccgccgggaggcggcccgccgccgcggccgcggagcccaaggggctcacgccgcaggagatgatgatgctgcccaccgggccgcgggagcggtccacggaggagctcgatcggtcccgcctcggcggcgggttccgctcctacggctccggggagcgccgcggcgggtccgacgacgacggccgcagcggttgctccgggagggacgcagacctcgacttgccgtcgcgcgccgacgagtgcggcaactggtcgctcaacaagaagtcgttcacgccgtcgcccgccgactcgggcgcccggagcagcctcggctccggtggcggtggcggtggcttccgcgactcgcctacctcgaccgactccgaccgatggtcccgtgccgctcctctgcctccgcacaatggcgagcgtgagcggccacgcctagtgcttgatccgcccaagcgggatgcctcggctacccctacgccgcctcctgccgaggcggcacgcagccggccaagcccatttggcgccgcgaggccccgcgaggacattcttgctgaaaaagggctggactggaggaagatggagacagagattgatcataagactagccgcccaaccagctcacagtctagtaggccaggaagtgcgcattcgtctcttcctgggagccctggatcacagacatcagctgtgggtagtgaaggtgtgccgagggctcggccgaaggttaatccttttggggatgcgaagccaagagaggtagttcttcaggagaaaggcaaggattggagaaagattgatcttgagttggagcatcgtcgaattgatagaccggagacaaacgaagagaaggatttgaaagaacagattaacctgcttagggtggatttgaaagaaactgaagcaaacataagtgacgaggataaaaaaggtttatcagaaaagttatcccagatggaaagggaactggagcgtcttacagttgagttggacaacaaggttcgatttgggcaaagacctggttctggatctggcaaggttactgcacatttaagtaattcaccagacgaatcacagattacagagtcaatggaacaaccacgttcccgtagcagcatagaccaaaatcctaaaccagcagaagaaaggtgggggtttcagggcaacagggacagaggctcatttggtggtaacagaaatacagacaggtcgttaacagggcagagatggtgaactcttcttaattccatgcctttgcccctctcttccatgtcaaatcagttttttaccaaactttaatac

SEQ ID NO: 4925 - DNA, 2433 bp, Oryza sativa
  Clone ID: PAT_MRT4530_11763C.1
gctcggggctcccgctctcgctctcgctccccctcccgcgtgccgacctcgccgcgccggccacccggggttcctctcgctccccttccttcctccctcttccgcctccgcctcctcctcctccgcccttacccccgcgcgcgtgcacgcgacggcgcggcgatctgatgctgccgccgctgctgctgcaggcgccgcggtgatggcggcggcgccgtccgccggcggcgttggggagggctcttcctcctccgccgccgccgccgctgctgctgctgccgcgacgatcgggccccacgtggtcgacgaagaggcaatgtggcagatgaatctaggagaagctatggaagctgggccatacccagagcgtattggagaaccagattgtagttattacatgaggactggcttgtgcaggtttgggatgacctgtaaatttaatcacccagcagatcgtaagatggctgttgctgctgcaaggatgaagggggaatatcctcaaagaattggtcaacctgaatgtcaatattatttgaagactggaacatgcaaatttggagcaacatgcaagtttcaccacccccgagaaaaagctgcaattgcaacccgagtacagctgaatgctttaggctacccattgcggccgaatgagaaggaatgcgcttattatttaagaaccggacagtgcaaatttgggagcacatgtaagtttcatcatccacagccatctaatacgatggttgctgtacgtggctctgtttattcacctggacagtcagttacttctcctagtcagcatacttacccaggggctgtaacaaactggcccttgtcaagatctgcttcgtttattgcaagtccaaggtggccaggccattctagctatgcacaagtgattgttcctccagggctcgttcaagttccagggtggaatccttatgcagcacaaattggttcttcatcctcagacgatcaacagaggacagctggaggtgcacaatactatactggctcacgtcacagtgaaacacctaacatgggtgaccagggaatgttttcatcataccaagctggttctgttcctcttgggctatatacagtacagagggagagcatatttccagagcgacctgaccaaccagaatgccagttctatatgaagactggggactgtaagtttggtgctgtatgcaagttccatcatcccaaggagagaattatccctactccaaactgtgcgttgagctcattaggtcttccactgcgtccgggagagcccatatgcacattctattctcgctatggcatctgcaagtttggtccgaattgcaaatttgatcatccaatgggaactgtgatgtatggtctcgcaacatcaccaactggtgatgtgtctgcccgacgtatgctggcacctgtaccagcacattcagaagtatcgcctgacaatgtctcagggaggtctcggaggatcacccattcagattcccagcaaataccctctggtgaaagaggcaccgagagagaggcgtcctaagccatcctcggtgcaaatgtttcatgctgcttcctgttcttgactctctgagtaaattacccgcaacaaaacttgaggagccgaagctgtacaggtctcgcccttttgcctcacatttgagctttacataccggagcttgcttcaagacttccaacatgtatcgcattcaggcaggaaaaagttcttgcttgttagggatgctcttttgccccgtgtaaacgggacaaccgaccttatttaaacatctatatatggaacaaactcacctctggacattcgatttcgagtgatgtgccttgatccctttgttgtagttatacaggtgccttgcaatggacaaagcttttgccaaacgggggatatgtgcaaatcgctctcctctctgtttctttcttttttttgccttccctctaatttagcagtttcataaggggcaacccccgcttctggaattgtgcatgttgaggatgcggaaataataggcaattgtataatcatctacatatttataccctgtcccttgttcccatcacaaatgtttgataaggggaattgttgcaggtacccacagaaatgcacactgtaagtaaccagagtgcagaaagaaatatggcacatcgacaagtcaggttgccattggcgttgatactccttttgccttgtaagattaatagaagatttatcaagaaacttttttgctttcaatatagcattaggattactacaggaaggatccgacatgtatagagaaagaaggaatgttgtatgactagatgaataacagatgagtatgtgatctctgcatctattgttagaaacaatattgttttgcacacggcaatgcatgtgacttgttacattggtaatgagaaaacaaggctggattccctggccc

SEQ ID NO: 4926 - DNA, 390 bp, Oryza sativa
  Clone ID: PAT_MRT4530_11764C.1
atgaaggtggcggcggtggttgacacggcggcgtgggagttggcggctggggacaccgctcggagcgacggaggcggtgcccagatccacgccatggccggccggatctgggggagcggcagccggcagcggggaatgaaggtggcggtgatggacgacgtggcggcgcgggagttggaaacggcggttggtgcggctgctgtgaggcggctggcgagctgtggcggtggccggatggctgctgtggtggcagctggcgaggcaacggcagcggtggtggcggcggtgtctggcggcagcgacggcggcggcggctaccgtggattcgtaggtggtgagcaacaggtgaaaacccagcccggccttggccggaccgacaacgatggttaa

SEQ ID NO: 4927 - DNA, 537 bp, Oryza sativa
  Clone ID: PAT_MRT4530_11765C.1
atggatggaagtgcgtattttacaaacttgataaatgagggtgacactacttatgattggagtgctctaggtagccaacccgaagatccaaagtcacaagttggggaaggggaagcatatgtgagatcaaaccaaaaaagatctaagaattttagtatgaaggaggatgtcttattggtctcagcatggctgcaccttttggtcctcagagctgcgttcctcaagatagagaatcttattccagctaatggtatgcagctatcgggaaaacctacaggaaggaagaaagagaaagaaaaacagcgtcaacactcagaccaatcacaaattgatgctttagatcatttatgggttaagaagaaagaggctgatgtggagaaggagtggcaaagagcggagagatgcaaagttgcatccgcacttgatcaacagcagattgatttggagaaagaaatgtttgaattcaagagaatgatagtagaagataggattatgaggctagatactagagtgatgtccattgaggagcaagactaa

SEQ ID NO: 4928 - DNA, 422 bp, Oryza sativa
  Clone ID: PAT_MRT4530_11766C.1
gccttgattccatattatcaatgtaacaagtcacatgcattgccgtgtgcaagacagtattgtttctaacaatagatgcagagatcacatactcatctgttattcatctagtcatacagcattccttctttctctatacatgtcgtatccttcctgtagtaatcctaatgctatattgaaagcaaaaaagtttcttgataaatcttctattaatcttacaaggcaaaaggagtatcaacgccaatggcaacctgacttgtcgatgtgccatatttctttctgcactctggttacttacagtgtgcatttctgtgggtacgtgcagcagttccccttatcaagcatttgtgttaagaacactacaagcgaataagtaagctacaatcacctttactataggtaaccaagtacctatctaggaa

SEQ ID NO: 4929 - DNA, 693 bp, Oryza sativa
  unsure (1)..(693): unsure at all n locations
  Clone ID: PAT_MRT4530_11767C.1
ctctcctctccatcgcgtcgtcctccccgggcgactcgagagacgacgctgccgccgcccccttcctcttcaacgcctcctccctcacctcgccgccgcctgagcgggcgctggcaaagccgtgcgctcgcaaggacggtggcggcggggccttgtctcacctcccctttgcgcccaacggctggggacgccgcttagagtggtggtggcggtgcccagatccgcgccgtggccggccggatctgggggagcgatagccggtggcagggaatgaaggtggcggcggtggttgacacggcggcgtgggagttggcggctggggacaccgctcggagcgacggaggcggtgcccagatccacgccatggccggccggatctgggggagcggcagccggcagcggggaatgaaggtggcggtgatggacgacgtggcggcgcgggagttggaaacggcgggagttggaaacggcggcggctagtgacggtggcggatgtggcgatggggaaggcattgggcgacgacaaagtaggaggagtccagaggggtgagaacgcggtgtcgatgaccgganatggacgatgatggctgtgaaaggacgatggtggcggcaacggtggtggaaagaggcatggcggcctcgaacgctagtcgtgggcatggcagacggctgcatctggtcggcgcagcagcg

SEQ ID NO: 4930 - DNA, 1893 bp, Oryza sativa
  Clone ID: PAT_MRT4530_11768C.1
tcaatttggtatcctcactttgaattgttttcattgtcccctcctctcctctcccatcgcgtcgtcctccccgggcgactcgagagacgacgctgccgccgcccccttcctcttcaacgcctcctccctcacctcgccgccgcctgagcgggcgctggcaaagccgtgcgctcgcaaggacggtggcggcggggccttgtctcacctcccctttgcgcccaacggctggggacgccgcttagagtggtggtggcggtgcccagatccgcgccgtggccggccggatctgggggagcgatagccggtggcagggaatgaaggtggcggcggtggttgacacggcggcgtgggagttggcggctggggacaccgctcggagcgacggaggcggtgcccagatccacgccatggccggccggatctgggggagcggcagccggcagcggggaatgaaggtggcggtgatggacgacgtggcggcgcgggagttggaaacggcggttggtggtgactgcggctgccgacggcggcagtgacggcggcggttggtggcgaggcggcggctgctatggtgactgtagtggcggctgctgaggcagcggctgctgtgaggcggctggcgagctgtggcggtggccggatggctgctgtggtggcagctggcgaggcaacggcagcggtggtggcggcggtgtctggcggcagcgacggcggcggcggctagtgacggtggcggatgtggcgatggggaaggcattgggcgacgacaaagtaggaggagtccagaggggtgagaacgcggtgtcgatgaccggaaatggacgatgatggctgtgaaaggacgatggtggcggcaacggtggtggaaggaggcatggcggcctcgaacggctagtcgtgggcatggcagacggctgcatctggtcggcgcagcagcgtttggaggaggggtcggagatcggcttggcatagagaggcgcaactgatggcagcggaggccggctcggcgcgagaggcgcgggcggtggagatggaggccggcttggcacgagagacacggccgatggagggaggctggattggcgcgaggcgcgtccggtggaggaggccggcttggtgcgagaggcgcgactggcggtggaggaggcgtcctcggtgcgaggaggagctgccggtggatgtggcgtagtcttcggcgcacgaaggctggccggctgggggcgccggtacagtggtcccacttggcggctgaggttgagtggtggtggagcatcagtgcgtcagccgtggattcgtaggtggtgagcaacaggtgaaaacccagcccggccttggccggaccgacaacgatggttaattctccctcctgagggcgttgtcgtgctgtctcatccctcaagggtggttgccgggcgaaagccagtcttggcttctttgagccccgacggacggtgacggcggttttctatcgcttctcttcttgaagacgtcgttttggcatcccctagccgaagcctctcgatcgattggtgcaagcacactctaggagttggctttgcgttggttgtgagggtgttcttttaggtgatctcgtctgcgttcctttgtcggtctagcggtgatcagtcatgcttagcggcggccggtccggtgttagccttctcccggtcttgtgtgttggcgctgtcagtgtgtgggtggtggtatattttttcctttttcctggttatgaccctccagggttatagtcctgtaatattttcctgctctatcaatcgtattgtctcgtgcgagtcgttaaaaaaaatattttcactgtactagaacaactgagttgggacatattaaggttgagttctttttagcaactaaaaaaagggggggggggggagt

SEQ ID NO: 4931 - DNA, 1126 bp, Oryza sativa
  Clone ID: PAT_MRT4530_11769C.1
cgggctgcaggaattcggcacgaggctcccccgcttcttgtctcgtgtttttttttttttttttttagtcaacattaaaattaatccttgcattgacttccatataataaaatttacaaattaaattacaaaaccaaataatgccacgatcgaacagtacacgaggagagacaagctagagactggtttttttttcagtacttagtaacgtttattcccataccccaagcacgtacaaacacagtataccgtatacgtaggtaggtatacgtaggtacgtacatacatacggaagacggcgacagagttcgtgtattttcatcgaacaatatacgtttttgcagccaaattagttcacgtataaagttgaccagcaaccgcgcatatactggtatactgtaccgatcgatcgacggaccggacgaacactcagaccgcgatagagtatttgtcccggttgagctcgtcggcggcctcgacgccgccggcggcgatgacggcggcgtcggcggcgcgggcggacatgaggtgctcctgcacgcgcgccgccatgccgtcgaggccggcctgcaggcgcgcgacgagggcctccttgggcgtgccgcgcacggggtcgccctcgaactcccaccggagctcgcaccccggcgcgtccgcgtcgccgccgccagcgtcggggacgacgcggaacgtggcgacgaagacgccgaagcccatgttgttgtcgttcatctcgtagcggaagaagcggcgcgcggcgtcgtgctcgagcagcgtctcgtgcgcccagtccggcggcgccccgtcgccgcgcggcgtgccctcgcagtaccgcacgacggagcccggcggggcggcggccgtgctcgccgcggccgacggcgaggcggggcggcacttggcgacgcgcgggtgccagcggtggaaggcgaggaagtccgacagcagagcccacgcctcgtcggccgtcgccgtcggcaccggcgacaccacgcacccttcccactccagcgccctcgtcatcaccctcttcccctcctcctcctccggcgccgccgtcgccgtcgccgtcgccgccatgtgagctgcctcgctaccggcggtgtgggtgtgtgggcggtgtggt

SEQ ID NO: 4932 - DNA, 258 bp, Oryza sativa
  Clone ID: PAT_MRT4530_1176C.1
atggctgacgctgctccaggcgctcggcggcggcggcggcgcgagagaggtggaagcggcgaggagaaaccctatctccggatcgacccggggagcttttatatacgcgaggaggttataagacgttttgactttggatgcactccattgcttcgcctcgcactcgtcatcgtcacccctgctcgttctcgcctcaatcctaacgacggctgcgacaaagaccccgtgtcatctgtggtggagccacctcccggctag

SEQ ID NO: 4933 - DNA, 162 bp, Oryza sativa
  Clone ID: PAT_MRT4530_11770C.1
atggcggcggtgctcccggcaaacttcggcggaatcggaggatgggatgaggatggcggcgaccttgcgaacctggcgacagccttcccgagcgacggcgacgactggagtagcggcggcgctcggctggactcgccgcggcgacggcggcgcacgggctga

SEQ ID NO: 4934 - DNA, 240 bp, Oryza sativa
  Clone ID: PAT_MRT4530_11771C.1
atggaggcggccttgatgggtgttgttgccaacagtgccatgggtctctcaccaaaacgacacctacgagagcgcaatcttggcaagatcgctactagtgacactaggattaatcagcgaggaaagaagacgagcgtgaggaaattcgatgagtatggtgacatgatgaccttgatcatcgtgatgtcacgtgatggccgtagggacctcgatgaccttgatcatcgtgatgtcacgtga

SEQ ID NO: 4935 - DNA, 457 bp, Oryza sativa
  Clone ID: PAT_MRT4530_11772C.1
gcacgagggagcatctttatacgggcttcaagcatgtgctgcaacttctgagtcgaaattttggtcagtatctgaaatttcagacaggaactcacgggcctcatcataccgcttggctttgcagtaactgtcgactactctcctgtatgtcagctccataggcttcaagttgtggtgaatcatgtagttgagaacctctcttgcctcattaaacatctccaggctggcgtatcctccaactagtgtgtgataggttacaacacatggagccatgccatcagcaatcatctcagataggatcctctgagcttctttgatcagaccttgcttgcagaatccgtttatgacggtgttatatgacacaacgtcaggcttcaactgagaacttttgagctgtttaagtattttctcagcttcccaagactcattggacttggcatacatgtccattaagctg

SEQ ID NO: 4936 - DNA, 427 bp, Oryza sativa
  Clone ID: PAT_MRT4530_11773C.1
atcatccagatacaatttcgacttgcaacttgcacacaaattttacaaacaactcccgtcccatgttaatcacaggcggttaatcaaaaaacatcgaaatgtttaacaagtgaaaaaaaaaacaagggaaaccatgcaaccaatggtgtcccacacatcacttgctccaacaaatccaaccaatccacaccaccactacaataaaacaaggtaacaatcactatcacatacaatctactgatcaatcagcaaggtaatcatcatcatcatctacctccacttattcctactaccaagcatcagcaatatatagaagataatacgagaaaaaaatccccacacaacaataatccagaaacactcccacttaccaaattcaataatcacctactacttcaaaaagtccaatcccataataatacacatc

SEQ ID NO: 4937 - DNA, 686 bp, Oryza sativa
  Clone ID: PAT_MRT4530_11774C.1
atgcaattgaacctcaaactagatcaagaaaacttgatgagccagagccgatttacggtacaattaataaatcaccagaagcaattgcacgagcaaatgcaaaagcagatgaggccatacaagctttaggctatgatccacgaattaaaccggttgtgcctgaagaggcacctccagcattgccgccgagaaacttgcaaactaaagctattagtgattacgatgatgtttcatatgtacctgacttcaaagtaagaaaaacagatgaaccagagccaatttacggcacgattaataaatcaccagaagcaattgcacgagcaaatgcaaaagcagatgaggccatacaagcttcaggatatgatccacgaattaaacccgttgtgcctgaagacgcacctccagcattaccgccgcgtacgcaatccttgatagattcaactgaagtaccaagctatagaagtgctttagctaatgtaaaatttgatgatgcatccccatggccacaaccaagtgcgttacgtagtaaggcttttgctgatgaaccttcatcagaaacgcctaagtctcgtggtaagcgtggtatttctaagaagtctttatcaaggacagttcaaccacgtagtagaaagatttcagaggaatatagctcttttggagcgtttaccattgcgtataatagataa

SEQ ID NO: 4938 - DNA, 198 bp, Oryza sativa
  Clone ID: PAT_MRT4530_11775C.1
atgggcaggaagggagaggaggagcacctcgcccatggacaggaattcggcgagtcattccgctccaagtcggagctggtgctccccatgaacagcctcgccatgtatggcaacagggatgccctgttcatctgcaacagctacaaggacaacgatcgacagtgttggacccgagatcatcagcagtgccgctactga

SEQ ID NO: 4939 - DNA, 543 bp, Oryza sativa
  Clone ID: PAT_MRT4530_11776C.1
ttggtttttttaaaatttggggttttttttttttttaaaaaaatggaagttttattaagactcagttaaatacaccaagatgatacattccaactgagtccacccccggcctctgcatagaatgcacacagccaaaaaactggacaaagaatgcacagtttatataagacccttgcaagaagaaaaacaagagaaataagaggatgaaaagtttatacaagcccgtctagcaacaccagatgcagatggcatgggttagaacagccataacaaggggaaagaccacagaagcttggtgaaacaagaattcaggcaagaataaaggccagtctacgctttcggatatccctggcactctgtttggcctcctcttccgcagtgctgctcatactttgtaactgtaagatgtacctatccatgactcaatgttgtcgaaatttcttcttagttgctccggcatgatctggatctctcactgccatcagtcaagaatttcaggttcaaaggacaacctgtcatttgaaataatgcccatgcccaaac

SEQ ID NO: 4940 - DNA, 483 bp, Oryza sativa
  unsure (1)..(483): unsure at all n locations
  Clone ID: PAT_MRT4530_11777C.1
ttttttttttttttttttttttttttccagaacaaaagtttttctcctctttggagaaatatgtttatatacaatagtagcaatggtagtacacccgagcaaagaattgtaaactcaacacaagcaaccaaaatcgaaaccaggatgatgaccaacaaaagctcaccgctggccatttccttcaaccagaaccaccgcacaagccatcccaacaaaagatcactataactcaaaaggcagaaacatatcgcataatcacgacgcaaacaactctgcttggcacattttccagcatttgcatccactttcatatcccaatgaagatgtccaaaccggtttttggcagatctataaatatctggcaaatcaaatggtcttcagtgagtaaaaacctcgggccaagcatcccagtaggccaaagaantgaatataagatgttcctctgctgancatcatcctaattggcaaaatggatgctaaatg

SEQ ID NO: 4941 - DNA, 215 bp, Oryza sativa
  Clone ID: PAT_MRT4530_11778C.1
gcacgaggattaacggacacactgacaccatggcgacgcatacgcgacggccagagaaattgcggtggtgggagtgatcggcgcggcgcacatgggctcgggcatcgcccatctcgccgccgccgccggctgcggcgtcctcctcctcgagtccgatcaccgccgccctctcccgcgccgtcgactccatctcctcctccctccgccgcctcgtc

SEQ ID NO: 4942 - DNA, 192 bp, Oryza sativa
  Clone ID: PAT_MRT4530_11779C.1
atggcgagggatgggcggacggccatcaatggcgccagcatgctggcaggcatttactccccaccgaccacgaatcgcagggggccgggcgcgccaaggagggagggaggagacgagccggaggagggaggtggccctgataggtggggcctatccgtcagcggtggtggcgagggcgttggctcggcttgg

SEQ ID NO: 4943 - DNA, 2419 bp, Oryza sativa
  Clone ID: PAT_MRT4530_1177C.1
ggcccccccttttttttttttttttttttttttttttttatcaaatgtttatgctatcggcagccatgtgcccatgtccatcctgcacaaagaacctgacaacacttagctaacggcacacgactgcacgagatcattgttagatcagggggcgtgtaaaaaatgcaaaatttcaggcctttgttttgattttttttttgtctcctctaccgatcggaattgttccatcggcttgcgcttccagcctaaactccggttctgagtgacagttcgccgaacgtcttcctgctcactctcgagatcggacggcactggttcgacggcttctctgtcttgctgttcaacggtttgccggtagccaacatcacgttccgcggcagatctcaaccagcttgtattcccatttgtctttccttcaccaggcacaccaaagtttgagttcccatttgtgtttccttcaccaggcacaccaaattcttcaccagtagtctctgcaggagcaggccccattctcgaagcgatggaaccggctcgcgtccctgacgagaaacgctctatttgtcaactccgagatcgtcttcagaaacgagtggcagtccccgcacacccgcaggttcttgatcaccacgatctcacttcccgcctccgtgttcagcaacccgaacgccaccgccagcttctcgctgtggaaccccaccaatggcacggccgccgcctccgctaccgccttctcagcgcgctcctcaaccacatcgccacccgtcttctccttcaccatccgctccagctcgaccacgagctcgtagatcctcctcgcctgcgggtgcgagtggtcgtcggccatgaacaggtggaccttccccttgtgctcgacgtagctacacccgggctccttcctgagcccgcgccgcctcatcgccgcccgcaccttcgccacgccgtcgagctgcccggcgtcggcgtagatgttcgccatgagcacgtagtaccccacgttggccggctcgaggctgacgacgcgctcgaaggcctcttctcccatctccacgttcttgtgtatcttgcaggctccgagcagcgcgccccagaccgcgccgtcggccgccatcggcatcgacgcgatgagctcccgtgcttcgtcgagacggccggctcgtccgaggaggtccaccatgcaggtgtagtgctccagtttgggccggaggcagtaatcgcgctccattgttgagaagtacttgcgcccttcgtcgtacatgccggcgtggctgcacgccgacagaaggccgaccatggccacgctgtccggcgcggttgcttccgacaccatcgtctcgaagaggtcgacggcgatgtcgccctgtccgtgcatgccgtacccgatgatcagcgtcgtccacgagacgacgctcctctcgggcatttcgtcgaacagctcctgcgcctgggccaagctgccgcagcgcgcgtggaagttgatgagcgcgttgcagagcggcaggttgtcgcggaagcccgggattgtatcccgcacgtaccgctcgacgtcaaggcccacgcggcgcgcgccggtgtgcgcgcaggaggagaggacgccgacgagcgtcacggcgtccggttccaccccgccgccttccgggccacgcatgcgccggtacagctcgacggcctccacggcgaggccgttctgcgcgtgggcggagatcaccgcgttccacgacacgaggtcgcgggaggcccgcggcatctcctcgaaaacctggcgggcaagggaggcgccgccgccgccgccgcgcgcgtagacagacacgaggcagttggccacggaagtgttcgcggcgagccccgatcgcgccgcgagggcgtggagctgcggcacgatgcccaggggagcaacggggacgagcgccagcagcgtgacggcgtcgaagcggacgccggcggccacgcgcatgcggcggaagagggagaagcagccggccgggaccccgtggagcgcgcacccggagatgagggagttgaacgcggtgcgcgccgtggcgggcggcgtggacgcgaggggcaattcgtcgaggagctggcgggcgagcgggaggaggcggaggcgggagtaggaggagagcagcgcggagaggaggtaggcgtcggaggacgggaggaggccgcgcttggccgcgagcgcgtgtatctgggcgacgcccgaggcgagatgcagcttggcgcaggagatcaccgccgccgggagcgccagggcgtgcggcggcggcgaggggtcgccgtggcggaggagggcaagggcctccctgtgccggccgaggcgcgtcagggtgcgcacccgcgcgctccatggctcgagggagtcgtcgccgccggcgacggcggcgggggaggctggtgcggaggtggaaggctcggtggccat

SEQ ID NO: 4944 - DNA, 369 bp, Oryza sativa
  Clone ID: PAT_MRT4530_11780C.1
atgcctttgccgccgccgactggtgtctctgcctacacggctggcctattatgccgccgttggtgggcatcttcgctttcaccatcgactgccgactggtgtcctcgcctatacggttggttggtcacaccaccgttcatgggcgtttacgtcttcaccgaccggcttgcctttgccgccgccgactggtgtctctgcctacacggctggcctattatgccgccgttggtgggcatcttcgctttcaccgtcgaccgccttcgtcgtcgccgactggtgtcttcattgttattgatggatgactttattcctacattggctacctctgccatcaccaaggggaatattacaaagataagtcatcattaa

SEQ ID NO: 4945 - DNA, 2145 bp, Oryza sativa
  Clone ID: PAT_MRT4530_11781C.1
atggggagtagcggggaggcggtggcggagtgggggaaggagggagagggaggcctccggcatcggtggcgggcggaggcggtgggggcctcgtcgtcgttcgcggaggggatgggggagttcgtgctgaggtccatggacgccaggttctccggatcggccgacgctgatgggttcccttcctctcggcacccaggatttggacatagtaaatccacaactgccacttcggattgttctaaagggcaagagcatgtttttgtaagatcatactctgataggttgctcaagtgtgacctcacgttggatatgctatcggaaaatgagaagataaagataattgagaatctggtaaagatccagaatgatggtacactggaggtagatgtgaaacgtagtgctcttattgcatccgaactttcagagattgatgcattcggttctctgtctcgtgatattgtggaagctgcacctggattgagcaagtcagtcccaaagttgaagattgttattcttgttgtctcaccattttcttgtcaatcaataatggatgatgagttaatccttactcctcattactccaacaagtccctcatcactatcctctgtcgtagtcgttttgactgtgcatgcgaccagttccattctgacagcacagtccccaatcagatggtggtaatgggagccgttggcaaggctagggatggcaagattttatcaatccagcttgatgagtttggtcactatgttagattggcaactcacgccaatttccgtacctttgtgaagtcagctggtattgatttttacccgttgggtggtgatcctcgcatattggctcagtatatgacaaaaaacaaaggattttgcctggctggacccacagaaatttctgttcaaagaaagcagcttaaggaaataattttctctgttctacctgcatgcacagaacctgatttggacactggattaccttttagagctcaggcaataattgcaaatcctcctgctttaggacatctacatattgcagaggcacttggggtacccctgcacatcttcttcacttttccatggacgggattcataaatgagttcaggaagaagttaaaattggcccctattgcctatttcagcacatatcatggatctatatcacacttacctactggatacatgtggagccctcatctaatgccgaagccaaatgattggggtcctctcgtggatgttgtgggatattgcttcttaaatcttggaacaaagtatcaaccaccgcaagagctttctcagtggcttcaacaggggccaaaaccaatatatattggttttggtagcatgcctcttggtgatgaaaaaaaagtcacttctgtcattctggacgcactaagagaaacaggacaaagaggaatcattagtcggggttggggagatcttggaagtttttcagaagttccagttgatgtcttcattttggaggattgccctcacgactggctgtttcctcgctgtgctgcagtggtacatcatggtggggctggtaccacagccgcggggcttgtagctgggtgcccaactaccatagtgccattttttggagatcaattcttctggggtgagagaattcatgcacaaggtgttggccctgcacctattcctatagcagaacttactgtcgaggcactttcaaatgctataagattcatgcttgatcctgaggtaaaatcacgaacaatggaactggcaatagcaattgggaatgaagatggcgtggcagccgcagtagactcatttcatcgacatctccctgccgaacttccgcttgccccaccacccacagatgtaaaggaagaacagctagacttttttcaatggttttcacaagcccttgagaagtgttgcttcccattcaatccttagctgtccataggttagatagaggttcaatttatttattgcttatttatttgtgtggttacaagtcaaaaataatgtcttgtaaaagactgccgtagactgtagtgaaataaatattcggtcaatgtatattgcattgatcagtaacttattttcacttttacattgtgaatatgtaaaaaaaaacaggatccgatgttttggttttgctgtaaaaaaaaaaaaaaa

SEQ ID NO: 4946 - DNA, 237 bp, Oryza sativa
  Clone ID: PAT_MRT4530_11782C.1
atggttgaagaaaaaggatccagaaggagaagacgtttggcttataccccagttgagctgcctgtgggagtggagccggcgggtggggacgccgccacacgcgattgtcaacgctcgtcgtctctccgtaggggtggcgccgacgccgccgccaccaagcaggtcatcatcagcgaggatcccttcgacggtgggatcgaggagctccaggtgaagctcatgggtcacctacgatga

SEQ ID NO: 4947 - DNA, 429 bp, Oryza sativa
  Clone ID: PAT_MRT4530_11783C.1
gtgcattcatccaccggctcaagctgggtagtgatcctttaggcctcgccgctagttccaccaccgggcgccaccatgtgcgggatcctggccgagctcggagccgacgactggtcgcaggcgaagagggctcacgtcctctcctgctgccgtaggctgaagcacacgggacccggctgctccaggttgcaccagtgcgagggaaactttcttgctcaacagcgtctagccattgtattaccggtctccggcgaccaggcgttgtacaacgcggaccgggccatcgtggtcggggccaatggagagatctacaagcacaagaagatcaggaagcagttcgacttccaggacacagtcacgaccggcagcgacctgccagggcatcatcccgctgcatgaggaggaccgggaggacctcgtcgtcatgct

SEQ ID NO: 4948 - DNA, 309 bp, Oryza sativa
  Clone ID: PAT_MRT4530_11784C.1
atggagggagctctgctctgctcgtttggtttcttggagggagaaaacgcaggcaggtgcagggagaagaccgcgctcaacgctggtttgggaggagacgtgattttgtttcagctcacctccgcgaaggcggtggatggaattggaattgggctttggaagatttggcccatttttgtgtggcccgttattctaaggggacgatcagttattaggccgaaagaacgaggaattttaagcagaataagttcaccagccgtctctcaactttacatcgaagttgtttcacatcccttagagcaagtataa

SEQ ID NO: 4949 - DNA, 282 bp, Oryza sativa
  Clone ID: PAT_MRT4530_11785C.1
atgggaatggtgacgggagatttttctcacatcgggggtggggacggggtggctaaacccgacgggggtagccccgttgccatccctagccgtgcctgggccaaaggtggagctgatgggccggcacagcccggcacgaagtgccgatcagaccgtgccggcccgatggctggtgggccgtgccttgccgtgcctgggccgggccgtgccgggtggaccttttggctatctatacctggttttgcgattgagggatgtgattcaactaggtgcaagagttga

SEQ ID NO: 4950 - DNA, 490 bp, Oryza sativa
  unsure (1)..(490): unsure at all n locations
  Clone ID: PAT_MRT4530_11786C.1
acgtcgagtccccgccggcagaggcgccgccgcaggaggacgacaaggccgccgccaccgccgccgccgtcgccggcgccggcgagaagaaggtagctgcatgagtgncgtgcatgcgtacatgggtcgccgtaagaaggaagaaaggcgtgacgtgtccagcccgtacgcgcgccacgtggccaagctagcttcagagcntagtgaagctgcagacatgctagctggctagctagcagtgagagagtgcgaccgactaaaaaaaaagttagtgatcaattaagggcttgtaatttaatcgttgttttttttttctctgtttcgttgagatcgatatcgttgtcaccatgcatgtatttcgtttttgattctcagtaattaattagatgggctttctgtaattcaacctgtaagggttccttccatgattaattaattagcgtgttaataattgtcccaccaatacagtgcttgaattattttattgata

SEQ ID NO: 4951 - DNA, 180 bp, Oryza sativa
  Clone ID: PAT_MRT4530_11787C.1
tttttttttttcataatccaatatgccagttaattgaatttttataacccttgaaagttaaggtaacctatactttacttcttgtaggggtgtgttcgtttctttcctaaaagctcatcctcttgcagagtacaagtgagaattcagacatgtgaatctgtgacactcctcgttaagctt

SEQ ID NO: 4952 - DNA, 2160 bp, Oryza sativa
  Clone ID: PAT_MRT4530_11788C.1
atggagatttacattgtctaccttggggagagacgacacgatgatgctgatgtcgtcactggttcccaccatgacatgctcgcctctgttttgggaagcaaggaggtggctcttgagtccatcgtgtacagctacagacatagtttttctggctttgctgcaaggctcacagaagcacaagcgagcacgatacgagggttgccagatgtgatcagcgtgagagagaaccaaatccaccggttgcatacgagtcgaagctgggatttccttggaatggactacagacagccaaatggcctgctagccaaagctaaatatggggaagatattattattggggttatcgacacaggtatcacacctgagtcaccaagcttcgctgatgatggatatggaccccctccatccaaatggaaaggagtttgccaagtcggcccttcgttcaaagcaaaaagctgcaaccgaaaacttatcggtgcacggtggtacatcgatgatgatactttaagaagcatgagcaaggatgaaatcctatctcccagggatgtggttggccatggaacacacacggcttcgacggccggtggtaacatcatccacaatgctagcattcttgggctagcagctgggacagttcggggtggcgcgccccgtgcacgagtagccatgtacaagacatgttggaatggtgttggctgctccgccgccggtcagttgaaggccatagatgacgctatccacgatggcgttgatatattatcactttctcttggtggcccttttgaagatccaggcaccttgcacgttgttgctaagggtatccctgttgtatactctgctgggaatgatggacccattgctcagacagtggagaactcatcaccgtggctgcttacagttgctgcggccactatggatcggtcattccctgtggttatcacattgggaaataatgacaagtttgtggcacagtcctttgccatttcagggaaaacttcaagtcagttcggtgagatacaattttacgagcgtgaggactgcagtgctgagaatatccacaacacagtgaaggggaagatcgtcttctgcttctttggaacgaagttcgattcggagcgagattactataacatcaccaaggcaacgagtgagaaaggaggaataggggtgatcttgcctaagtacaacaccgacacactactgggggacaccctcctcactttgcctattcccttggtcgcagttgattatgagatcacctacaggatataccaatatatcaaagaaaacgatggcaccccaaaagtgaagatatcattaacccaaacaactattggaaaagtttctgctcccaaagtagcagctttctcgtcgagggggcccagttatatttatcctggggttctcaagcccgacattgctgcaccaggtgttacggttttggcagctgcaccaaaggcttttatggatgcaggaatcccgtaccgtttcgactctggaacatctatgtcttgcccccatgtgagtgggatcattgcggtactcaagtctttgcatcctcaatggtcaccagctgccctcaagtctgcaatcatgactacagcagcacttacctatgacaataacgggatgccgatacaagctaatggaaaagttccaaagattgccgatcctttcgattatggagcaggggttgttaatccaaacatggcagctgatccaggcctcatatacgacatcgaaccatcagattacttcaagttcttcaactgcatgggaggattaggctcagcggacaattgcaccacagtgaaaggatcacttgctgatttgaacctcccgtccatcgccatccccaacctcaggacattccaggccacaacgcgcaccgtcaccaatgttggccaggccaatgccaggtacaaggcgttcctctacacccctgccggtgtcgagatgaccgtcgatccgccagtgctagtgttcagcaaagagaagaaggtgcaaagtttcaaggtgaccatcaaggcgacggggaggccaattcagggggactatagctttggaagcttggtgtggcacgatggcggcatacactgggttcggatcccaattgcagttcgcatcgtgattgaagagatctactccaagatctcctaa

SEQ ID NO: 4953 - DNA, 657 bp, Oryza sativa
  unsure (1)..(657): unsure at all n locations
  Clone ID: PAT_MRT4530_11789C.1
atgtgtccctcggttagctttcatgtgtaacctaattagccatgtggnantttcccctccccggagccccagacctccttctcactgcttagaaaccttggatccctagatgcatgagaacttaagttcatggagttggtactgccaaattgagttgttgaaaggctttccagtggcaagtctcattcttgggacgtaggctcatgtttggcaagtccggagtacgggtaaagtgtacatccctcagtgtgantaaaccatctattcgaataaccgtgctcgcggttaataagcatcgggatatgtattacacttggttagactctaatttcttaatctgattgagatgggatatgcagtgaaggggtagaccccagaaaaccatgacgaccatggcgggaagctatctttgagaacacatggatgatggacagaaccgtcgctgtttaatgaacaatggagttaaaacttgatcagtttatgctaggtcttaggtttgtgaaatgatatttggaaactcatctttatgcaaagtaaccatagccactccttgtattatcctgtacattactgcattttgttttgtggcttgctaagtacttttgtactcattgttgctctatanatatatatatcttttacagtgttgaaaaaaaa

SEQ ID NO: 4954 - DNA, 3570 bp, Oryza sativa
  Clone ID: PAT_MRT4530_1178C.1
gagacacacagtttgtcacattgctcaatagaaatacaatgctcaggtcgtgacatcattagaccatgaccagtaaaccacacttggtcaaactcatacattaatcccatacatctttctcaatgtggttcaaaaactccaccaacattcttcctagtccatcaagtggaaaagtatttcagaattcatcttttccagacccataggatcaatagcgcaatacaaggactaactaatgttggctcatttacaagctgccaaaggctaccaaatctactatctaaaatggggagcaaactactttgcatcacctaacccttgatttgacatcaaaagaagggcatgatctacaaaagtcacctcatactactataaatgcagagtcaaaccgtcaagctgtcaagcctttgctaacactgtagtagcagatataagtatgaaggataagtttatttcgacatgtttaaatgtttcttgatcatgttcaagatctccataacaccagtgtagtactgcaagacaggagaatagtgatcgagtgcaatataaatttttgcaagaagatctgttaatgcctcaacctcatcaccaagtaaatctacctcgagctcagctttctgaagattggaggctcttgtttcagatatttccttgtatctcaatgccttctttcttaaagtattgccttcttttgcaaggattttacattgttctttcaatagactaaaccttgattcattgtgctgaactttgtgtgcaatgatagtttgttggtctgtaacaagcttttcaaaacctctcatagattcaacaacacatctcatgcattctgtaaactccttttctttagaaatggatgatgaaaatcccttctccttttctttaatgatggcatgtaaaactttattttgtttctctacctccttttgagaatctgatacagtcctaaatctatcatttaactccttcagagcaatctcattacgatgaacatgctgcagagcttgctccaacctgctaacaatgacatcaaaatccctgcacttatcagaaatgccggaatcttgctttgcaactttgcctcttagtgaatcaagttcatggcgtagaaaatccaaatgatcctctattgctttgaattcaatctgtgacaaatattcctccttctcccttatcactaaattgaaggtatccacatttagctttaatttgtccatctcttgcatatgtagagattgtgcttcagcacagctgttttcctcgctgtattttaacaaaaatgaattaatgtttgaagctgcttcagctatggcctctttctgaataattgaccaaaagtccagattcatattaaactccatctcataaccatgcaatcccatttttatttcactaataaactctgttactaaaatcttttctgtctcttctctaactatggttacaatgctggcatcttcaatatcagattctaacctcctaatctgattcaggtaatttgtctcaatgggtgtgaaatgtgaagccttaattagagtagtgcattcttcctcttcattgtcagttggagcaccttgcaactgatggttgtgagaatctacaaccttgattttgtcttgttgaccaggaaatacatcactcttgatgcggatggttcttttattctccacaaggacctcatccaattttgtaataacttcccaaattttcttcctcatgagctcaaattctttattattgcgtaaatgccaggggttaggtccttctttttttaggttctcccgctttagtctaaatatctcttccgtcttctcttgcaaagtcgaatcatgctgccgtttcatttgattcatcattttattgaaatgggctaccaactcatccctatccatgtgcttcagaactgttggatcaataaaaatatcttcattggagcctttagaaccattttccttagttataccatctttagaggatttttcatttccctctatgctacttttcatcttctgcgccttcaaagttgttatagtgtgatactgaaagcccccactcagaattcaagagtgacttagaaagagtcacaagctgttggcgaaggttataaatttcttcatagagtttatctcggccctcagataaactcaggccactatttctgaattgatgcagcttttcgttcaagaatgctatctctgcatccttagatgcaatctggcgagctgattcttgctctacagcacttatagttcccttcataacagagtcagtaacatatcttgaaacatgaagactggtatttaattcattccaaatggcgtccaagtcatctacaatcaactcattttcatctgaaggttctccctggacagtggagcttccattcatatcgctatgtgctaatggtacatccagggtctccaggctctccgccatgttcccacttaccactaccttactgccggtaaccgcgcgattactacggttaccgggcttaccgcgggggtacggtaatatataccgcggtaacctccgccggggcgcggtaaccccggccccggcggtttgggaaaccctggccgcggtacaaacaccataggcggctaaacagtctgccaccttgttacacaatctagggcaaacagaaatattgacatgatcaaaattcacccgtagaaatgccctgatctgcctgaacaaagccccgttcgggttgcggtcgaactctttagatgttaaggctcggtgcaggttagtagcatccatttcgacaataatgtcagtcatgcccagttgtgccaccttgttgcgagccaaccaccatctccacatgaaggtgaggattttttgctgtgtagtttcagcaaaagtccaaagcttagacatagcttctttccccgattggcattggaccattatcttcctctccctctccagattcagagctagccagcacgcccttgcatttttgcacttaaaaaacagatgtccgttgtcttcgtcaaaacgtttgcaaacagggcagatcttatcaatttcaactcctttcctggccagattgcaacgaacagcaaggctattatgagtaaaccaccacacaaacatctgcaccttatgtgctaccttgcacctccagattttcaaccaatcaaaagtgtgagttccgtatacactgccgctggaggaacttgcatcccgcccgctgcccatatcacgcttcctgacagcaaccttataggctgactttacagagaaaactccttttggatcatagcgccaggcagcccagtcgtccacaccatcatgcaaggggatcttttttatctcaacacgccagatcaatccttccttcaacagctccacccccttcaggatacttcgccaggaataagagatgacgtccttagccgagctatgcagcacatcagtatgagggtagtacttcgccttgaggaccctagcacatagagttcctggattggtgaggaggcgccatgcttggcgggctaacatggcaatattaaagagatgtagatctctgaaccctaagcccccattctccttcgacat

SEQ ID NO: 4955 - DNA, 245 bp, Oryza sativa
  Clone ID: PAT_MRT4530_11790C.1
aagccgggcggatgcaaagacggcggaggcgggggttcccatttctcctcactcctggtcaagtggatggggcgccgatgagaccggagcacgaggggcgcagcttggagaggactgccagatccggcgccggtgaattcggatccggccctcccttggacggatctgggctggacgcgcaaaggaggcggcgaaagcgggagagcgcggtgggaccgaggcgcgagggctcgtcggaagaggcg

SEQ ID NO: 4956 - DNA, 1399 bp, Oryza sativa
  Clone ID: PAT_MRT4530_11791C.1
ttttttttttttttttttttttttttttccacaatctgcttattgcacatggcaagctacagcctacagaacgccaccaactgaattgacatatatctaacgttttttttttttttttttcagtcacataaacgttccagctaatcaattgtaggttcaagtacaatcatacccttacaatatagccggataacaggatcttaaaaaaaataagtacaatcaagccacgagttcagcaagaaaactggaattacacttttgtcgctttacctaaaccatttgatactcatcaccttcctggagacttcttgcacaacccctcaaccctcatgctaaaagttcaacatcctcaatcctaaatagtgctcatgatagcaacctcactagataggtcttcaagtctagaaaatagagaggtcagggtggtggtccatatactgatttccaggacaatggaatagtccatccattggacccatttccatggaactggttcaggggccttggagcaacaagtttgcatgctgcctcagccaactggaaagattctggcatatcgtccccttctgagcagtagcatagtacacaagtacctttcaagcctttagccttgcaggcagagaatagtgctgcaaatggcaagctcgagtagtaatcatttatcggtcatctcctcaggatcaccagtcagtatcttctcgaaagattgaccacctttcaagtaggctaggcgagacacttcccacctttgctgagatggatcgtattcctcaagcttcttccagcctaagttctcacatttcggatcagaaccgtcctcgttgcaacttgaaaggtaatatacttgcatatcactggatgcatcaattatccttctcttgcctgaatctaaacttgaaaggataacaacatggtctttttcaatgctgcttataaaattagcaacattttttgcaaatgaaaccaccatccctgtaataattggggaccgttgctgtatgaaggccagcctatgggatggagattcataagcttccagcgcgagcgcgagatcaccgacggcgtcggggccgaaggcgtcgttgccggcgcagggcagcacggacggctcgtcgaggtacgccacccgcctcgcgcgcgacgaagacaccagcaggtcgacggcgagctgccccacgttgccgatcgagagcgccggggtggcctcggagtcggagaggaggatgctgctgtccctcgtcctcgtcgtgatctcctgcacaacaccatcaccaaccttactcttgcagctctccccttcgctctgagctcgctggccgaccccggcgtcggccgccggtgccgccccccggcccatcttggcgaactcccccagccaaactccaaccaggcccgccat

SEQ ID NO: 4957 - DNA, 411 bp, Oryza sativa
  unsure (1)..(411): unsure at all n locations
  Clone ID: PAT_MRT4530_11792C.1
cccacacgtccatccaatcgtccgatactacccagtaagctttctaactaactacgctgctgtggtcggtaacatgatggcctcttctgacacctccgaggttccattcctagggcgntaaagctcacactgtcgagtcttcaagatagccgtcgatctaccaactctggctttggaaacgtcagcaatggcggaaggatcaagtgcatgcaagtgtggccaacttacaacatcaagacgttagagaccatatcacacatgccagcactcaccgtgggggatcttatgaatcagatctcgtacctgcttggatccaagcgcgtgccttgcctagagttatgcaaagcttgattagcctaccatgagaaccacaggcctcccggctgctacgattaaacgtcttgtaccata

SEQ ID NO: 4958 - DNA, 365 bp, Oryza sativa
  unsure (1)..(365): unsure at all n locations
  Clone ID: PAT_MRT4530_11793C.1
aataatttgtatcnaaattttaaatataattattccactggttacctagctgtaaccaacttaaaaaaaaaaaaaaaaaactcnagggggggcccggtacccaattcgccctataatgagtcntattacaattcactggccgtcgttttacaacgtcgtnactgggaaaaaccctggcgttacccaacttaatcgncttgcagcacatccccctttccccancttngcggtaataacnaaaaaagccnccnccgattcnccctncctaacanttnccccaccttnaatggctaatnggcaaatngtnacgttaatattctcgttaaaattcccgttnaatnnttnttanatcattttntttttta

SEQ ID NO: 4959 - DNA, 1049 bp, Oryza sativa
  Clone ID: PAT_MRT4530_11794C.1
atgcagcagcagcaggcgtgggcggcggggcttggcggcctcgcggtcgccggggtcggggaggagggcggcgggggaggtcccgctcccaccaccgtcgacgaggcgtccatggagcggagcaagagcttcgtcaaggcgctccaggagctcaagaacctgcggccgcagctctactcggcgtcggagtactgcgagaagtcgtacctccacagcgagcagaagcagatggttctagacaacttgaaggattatgctgtgagggctttggtgaatgcggttgaccaccttggcacagttgcctacaaactgacagacctgtatgaacaacaggcttcagaagtttccactcttgagctgaaagtagcatgcttgaaccagctttggcgaacaaaagaatgcaggctttctctgagatgcaaactgatgctgatattgactcaaggcctagaccttatccctcagcaaaaacccttttctggcatttggcttcagagaaaaactccaaaaccaatggagcacgccaatctgaatttgtgtaaggaaccatcaacatctccattgcccaagcatctgcagacaaacttggccagctctgattttgctatgcataatgttggcatgaaggatcaacctggtgtcaggcatctatcgtcatttagttcttttgacaacccaagagggcgtcaaatccaaaaggctcccctccgtaccaaaagtatgctagctgctttctttgtcaagcacaagtcgggaaagatgaaaaacgtttctgttcgttgattagttcccgtttgtgtgtgtgaagtgatatcactgtaaagttcaagcaagaggcttattgtaaatctgattttcgcttgtgcggtttagagctgaatgtgtaagtgtcaatttttcaggtcagcatcagtggtgccattcctgttgatgaacaaaatgtagtaattctgcatcagcgcccaatcagttccatgttgttgctgtgctattctgcttctaagaagcctcggctttcagcaggcaataagattcatatttgaaaaacc

SEQ ID NO: 4960 - DNA, 599 bp, Oryza sativa
  unsure (1)..(599): unsure at all n locations
  Clone ID: PAT_MRT4530_11795C.1
cccgggntcgacccactgcgtccgaaaaaaaaaaaaaaaaaaaaaaaaaaaaaaaaaaaaaaaaaaaaaaaaaaaaaaaaaaaaaaaaataaaaaaaaaaaaaaaaaaaaaaaaaaaaaaaaaaaaaaaaaaaaaaaaaaaaaaaaaaaaaaggggggaaaaaaaaaaaaaaaaaaaagtttaaaaaaaggggggggggaagtaaaagggtgttttttgggaaaacaaaaattaattggaggggcgtttttttaaaaaggggggaaaggaaaaaaccggggggtaccaaaaaaaatgggggggggaaaaaatccctttttgccaagttggtttattttgaaaggggccccccctttccccctttcaaaaaatttgcaaaacctgaaaggggaatgggccccccccttgtggggggaattaaagggggggggggggggggtttccccgagggtgtacttttactttggggggggccttaaccccggtttttttcttttttttcctttttttttgagaaaaaagggttttttttccaagaaattttttaaaggggggcttccttttggggtccaaattaatttttaaaggggcctcccccc

SEQ ID NO: 4961 - DNA, 1349 bp, Oryza sativa
  Clone ID: PAT_MRT4530_11796C.1
agggacgaaggctccacggtcctcgtcatcgccattacgaggagcgaagcataccctcgtttctcttgctcgcctcaggtaccagctctactcggcgtcggagtactgcgagaagtcgtacctccacagcgagcagaagcagatggttctagacaacttgaaggattatgctgtgagggctttggtgaatgcggttgaccaccttggcacagttgcctacaaactgacaagacctgtatgaacaacaggcttcagaagtttccactcttgagctgaaagtagcatgcttgaaccagcaagtcctcacctgccaaacttacacggataaagaaggcattaggcagcagcagatgaccggaaccgccacaagacatcacaaacattacattgtaccgactttggcgaacaaaagaatgcaggctttctctgagatgcaaactgactgctgatattgactcaacgcctcgaccttatccctcatcctaccacccttatctctcattctggctacagggaaaaaagccaagaccaatggaacacggcagtcgcaaatgtggtcctaggggaaacaacggctacacgaacctggcatcgagaggtaaaggaacgagcgagatctccagttgcccaagcatctgccgacaagcttggccagctctgattttgctatgcataaggttgccaagaaggataagcccggtgtcaggcatctatcgtcatttagttcttttgacaacccaagagggcgtcaaatccaaaaggctcccctccgtaccaaaagtatgctagctgctttctttgtcaagcacaagtcgggaaagatgaaaaacgtttctgttcgttgatcaatttcaagcctccagtttgtccagccctgtcacaacgaagtacaaccacggaattcagattacatctacaatatgtctgtgtcttgtatattagtgctctagagatgaatcttttggataaagtttttatatcttaatgttaatgtcatctttctgatgacttaaatgtttaatatatgggtatagaataacagttttcagtataagtggatgtaaaaggagtatgtcaaccatcattttcattcatgtagattgtatgatgtgtttgtacagaagaaaaaaaaagccaaaaaagaaaagcagactactgaatttttgcctccttaaaaaaaaaaaaaaaaaaaaaaaaaaaaaaaaaaaaaaaaaagaaaaaaaatataaagggcggccgatttaaatggaaccagagttcacatacacatgtatgcaatataataactttgggggggcgccttttaagttccattctttggcccccgttttacaaaaccttaaattttt

SEQ ID NO: 4962 - DNA, 413 bp, Oryza sativa
  Clone ID: PAT_MRT4530_11797C.1
cagatggcgacgacgccggcgcccggctggcgcgccgccgcatccactagctagcgcgccgccgtcttcccccacgtcggccgccgctcttcttccccacctcgccggcgcagcttctcccaccgcgccgcctctcctctccaccacccagtgaactccgccgccatggaaggctctctctctcatccttccaatcgatctcctcgacatgctatgctcatcccgtcgaaaagttcgattcttttgctccgatcgtttcgctgtagatttggttttgttttatttgcgttttgcttttctttcggtctctcttttttgctggatcgatcttgtctccgacgatgtaaatttatactttcgttcttctgaagttggcaatgtggaaagcactatctggagacctgactgggggt

SEQ ID NO: 4963 - DNA, 452 bp, Oryza sativa
  Clone ID: PAT_MRT4530_11798C.1
ccgggctgcaggaatcggcacgaggtttttttttttttttccgaacaaaaaaagaactactacttcagtagctcatctacgtaaattttcctcaattttacaactacaaagctacagctagaacaaagttggaacgtttctgctacagcaagctaggtgagactgaaaattgttcagatcaaagctagctaagctaggcgaggccaccgcaatggcgaattggcgattgcaaatgcagagatgtgatggccgtcacgcctgcttcacggcgggggcgttgccggcgtctgctgctcccggcggagacggcgtctgctcgacggcggtggcggccgcgtgagggaacggcggcggcggcggcggcggcgcgaacatggacatcggcggcgcggcggggaacatcgggcaagggaactgcgcggcggcgggcatgccgaagccggcgagcccca

SEQ ID NO: 4964 - DNA, 327 bp, Oryza sativa
  unsure (1)..(327): unsure at all n locations
  Clone ID: PAT_MRT4530_11799C.1
caccgcctaacgaaccactcgccatcaaagcccccagagagcgcgccatggcggcgcanggcggatggccgacgtcgacgctggcggcggtggcagtcgccgtagtagtactactngcggcggcgcgnggccagcggggccggtgctggaccaggcgtgcctgacggcgctgctgaacatgtcggnctgnctgangtacgtgcagaacgggngcagnncgcggcggccgnacaagncntgctgnccggagctnnaacgganataagtggagtccaaancgngtgtncctatnagtgntactgtttnaaaganagagactactaagng

SEQ ID NO: 4965 - DNA, 360 bp, Oryza sativa
  Clone ID: PAT_MRT4530_1179C.1
ttttgttttttttttttttttgggtttttttttttttttttttttttttttttttttttttttttttttttaaaaaaaaatgggccatcaagggcctttagggggaaaaaaaaaccgaacaaaagggttaaggccgggttaaagggaaaaaccccggccccgggggccgcccccggaaggccggccccggcccccggggggccccccctttccccttggggggccccttgaagagccccgcggaatcccgggaaaaagggggtccccgggggaaaggcgtaatccgcggacactttcccccaaaaggcaaacccggggcctaaaaagtaaaccccggggggcccaaggggggggctaccc

SEQ ID NO: 4966 - DNA, 300 bp, Oryza sativa
  Clone ID: PAT_MRT4530_117C.1
atgacggttgtgacggttggaatggttggtaataccctccaaccgtcattggggatcaatcccagctatccatccaaaccctgcatccatcggtgccacgggaggttcggccgaaccctatggttcggccgaaccatgggctggcccaacccagcccatcttcggctggtggcctcctttgttgttctcctccatagacttgtaaattttggcccagtgtgtcgtgtcatttctgatttcttggcctattcatacataagtctggttctcaacatcgtccgattgatttatcgtctgtgt

SEQ ID NO: 4967 - DNA, 1705 bp, Oryza sativa
  Clone ID: PAT_MRT4530_11800C.1
ctgcggttcccccttgcttaggcatttgtatccgcagggcgactatgaaaacgcacaacccggccttttcggtcctgcctttgtgcctttgtcacatgtcttcctgcgtatccctgattctgtgataccgatgccgcatttgagtgactgatacgctcaccacacccgacgccgagccacgagtcagtagcgagaagcggaaagcgcccaatacgcaaaccgcctctccccgcgcgttgccgattcattaatgcagtggcacgacaggtttcccgactggaaagcgggcagtgagcgcaacgcaattaatgtgagttagctcactcattaggcaccccaggctttacactttatgcttccggctcgtatgttgtgtggaattgtgagcggataacaatttcacacaggaaacagctatgaccatgattacgccaagcttggtaccgagctcggatccactagtaacggccgccagtgtggcaggtacaagctttttttttttttttttttcacacaaccaaccttcaatgaagatctttattgatgcatgcaacacactacagacagaaacaactgataggacacgactgtaaattcagaaggactccagcgaccaagcatcactcatcacaacaggaatgatagggaggacccccatcttatttgtttactgcagaaaacacacgtgaaactcaaacacggaatacttattttgacaagttagatcggctgcacgtagacaccaactgcatttatgtatttcccactgcgcccaaagaaacccactatactggagttattctgcgctgggacactgaaaggggttccctcctgtcgtccaaatgggccatatgtttgcttattggtgataaaattaatagatgttataacggtgctgccctcatatgggccaaacgttccagaaacttccttgagaaactctgaactgccaaattcaatcattatgggatccccgccaggaccaccccatggacctgccttgtgcttctctccggcatggtcaaggtaagtaaacgagattgagtcaacagaccagccgtggtataatgtgatgctttcgagacaaattggagactcagtgatgtcttgagctctgcctccatcaattccaccccaaggcccaatcttggtgacaaggccctgtgacggtgaccctttcaagacagggcaaaatcccttgatagtgagttccataatatttccttcttttttttgttcatggaactttttaaagattacaccatttgccatagcaaattgtcccgtgcccccgacaatagcccattcaccttgttcaacaactattcccatcacctcaagagtggaacccttgaacctttcatcctcaaacactagggtgaaggagttgtgccagttaccggcataaacgtgcaggccttgtgcatgggcaacaaccttggcgtcacagccgattccgtcgtatacctgccagttgttaacaaccaaggaacccaacccggtttccttgtttgtgcttgtgaccccggactggtttggtcttggaccagccggcgtgtggtgcaggtagagtttgctaaagttgatctcattgccctgaatgggtgtgctgcatggggtgaattgcagcttgctagcagacatggctgggaactgctggtgggtaggggagaagatgtggtgtagtactatggtctatggctgt

SEQ ID NO: 4968 - DNA, 539 bp, Oryza sativa
  Clone ID: PAT_MRT4530_11801C.1
tctcgatgatagcgaggaggcccaacggtgatgggagaactgaagcagcaggctgcagcttcggctcctcgatgtcacggcgactgcagcgatggctccttgatgcggtaatgggagaaccggagcatcaagccgtggtagtggctcctcgacgcgacgaccgtgtcgcctccctccggttggctagccacctcgagcttgccgtcgggacagcgtcaggagtgcgatggactattgtgagcaccggttgccagagcagtcaccacctcctcttatggtcagatctgaaccactcattggagagtgatgtggctctcctcggtggcggcggcggcagcccatccgacgctcctccgtggctccctccctgcaagatgctgccggcctcgagcgacgggattgccttgaaggcggccttagtggtgggcttcgtccgcggtggcgccatctcggcccgatgttgcctcccgtcgcacacgccaatcgaggccgagctcgagctcgcgcgggacttgccgccgatcgccaccctgacctag

SEQ ID NO: 4969 - DNA, 279 bp, Oryza sativa
  Clone ID: PAT_MRT4530_11802C.1
tgggcgaacactacggcggagcgggcgctcaaggagcggctgttccgggcggatcccgcggaggtgtggtcgatccactacctggggctgaagcccgacgccgcgcacgcgcggtggtggcaggtgtacgacgacatgggggaggccatgcgctcgccgtgccgcctgtcggagcggaggaagatcgagatcgcctgggaccgacacctcgccgaggaggccggcttctccgaccaccactggaagatcaacatcaccgacccccgcaagtgggagtag

SEQ ID NO: 4970 - DNA, 2053 bp, Oryza sativa
  Clone ID: PAT_MRT4530_11803C.1
cacgcacgcacgcacgcacagcgcacaccgcgtccttcgcgcgcgcctcgccgcgccatgccgcgcgcgtcgatctatataaccccgcgccatgcaacgccgccccggcttaggcaaaacagcgcgcacctcagctcgcgacgcgcgccaacctcgccgccgaagcacgacacgaggacaagctagcccggcgcggtgtgccattggcatgggggtgacgggcggcgccggggaggccgtcaagccgtcgtcgtcgtcgtcgttgtcgccggtggcggggctgagggcggcggccatcgtgaagctgaacgcggcgttcctcgccttcttcttcctcgcgtacatggcgctcctcctccaccccaagtactcctacctcctcgaccgcggcgccgcctcctccctcgtccgctgcaccgccttccgcgacgcctgcaccccggcgacgacgaccaccgcccagctctctcggaagctgggaggcgtggcggcgaacaaggcggtggcggcggcggcggagaggatcgtgaacgccgggagggcgccggcgatgttcgacgagctccgtgggcggctgcggatgggcctggtgaacatcggccgcgacgagctgctggcgctcggcgtggagggcgacgccgtcggcgtcgacttcgagcgcgtctccgacatgttccggtggtcggacctcttcccggagtggatcgacgaggaggaggacgacgagggcccgtcctgcccggagctccccatgccggacttctcccggtacggcgacgtcgacgtggtggtggcgtcgctgccgtgcaaccgttcggacgccgcgtggaaccgcgacgtgttcaggctgcaggtgcacctcgtgacggcgcacatggcggcgcgcaaggggctgcggcacgacgccggcggcggcggcggcggcgggcgggtgcgcgtggtggtgcgcagcgagtgcgagcccatgatggacttgttccggtgcgacgaggcggtggggagggacggcgagtggtggatgtacatggtcgacgtcgagcggctggaggagaagctccggcttcctgtcggctcatgcaacctcgccctacctctgtggggacccggaggtatccaggaagtgttcaacgtgtcggagctgacggcggcggcggcaacggcggggcggccgcggcgggaggcgtacgcgacggtgctccactcgtcggacacgtacctgtgcggcgcgatcgtgctggcgcagagcatccggcgcgccgggtcgacgcgcgacctcgtcctcctccacgaccacaccgtgtcgaagccggcgctggcggcgctggtcgccgccggctggaccccgcgcaagatcaagcgcatccgcaacccgcgcgcggagcgcggcacctacaacgagtacaactacagcaagttccggctgtggcagctcaccgactacgaccgcgtggtgttcgtcgacgccgacatcctcgtcctccgcgacctcgacgccctcttcggcttcccgcagctgacggcggtgggcaacgacggctcgctcttcaactccggggtgatggtgatcgagccgtcgcagtgcacgttccagtcgctgatccggcagcggcggaccatccggtcctacaacggcggcgatcaggggttcctgaacgaggtgttcgtctggtggcaccggctgccgcggcgggtgaactacctcaagaacttctgggcgaacactacggcggagcgggcgctcaaggagcggctgttccgggcggatcccgcggaggtgtggtcgatccactacctggggctgaagccgtggacgtgctaccgcgactacgactgcaactggaacatcggcgaccagcgggtgtacgccagcgacgccgcgcacgcgcggtggtggcaggtgtacgacgacatgggggaggccatgcgctcgccgtgccgcctgtcggagcggaggaagatcgagatcgcctgggaccgacacctcgccgaggaggccggcttctccgaccaccactggaagatcaacatcaccgacccccgcaagtgggagtag

SEQ ID NO: 4971 - DNA, 585 bp, Oryza sativa
  Clone ID: PAT_MRT4530_11804C.1
atggacaatggcagagaagcggcgtgcggcagcaggcgagagacgagagaggaggagtggcggccggagctgcatgacctcacccccccgcgccgccgattcctcctgttgcgtcgccgcattgatcttcatgagttggcgctggcaacggcgagttcgcagtcgcgggacacggacagcgtggcgccgacggggcccgagactcgagctcgaagccgctgccgccgcttcagcggccccctccccctgcccccagtcgccattcctcccccacccatccctgccgccgtggtcacccaagcgatcgcatgccgccaccactcctccgtcctcgcgcgatcccccaccgccaccgccccaccgccccaccatgccgccgcccgcctcaccggcatcctggaaggggtcaatggcaccggcgagaccctccccccccggcgatacccctccccctccccctaccccctctcctccttccctcctttcctcgaggtggcgacggggaggtgcccccgccctgccgtcttccccgtctccggcggctccccgccgccggatccgccaccaccggccgccgcctcctaa

SEQ ID NO: 4972 - DNA, 718 bp, Oryza sativa
  Clone ID: PAT_MRT4530_11805C.1
cacgaggccaagccctaaaccctctcctctccttctctcacccatggcgcacaaagtgtggccgcagcagcctccccatgcctccggcacgcccacctggtagggcttctgatcgaggcgcatccaggtgtgtagagatctctgtcgccgctccgctcctcgctgagggaggtatccgtatccctcttatgcgtgcctagagcgtatggggactcttgcattctcgggcgggatcttgtttctagtgttgtgataatcgatgacgtgtgtatttttggacatcctgctgctttctgtttactctttagcaccgcagattttacttttcaagtcaatagaggtgattaaataaattaattctgcatactgccaaatatatttattttattgaagtgtgaagcgataaattactagtaggtcattgcaacggttgttttattctctcttgatgaaaggattaacttacatgacacaggcacgcggcagtcatttggttgcatttattctctttttctcatatgctcatgtattcttgtaatggttaatttttcttgttttgtggatcctgtgtgatagtcttacaatgaatttccgaaatcaggaagtaaagcgaacgaactgacctaggttatggttttctcctggtatgaaacataacatgaagttagttttgctgacttctttggcttggcatagacgtgatatttccagtttagga

SEQ ID NO: 4973 - DNA, 666 bp, Oryza sativa
  Clone ID: PAT_MRT4530_11806C.1
atggccgatgaggacgtgccgttcgaggtggcgctggccgcgggtgacaccatcaccgtgttcgacacgctagtgtcacccgacgacaccgaagaccgtggtgaaagcgccatggtggacaaaaccagcgccatggtggacaaatctggcgtcaatactgtcctgggacctcagaagctctggttgaaggggcacttggcggcagtgtcagaacttgtcgacgccgctgctcagtgccttcgaatcgagtggtatcggcgcatccgcgcggtcaaaactgaatcccgtgacttgaggttagtcttggtcaatggtgaggaccgggactatctcagggaggagcagaggtctagtgcgatcgggataccatgtgagaagcgccctcccctcgcggcgggttccgtggtcggcggcgggcaccccacgagcaatggcggcgggctcccctccgctagatccggcgagaggggagcctgtggggcaggaagtggggatgcggcgggctcccgcaccgacggctgcctggcggaggcatctgcggcgcacctcagcaacggtggtggccatgccatccccatgcggcgacggcgacaggggtggagaaggacgccgatggttcttggtataaatagagatggaggttatgccttaagggctgacggttag

SEQ ID NO: 4974 - DNA, 240 bp, Oryza sativa
  Clone ID: PAT_MRT4530_11807C.1
atggagaagagccggcttgggctcgggctggaaaagggggcaaatgagtggggaggaggatggggtggggcttgctggttatgtgggtgcgagcccgagggagagcgccgggatgactggcaccgtgctatgagatggggcgccagtgtgactagcgccaccccctcctgccatgtcagcctgcacgcctgcgtggtgccacggtggcacgggcacggcgagcgccgtcctgttatttaa

SEQ ID NO: 4975 - DNA, 1631 bp, Oryza sativa
  unsure (1)..(1631): unsure at all n locations
  Clone ID: PAT_MRT4530_11808C.1
cccacgcgtccgcggacntgnangngnagaaagaggattgcaagacgctgtccatcgaagcannccatccatggcgcctcctcggctataaccaggcgagagagagagagacgagacgagacagccaagaacacgcgcgtgcggcgtgcgntgattcttagtttagcgccttcccccccgcggccgataataacacggtggtgggggaggtgttcgtccgtggcgcgttcttttgtcccaggcgtgcatggccgagacgccatgacgacgacgacggcgacgaacacggcgacgaacacggcggcagccatggaggtgaccaaggcggtcacgcagctctgcgcgcagggtgggggcggcggcgggaggaggagggggaggggcaggccggccgtgctgcggctcgacctccgctggggccgcctgctccgcctcgccgtcatcagcagggtcgtccgcctcgtctgggaccagctcctcgcctgctcctcctgcgccggcggcggcggcggccgctaccgcaggctcggcccgccgccgcagggcgtcgccgccggtgccgtcctctccccgctccccagggacgccgacgacgacgctgccgccgccgaccgcgacgcggccgatgtcgaggacgtcgtcagcctcaaggtcagcctgctcggcgattgccagatcggcaagaccagcttcatggttaagtatgttggggacgacgaggagcagaacggcttgcagatgacgggcctgaatctgatggacaagaccttggcagttcggggagctcgaattgccttcagcatttgggatgtggcaggagacagccagttcctcgaccacgtcccgatcgcgtgtaaggacgccgtggcgatcttgtacatgttcgatctcacgagccggtgcacgcttactaatgttatagattggtatgagagggcaaggaaatggaataagacggctattccaatcctaattgggacgaagtttgatgacttcgctcagcttcctcttgagatgcaatggaccatcgttaacgaggccagggcatacgcgagagcgatgaaggcgaccctcttcttctccagctcgacgcacaacatcaacgtgaacaagatcttcaagttcatcacggccaagctcttcaacctgccgtggacggtggagcgcaacctcaccgtcggcgagcccatcatagacttctgaagactctacacccttacactgacaaaatgctaggcaaaaaaacgtacacgagcccttccttccctccccttcgtcgtcttcctcctgacctttctctcccggtaatggaggccggccatggccatggctgagcagaactgagctcttgcatgtacatataggtgaaagaaaaaagaaaaaaaaaagaaagaaaaaggatcaagttgagttcgtcgttgtcgaggtgttatcccttcccttgtgcagtgcaggcaagggcagaagaggaaaccgtgagatgttgtctgtaaccctcgtcacagtgtatagtagagtaggagtttaaccgatccatgtaatataatcctcaccgtttttttaacaccagttttagatatgggtactcatcgaaccattcgatcagtttaaaaaaaaaaaaaaaaaaaaac

SEQ ID NO: 4976 - DNA, 369 bp, Oryza sativa
  Clone ID: PAT_MRT4530_11809C.1
atgggcggcgtggagcggccggtgatggtcgacatcatgggcggtggaattgggggcaggctgcgccgcggcggcaaggctcgcgtcctcgtgctcctcaacagcagcaacacgacaaagtcgttttcgttgtcggccgggaggagggagggcacgtgcttgcggcccgcgttgttcgagtgcaggacgtgcggcaggcagttcctgacgttccaggcaggcaggcattggacgggcaccgtgccagcaacaagcggtcgcaccactcactcacgccacgtcgccatccacgaggtctcgcccataaggaagaatataatggagggcggaaggaagaagatgaatcttacaggtgggtcccacgtgtag

SEQ ID NO: 4977 - DNA, 281 bp, Oryza sativa
  Clone ID: PAT_MRT4530_1180C.1
gcggcaacatgaattgcacgcaaatgtattcaaggattgtttaactctatgctgagcacaatgagctccaatttgctgagcctggagagtcttattggtgtgggaacaaccatggatcctaccttgtcacgtgctgatagactggccggtcaggttctatgagaaaggaggtcacttgctgacgtatatgtggtgctagagatcaacttattccttcttaagaggctgtcgggtgtgaggacaaaaagtactgtgaaagctggaaaggtctccatgctcac

SEQ ID NO: 4978 - DNA, 108 bp, Oryza sativa
  Clone ID: PAT_MRT4530_11810C.1
atggcggcgccctcaaccgtcgctccacttgaagtgtcattcgaacaacgccggcctgataaggacatgtggcgcggggttactctgctgcggctgcaccggacgtag

SEQ ID NO: 4979 - DNA, 1455 bp, Oryza sativa
  Clone ID: PAT_MRT4530_11811C.1
atggcgcgtttcgtggtggccggcgcgtcggagtacctggccatcacgggctgggggatcgacgacgtgaagctggcgaagaaggcgtgggtgttcgcggggcagaagtgcctcaagttcgacgccacgccggtgagctacgacatcgacgtgcaggccatgagctccgagaagctgcccttcaggctccccgccgcctacaccatcggccccagccccaagatcaaacggaaccctgtggtggacggaccggcgccgccggccgacacacaacggagactggaggattgcgacgaggaagcgatcagatcaccaaaccacgtcatcgatctcgtgaagggtgtcatcgagggcgagacccgcgtgctcgcctcgtccatgaccatggaggagatcttccagggcacaaagaagttcaagcaacaagtgttcgaccaggtgcagcttgccctcaacgagcttggcctctacatctacagcgccaacgtcaagcagctcgtcgatgacccggattcacccggcaacgactacttctccttcctggggcagaagaggcaggcggaggtggagggcaaggcgaaggtggccgaggcggaggcgcggatgaagggggagatcggcgccaaggagagggaggggctcacgcttcagaacgcggcgaaggtggatgccgagacgaaggtgctgtccgcgcggcagcagggtgtgggctgcagggaggagatcaaggtgaaggccgatgtggaggtgtacgagaacgagagggaggcggacatcgcggcggcgcgggcggcgctagcggtgaagaaggccgggctggacaagcagtccaaggttgccgaggtcgaggcggtcaaggccgtcgtcgttcgcgaggccgagctgcagctggaggtggagcgcaagaacgcgctgcgcctcaccgagaagctcaaggccgagaagctcagcaaggccaccgtccagtacgagacacaggtgcaagattcaaacgcggcgctgtacgacaggcagatggcagcggacgcgacgctgttcgagcaggtgaagtcggcggaggcgcgcaaggcgcaggccggcgccaagttcttcgagcagaagctggccgaggacgcgaggctgtacgcgaggcagcgggaggcggaggcgctggccggggtgggcagggccaaggcggagctcgtggcgtccatgctccaggagctcggcggcgaccacggcgcgctccgggacagcctcatgatcgacggcggcgtgtacgaggaggtcgcgcgcgtcaacgccagcgcgatgagcggcatccagcccaagatcagcatcaggagcggcgccggcggcgccaacgccggtgctagcagcgcaggcgcggtgcagcaggtggcggcggccgacgtgtacgacatgctgccgccgttcctgcagtcatcagggggatttaacaaattgccactatag

SEQ ID NO: 4980 - DNA, 451 bp, Oryza sativa
  Clone ID: PAT_MRT4530_11812C.1
tcacgtggatttggcgatggctccgcacgacggctgacggcgctcggcggcggggacttgcgcggcagcagggacggggactccgcaggacgcgacgatgacgacggtggctgcgggcctgcggccgcacccgacgggagtgggggcttcgcgcgccaatggctcggcggcggcttcgtgcttccctcgatcgatgccgtgcctaaagctcaggcagcagccgagcaggacgggctggacggccgacgatgccgccacaagacgggaggagtcgattgagtggtcgctaatcctcacagaattggagatgatgattcagcttcgatgggagctgatgatgacaaagcatgatgaactaccaaaagacagtagcagaatgttaggatgtatattagcaacaaccattgtctctaaccaacaagcaaaaggaaaatatggtaaaaaggaatga

SEQ ID NO: 4981 - DNA, 324 bp, Oryza sativa
  Clone ID: PAT_MRT4530_11813C.1
atggtgtctagattattgggtatcattatttggggttatatgctgcggatgaaaggtgggccgctgatggtgacagctcggtacgaactttattttatatcttctaatcatccgcacggtgcggagtgggttccggcggcgaaatccgacgggggaggggtggacgaggtggcccgctcgacggcgaacgcgacggcgtcgacggcgcggcttggcgcggcagctagtggcggccagagcaacggcggaggcggcggagagggtgtgacacaatctaaccgcctttaccccactggtctgaccggtccgatgccgtcggtctga

SEQ ID NO: 4982 - DNA, 438 bp, Oryza sativa
  Clone ID: PAT_MRT4530_11814C.1
atacgtcttattagctcctgagagtgaatcccctatagctgagcgaatctatgaagaaaaagtggctcgccaacccgagagtggaggaaaggagaggtgctcgctaggcccccaagagagggggagtagttagcgtggtgcttgcacattgctatggtgcgtgtcaagcagcgtgagacaagttctttccctctgtgtctaagagccacaacctgctgctattgaactgggacttcaccgtcacaggcgccgggaaggacaactactagtacacttacaggaggttcgcctacgagcttatcgcgctgatggaggagcgcaccttatgcgcgtcatgcgcggctgtgttggcgcactacatgtacgccatggccggctgcatatcctcccaacggagacctcgcctatgtacacacattttgctggtgtgcgccttcc

SEQ ID NO: 4983 - DNA, 669 bp, Oryza sativa
  Clone ID: PAT_MRT4530_11815C.1
atgcacacggatacacgtgtcacatatggcttcacgctaaacactcggtcaaggtcaagcataaagcaagaacagtcagaggtctccaatgtccaatctccattttccaccggcatgatgcaacaagcagcagcagcagccgaagcacacggctccggtcacccggcggcgtccatggctgacgacgggaaggaggaagcagtctcggcggcgtggcacgggtcggttcgcgccgcggtggaggggccgacgccggaccaggcgtgggcgctgctcggggacttctgctccctccaccggtgggtaccctcggtgcagacgtgccgaagggtggagggcgccgagggccagcccgggtgcgtccgctactgtgccggcccggtgaacaaggcggcggaggctgtggccgggtggtccaaggagaggctggtcgagttcgacccagtcgcgcggcggtacagctacgaggtggtggagaccaacaaggggttcggccggtacgcggccacgctccgggtggagcccgacccggccgggtgcgccgtcgcgtggtcgttcgaggccgacccggtgcggggctggtcgctggaagggttcgtggggttcctcgacgagctcgcgcgcggcgtcgccaggaggctcgaggaggagatcatgtcgcggaattag

SEQ ID NO: 4984 - DNA, 291 bp, Oryza sativa
  unsure (1)..(291): unsure at all n locations
  Clone ID: PAT_MRT4530_11816C.1
atggcagactcgtgcttaacccaagaaacagccttaaatcaactgggtaaaaagcacaggagggcacaaaccngacccatttcccagcgcaaaaagaagacggatacttttaaagcaccacggatgattgcagccggctgccaagaaacccgaatccgactcccacgacccaagaatgacccgggggcagcaatgcagggaaggttggggcaggaaagaaaaagtgcggggaggaaggcaggaaagtggggaggagagaagagggatggcggatttatgggttttctctaa

SEQ ID NO: 4985 - DNA, 258 bp, Oryza sativa
  Clone ID: PAT_MRT4530_11817C.1
atggcacggggctccgctccgcttgatggtagcgtgctgccgccttcccgcatcgtgagcgagagacaggtcgggctgccgcgccgcttcatgccggaatctgccaccggccgggagatagtcacgctgggcgagggacgctcggcgccacgctacccggggcgtcctcaattggctcgggtcggggctagtgcctggggagatccacatgtcgagactggccaggccgggagcgtggtgaccgagggttatgggtga

SEQ ID NO: 4986 - DNA, 282 bp, Oryza sativa
  Clone ID: PAT_MRT4530_11818C.1
ttttgattaatttcagagatagagtgagtgctcacacgagtgttgatgcataaacatggttgcctctgacatggcttctatgcttctgaaaccatctgcagctgcattactagaacgttcgaagcttcgagggaaagggacaatggcaaggccatctgtgatcatagcggccaagaaagcaaagaagactcagacattcgagccctatgggcctgctggaggagtcgcgtccatttcaggggtgcgcatgcttagggccatcgctctgcagcttcaccagct

SEQ ID NO: 4987 - DNA, 627 bp, Oryza sativa
  Clone ID: PAT_MRT4530_11819C.1
tcaaataacggggcgctgctgaatgcggaggtctacattggctgaagacacaggaggtccactgatagtgcgtatgctgtttttcttgatgaatgcatgactgccgcgaaacacaactatggggcgagagtactcattcagtttgaggataatgcagaccattatgcatgtgaactccttgcacaatatggaacaactaagcttgtattcaatgatgatattcagggaacaggttacggggacctttctgagcttgctgcaatactaaaattatgtgttgattgattgcaagagcacaggcacctgtgcctgtgagctgaataggctgggacagacattgcataacttatagttatcgagatatcaagacacaccaaagcaccaattgaagagcgccgcaagaaaatagtggctagctgatacaaagggcttgattgtcagatcacgaaaggagacccttaacacactataagagaccatggtcccatgagcatgaacctgttggaaagctcttagatgctatgaaaactatcaagccaacagtattgagtgtcacatctgtgacggtgcaaactctcactcaggaggatggtgaagccatttcctcattcaatgagaggcctgcca

SEQ ID NO: 4988 - DNA, 365 bp, Oryza sativa
  unsure (1)..(365): unsure at all n locations
  Clone ID: PAT_MRT4530_1181C.1
ggcgatggcgcactcgccgtcgggatcggtcgcggcggcggcggcgggagaggaggagggggccatggtggaggcggcggcggaggacggcggcgccgagtccaggatcaccgcgctcctcttcgacgtgtcgcagcaggtgcaggaggccctgcaggggatgctgaagatgacgggggagatcgagcagtgcggcgccgagatcnaggcggagatcgagcgggccaaggaggccgtcgccgacaagggcagggcgctcgacgacgaccgcgagaggttccagaaggccgccgtcgccgcgctcaacatcctcagcggcggcgctgccggcgacatctgatctcatctgaccacggtggcgcgat

SEQ ID NO: 4989 - DNA, 451 bp, Oryza sativa
  unsure (1)..(451): unsure at all n locations
  Clone ID: PAT_MRT4530_11820C.1
aattacgaagatttacancacatggggccaatacatacgggtgttttaagtacagtaaccaatccgcttattacttctttactctcaagtctaatctgccaatacaacatanagcctacattaagcacactaagctttatttcaacaaggcattatacaacatacaatattacagacatcaacgaccagttttaagcttattatcgatattttcaacttttaatttgcaaaaaaaaaatattttttttttttatatttttcacaaccccccccgaaatttccccctataatttttttgcctacaccccccctccctccttttaaaaaaaaaacaccaccccctcaaaaaaccttttattttttttaaaaaacttgttaaaaaaaacccnccccccttttcttttttttttttcccaaaaantattttttttcccaaaaaattctttttttt

SEQ ID NO: 4990 - DNA, 2139 bp, Oryza sativa
  Clone ID: PAT_MRT4530_11821C.1
atgggggcgggacacagaggagggagcggcgaacttcgtgagggagcaggagagaacttcggcgaactccctccggcgcaggagggtctccgcggcacccccattccatcacctgccatgaaatacacctttcttctcttcctttgccttgtatcctttgtcacttctagtgagcaccagtttgtcttctccggcttcaccggcagcaacctcgtccttgatggtgccgccaccatcaccgaagatgggctccttgagctcaccaatggcgcgaataatatcgaaggccatgcgttctacccaactccgttgcgctttcgcaagtcgccaaacgacatggtacaatctttctcggtttcatttgcgttcagcatcctccaaaaatatgccaatcggagcaacgatggcatggccttcttcatagcaccaagcaagaacttctctgatgcatcattgcctgcacaatatttgggcctcctcaacaaccaaaacaatggcaatagaagcaacgatttgttcgccgtcgagctcgacaccttccaaaacaaggagttccaagacatggatgacaaccatgtagggatcaatgtcaacagcatgaagtccttggatgcacactatgctggtttctatgaagacaggagtggcatcttcaggaaccttactcttgtcatccatgaggcaatgcaagtttggtttgattatgatggtgatgccaagaagattagtgtcaccttggctcctgccagattggccaagcccaagagacctctactgtctgtcacctacgacctctcaacggtggttgcagattcagcctacatcggtttctcagctgcaactggaggtgtagtcaacacaaaacactgtgttcttggatggagctttaggatgaatggccctgctcaagctattgatatctccaggttgcccaagctgccaaatcttggcagcaagaagtcccattcttctaggatcttggtaatcatatcaccggtggcaaccgctgtattgattttccttgttggtgttctccttgttctctgtgtacggaggcgactcaagtacacagagattcaagaagattgggaggttgagtttggtccgcatcgtttctcatacaaggttctgtatgatgccactgaaggatttaaggataagaacttacttggtgtcggaggatttgggaaggtgtataagggagtgcttccggtgtctaaacgagtggttgccgtgaagtgtgtttcgcatgagtcgagccaaggtatgaaggagtttgttgctgagattgtcagtatcggtcaacttcgacaccgaaaccttgtgcagttgctcggttattgtaggaggaaaggtgaactccttctggtctatgactatatgtcaaacggtagccttgacaactatttgtattgtgatttgaccgagccaacattggattgggcacagagatttaacattgtcaaaggtgtcacgtcaggactactctacctccatgagaaatgggggaagattgtaatccaccgagatatcaaggcaagcaacgtgcttcttgataaagatatgaatgcacgattaggtgactttggcctctcaagattatatgaccacggaaccgacccacaaactacgcacctggtaggcacaatggggtacctagccccagagctagtgttcacaggcaaggcatctcctgccacagacatatttgcctttggcgtattccttctcgaagtcacttgtggacaaaggccactcaacaacaatcaacaagataatcaacccccaatgctggttgattgggtccttgagcactggcagaaaggattactgcctgagacagtagacaaaagattgcagggcaactacaatgttgatgaggcatgtctagtgctgaagctaggtctattgtgttctcacccaatcgccatggaaaggcctaccatgagtcaagtccagagatacctcgacggcgacgcgccgctgccagagttggcaccgtcggagctgaagttcaacatggtggctctcatgcagggccaaggcttcgactcgtatgtcttgccatgtctgtctttgtcgtcggtggtgagcattgaaacctcacccgaggtagacgatgacactgctagtgtttga

SEQ ID NO: 4991 - DNA, 2426 bp, Oryza sativa
  Clone ID: PAT_MRT4530_11822C.1
gctcgcgcacgccccccccgcgcgctcccggcgacgggaataaaatcccccgcgtctcctcttctccccgcgcaactcgctcatctcatcgctctcgcctcgactcgcctccacgaagcccacctcgactcgccatggccatggacgacctcgccggctcatcctcctcctcctccgcgatggacgccgtggtcgccgacccctcgcacgggtggcagaaggtcacctaccccaagcgccaccgcaagcagggggcggcggcgctgccctccgcggctgctcccgatctggggttcctgcccaacggcggcggcaaggtcaacgtgttcgaggccgtcgacaggaacgccgagaagcgccaccgcgcgctcctggccgccagggacgcggccgaccccgacgccgcgcggatcgccgccgccacggcctccgcgtactctgacgacgacgacgactccgacgaggcgcaggcgactcgccccgagggggaggtgaagaagcccaaggtgaagaagccgaagaagcccaaggtgacggtcgccgaggcggccgctctgatcgacgccgagaacctcgcggcgcatctcgtgcagatctcggaatcttacgagaaccagcaggatattcagctcatgcggttcgccgactactttggcaggtcatttgcaagcgtgagcgccgcccagttcccctgggcgaagatgttcaaggaatcactagtgtccaagatggttgatattcccttgtgccatattcctgaaccagttcgcaacacagcgagtgactggatcaatcagagatctcctgatgccctgggagactttgtcatgtggtgcatagacagcatcatgtctgaactgtcaggtcaagcagtaggcgctaagggttcaaagaaggccgcacagcaaactccaagggcccagggccctgaagattgcatggtggttgcaatatttgttgtgcttgccttgactgtaagaaggaaaccagaggtactaacaaacgtcctgccaaaaataatgggaaacaataagtatcttgggcaggaaaagcttccaatcattgtttgggttattgctcaggcatctcaaggtgacctagtgactggaatgttttgttgggctcatttcctgtttcccacactgtgtgctaagccaagtgggaatccccagacgagagatttagttctgcagttgctcgaaagaattttgtctgcccccaaagctcgaggcatcttactgaatggtgctgttagaaagggggaacgcctgattccccctgttacatttgatctgttcatgagagctgcatttcctgtttccagcgctcgtgtaaaggctacagagaggtttgaagcagcctacccaacaatcaaggagttggcccttgctggtcctcctggctcaaaaaccgtgaaacaagcagcacagcagcttttgccattgtgtgtgaaagcaatgcaagaaaataacgcagacctcaccggggagtctgctggtgtattcatttggtgcctgactcaaaatgcagagtcctacaagctgtgggaaagacttcatcctgaaaatgttgaagccagtgttgtagtccttagcactatagtcacaaaatggagcgagctgtctcataagctcagtgctgaatctcttaaggtgactctgaagaacttaaggactaagaatgaggcggccctagaagcagcaacggactctggaaagcaggcatctatcaaggccgcggacaagtattccaaggagatccttggaaggttgagccgcggcggagcctgcctgaagggcagcctgctggttatcacgcttgctgttgccgcaggctttgtgctatctcctaacctggagatcccatccgactgggacaagctccaggccatggtggcgtctcacctgtcgttctagaagtatatttgtccagcagttgataaaagcttatacagagaatccaaaggagatgaagtgaagattctaggagtgaatgaagaaggctaataagaagggatagatcctagaaaagaatacagttacctttttcgcatcttttcccaagcccgtagttggggggagatgcaagcaactttgcagagatagagagttaaaaagttttaatcgggttagactgatcggtcagaagaaggaaaggttgggccaaatggttcggcctgaggactaacaccacctttgctctatctcgtttttctgcatctgcagcatctcagatgatgagaaacatttttgcttcttttgtttttcctttttcttctgaatcttgtttgcttttaccaacatgccatgtgtgatattattgctgaatcatctgtacttgttggtgttgatgatatcatatcctgctatgttgtggtgtacccgaaaaaaaaaaaaaaaaaaaaacctgcagcccggggatccact

SEQ ID NO: 4992 - DNA, 2625 bp, Oryza sativa
  Clone ID: PAT_MRT4530_11823C.1
tcacaacagaacgaaaagcgttgttaacttgagtgtggggttgttgggattcatgttgaccgcttcccggattgcagcttccgcagcgttcacctcccatctgttggcgtcggaataattgacgcaaacatctaaatgctcaactgagatcttctccagtccaaagtcgaaattaccaaactgatccactgttttccgcactccaaatccaaagcgtagtttttggagcttttgcatgggtccttgtgcaaacgccacctccatgttgttagccatcagtttaagaaatgttagacagtggaatggataacaattgtcgatgaccaacctttcatgtctgtcttgcgtgggctcattcacccataaggtaagatcactaagagatggcatgttcccaaggatttggaggtccttatgccccaatgttttcaacttgatgtctagggatgagaggaaggacaatgaggacatccagattggtactgaattggccacactcctgttcatgtcgatgtcttcaagctgttgtggtcccggtgataaattctcacatttggaatccatgactccctcatatacacgtacggttattgatctgagattgaccaggttggataggcacaactcaaaagatttctggtagctctcgtcccattcatgaaatcgtattgacaaatgcctcagcttggtcagaccacccatattgcgcagcatggttggagacatgacatagatatgtggccatatactttgtagagttttcaagttcccaaaatcatccggtaatctcatcccagggccaacacacaggtccaccaattgttgtaattgcacaaaggttgatggcacttcccttagtctagttttagttatgtccaataccagcaagaactgtaaattaccaatctcttctggaatctcagatatagatgtcctatgtagattcaaatacctcaagtgaagcgtattgcaaatatccctacaatgacgattatccacttgatcacaaccacttaaatccaacacacgtaacaccggaaagctcgaaaggtttggtaacagactgaatgcttgcttggacacaatcagtgatctcacatgggataggtccgcatttgaaattagcttgaagtactcttgtttgatagattggagggatagtcggcggatcttgtgaggtactagcattggctgctgatcacctaatgatgtcataaattgctcttcgttcgacaagaaggtgatgaggtcaagcaccatatcatgtagacaataatcccatggcatgttatcacaattagatattggctgtatcaagcttttgttccagagctcatttaaatactccattccaacaacatgcaaagtcttcatgtgttcagcacgcacaaaaccttcacatatccatttccatatcacatctttgttgccaatgttagtatcctccggataacagcttaggtacaataaacaagccctcaaatgtggtggtaaattatagtaactgacagacaatatctttctcatattattcacatgaagattatcttctagcccagaaccaatagaatggtacaccttggaccagtactctaatatattatccctatcgtttttactggccagtagactagctattgtaatgatagctaatggtacaccaccacatttctttaaaatgccttcagacactacagctaattgaacaggacatctgccttcagcaccaaatattttttggtaaaacaactttcttgaaacagcaggagaaagaggttttagttggtaaacacctccaacttctttggcaacatcaagaatctgagttgttgtaattattttacttccacattcatttccaaggaaagtatatttgattgtttcccacacaacattactccatatgtcatcaataacaataaaatacctcttgttttgaaggaattcccgtatttcgttgataagttgtgcttcaccccatgatgctttggtcacgtgactgtatttttccttgtctagttgacagagcatgttgctgaaaatcttctccatgttggggttaagtgacatggtaacaaagaacccacaagcgaattgtactttaagcttttcatacactactttagctagtgttgtcttgcctaatccaccaaatcctacaatagagactatcttcagttcttgcttgtccccctccattagcatcttgactagctcgtcgctcttctcttcgatgccaacgagttctgtcatcttcttgtacaaagctgataggcgaaggctatcaacagttggactaaatggtacggtaacaacattgtcaaccttgtatctatcacgacgctcactaatctccttaatacggcttttgatgtctttgatatcggtgccgatggaatggcggatcttggcctttgtcagcaggtctaggcttctatcaatgaagtccctgaagctatgcagcttgtgaggtgcggcatgggtgtcaatgcgcaccatgaacttgtcaatgctgtcctcgatgttgtaggacagctccctgacgttcctcgcccaaagcttgacttgattattaggcggctgatcaattggtgcctcagagacatcaagcagcgctgcctccat

SEQ ID NO: 4993 - DNA, 1163 bp, Oryza sativa
  Clone ID: PAT_MRT4530_11824C.1
tggatccccgggcgggcacaatcggcccaatccacccgcggcggcgatctctctctaccccgatctcctctcgccgtcggcgtcgcccgggtcgccgccgccctccgccgcgcagtccgcagctagtaggtgggggggttagccttagcgtgagaggcctttgccgccggctgcgatggcggaggagctggtgctggacacggcgatccgggactgggtcctcgtcccgctctccgtggtgatggtgctcatcggcgtgctccgctacttcgtcgccaagctgatgcgctccccgtcggcgtcgccctcccccgaccccaagctcgtcaaggaggggcaagtggtaattagggcgaggaacctgaggatcaattcgcagtacatcccggccaaggccttcaaatcacgcaaggtttattacactaacgaggaaaacggattgcttcatgtcccgaaagaggaagcacagaaagctcaggctgccatgttttcagatccaaacatggccatggacatgatgaagaagaacctctctatgatagttcctcagacacttacatttgcatgggtgaacttcttcttttcgggttttgttgcagctaagattccctttccattgactccgcgattcaggggaatgctgcaaaacgggatagacctgagtactgttgatgtgagctatgttagcagccgttcatggtactttctcaatttgtttggtttgaggggtctcttcagtctgatcctcggtgaagaaaatgctaatgatgatgcacaaaagatgatgcagatgggtgggggatttggcggtaatcccacaatgggtttggccgcagagaaagacaacctggatataatccagcatgactgggctttaccaaagatggagcatcatgctgaggaagtgctgaggaagcttctgaagaaatgataggaaactaggctgctccaatgcattactacatcttgcaaaatttttgttttaacctgtttattgaccagacagttaaaactttgtatctgtataacttatggccaagaatttccttcagaaagtttatgtatcatttttctgttatacggaccacagccaggctcaatgcagaatgaacaaaaatcttttttcttggcaaaaaaaaaaaaaaaaaaataagaataaaatt

SEQ ID NO: 4994 - DNA, 255 bp, Oryza sativa
  Clone ID: PAT_MRT4530_11825C.1
atggagagaggcggagcggcggcggctgccggcggtggcgtggtggtgtcgccgtcggcggcgaaggattcgtggccggagttggtcggcgtgtcgtcggaggcggcgaagacgaagatcggagaggagaggccggagttggacgtgcaggtggtccccgccgacgccttcgtcaccacggactacaacgccggccgtgtcagggtcttcgtcgactcggacgacaaggtcgccagacctcccaagatcggctaa

SEQ ID NO: 4995 - DNA, 318 bp, Oryza sativa
  Clone ID: PAT_MRT4530_11826C.1
gccgtgttttgagtcacctatatcctagccctgctgaggcgccgctgcgccgccgttgcgatgcggcgtcaccgccaccgtgctgaatgaacgcagtatcgaaaccagttcgaccagccgatgtgcaccaaccgaacgcgtgactggcagcatgatagcctcagcacgtaaaccgccagatgtgccgacgcttgctgaccagttccgtcgttcgagacgaggacgatcttaccaccatgtacatggagactggcgctgaagaagcacgcgccgcgtgctgtcttggaatatcatgaacctaccgcgattggtgaggac

SEQ ID NO: 4996 - DNA, 109 bp, Oryza sativa
  Clone ID: PAT_MRT4530_11827C.1
agaacagtgcatctctcaaatccctacacatacgcaaagtcaatgtccttagaatctctccaacccagcatgcgagacctaacctccctccagaaattgactgctatct

SEQ ID NO: 4997 - DNA, 1365 bp, Oryza sativa
  Clone ID: PAT_MRT4530_11828C.1
atggaggacgacaagacgacccaagaatcatcggcggcggcggcgccgccgctgaggagcctcgcggactacgccgtcggccccatcccgaccctcctctacgtccccggcttcatctccgacgccgagcagtcccagcttctccaccatatttaccaggcgccagcgcccaagtggaagtcactcaagaaccggaggctgcagaactggggaggagtggtgcatgagaaggggctcctgccgcaggcatgggaggactttacagatccccaaaatgcacactctggagagtcgcaggcaactacaacagagagcaatggttcccataatcttgaaggtgcaaatgaaactgaccctgcttcttcatcacttcttctgatgccgtgcagcctgctgatattcaaagatcaggcttatacagactacctgcatggaatacaagataatgagctacaaaacctagacaaggtcgccaatatgttacagtgcccagaattcaagcatctaaattctggtgatgggcaggggaacacagatgagtcttgcagccttgagcaaagtggcgtctaccgtaggactgcgaggagagtctcgctaactgcgtccaaaagagaaggttctgaaagatccaaaggagatcaccagtttgaggtgaagaaacccaagacccctaacctctacataataacacctacacgcatcccatctttccctgatcgatccatccaaccaaccatggccgccgccggcggttgcttgcttcttctgctgctcggtgtggtcgccaccgtcgccgccggtgagtgcaacgacgacgaagaacttgcacgccggcgtaagtacacatgtgcaggtccggcgtgcgagacggcgaggtgcggcaaggggcactgcgtggaggagccggggccgttggggctggacgcctaccgctgcgactgcgacgccggctggtccaacatgttgaagctcatcccggcctcgcctttaatcaagcttaatttaggagcgatggatttaacaagcctcgcaggcaccgttgacagcgcgtgcttcaacaccagcatctctctgcccaacagcccaagggcggcatcccgctcactgacattagaaaaaagatattcgctccggtccaacaaaaagtacctcgaaatatcaatacctcacgcttgcgttgcggtcaactgcgggccgggagggcagcgcgtgaaggaggaagggttcagctaccactgcgcctgctcgccgggattcgtcaacatgctcaacctcaccgagctcccctgcatcaagaattgactgcgccgctctgggactctccccggcgagcacaccggcaccggcgccgacaccggctggtaa

SEQ ID NO: 4998 - DNA, 401 bp, Oryza sativa
  Clone ID: PAT_MRT4530_11829C.1
agaacaaacatatttatctctttaatactccgcaaactgtaaatggctctacagactacactaaaacattaacagagttcctaaggaaatatgtcttgtcaaacatgccagtaacttttggaagattttacaaatgccacattggtgtaaactacaaatgtacaggccaccagtaaggtcgtgtaaccgattataccaaagaaaaacacatcaaggtgcacatacaacaaatatgactttataagtgagagtgaaacgtgaaacaatttcgctccctagccctatctgatggaatactgggtgcatacacaattgtcaaggatgatgaatgaggcaaggaatcacacacatgtttgaactctgcttctccattgccttcgacaggctgccagccctagcaa

SEQ ID NO: 4999 - DNA, 183 bp, Oryza sativa
  Clone ID: PAT_MRT4530_1182C.1
aaatgtgtgtgttgtgcccgggaccccaatgttgattaaaaaataaggtaaagaaccttggggtcccccactgcccccccccagtgaatatgaatgccctgggaatgcttgtccgctcctgccatttcacactggaatgatttatggccctgggttatattttggtgatgtatggcccccatc

SEQ ID NO: 5000 - DNA, 1560 bp, Oryza sativa
  Clone ID: PAT_MRT4530_11830C.1
ctatggttcatatttttttttttttttttttttttttttttgaatgggaatgtgttgactttattcatgttgcaggatctgaccaaggtcttcagcatttcccaatcaagaagacctcaagtacaaaaggtacatggaaatatgaattttccagcagaagctgggatatactctagtgaatttacacatattacagaccttatcttcattatatatctatttaatattcacattcattcaactaggtgcttatacgaaatatgaccttacactataatttatacaatttaaaaatcaatatatgaattgaattcttcaaacccatatgcctggcatgcaatacagaacgcagcagcaggagtccctttcagccaggtttgttcaaagtgtggtaaaattgattttggagcatttcatcactcaaggctttggtactctgctccttccctaggccacaaatcctgatgaagatgaagaaccatatatctcttccgcttgcgccaccggaacatacaccacgtcggtcaatgagctgtgggtccggccgtagaaaatgtacacaaatactcccatcaccagccataccccaactctcatccatgtccctccacccaagtttactaacaagtactgtgttcacagagggatggcacatttccggcaacagggcagagagataggaggctctgcataccccagagctaacaatgcagctgccactccagctatcaggaagtgataagtgtcgaatgccgacccagcatgctcccgagcaactgttcccacaagaacatatactccagctccaattgttgaaccaacaccaatcgcgacgagctgcgtaacggagagctccttggcgagctggtggccgccggcggcgcggacccggtcggagtccacctgcttccgccgcatcagcgccctcatcgcgccgccttcctcgagccccatcaagatcctaccccggggaaaccgtggattcacaccccaagaagccgccaaaaaggcgcgatcttttttttttctttttctttctcacccgcacacggctcgatcagcgagcggataacggcgagccgccggagctcgtcggcggcggcggagctagctagctccccgcgtgctcctcttgctgctgctgctctctccctttgcttgagctatggggattctagaaatgccacgggcaacagctgatccgccgatggtgtattccagtatcaatgcccaaccaatcagccatgcaactccttcgccaacgcagatgtacgaataatggtaggcacttcctgcagaagggcagcgactagcaagctctgcataacagaaagctgagagtgcagctgccactccagctatcagaaatgaaagtgtcaatgccggcccagcatgctcccgagcaactgttcccacaagaacatatactccagctccaattgttgaaccaacaccaatcgcgacgagctgcgtaacggagagctccttggcgagctggtggccgccggcggcgcggacccggtcggagtccacctgcttccgccgcatcagcgccctcat

SEQ ID NO: 5001 - DNA, 327 bp, Oryza sativa
  Clone ID: PAT_MRT4530_11831C.1
tcatgcggtttgggcgcgagggcgcgagcggaagaggccggaatcgtgggcgacgtgggcggcaatggcggcacagcggtttggatgagggaggctggaggtagaggaagggtctgacaagcgggtcccacggccccacttgtcggcctgaggggagggaggaggcgcgcagggacgcaaagcagacttggggaggggaggcgcgctgggccggcggcccgaggagagaaggaaggagggggaggaatttgggccgagcccgaaagggaggaaggggaagaaaggagaattaaatttgtttttgatctgcacattgaactgccacat

SEQ ID NO: 5002 - DNA, 470 bp, Oryza sativa
  unsure (1)..(470): unsure at all n locations
  Clone ID: PAT_MRT4530_11832C.1
gacaagacaatgttacccggccatcactcaatattgcaataattactgtttcttattccaataacttcctaacaagttttggaataaacaattacagattaaaaaaaaagaaaaacatactattggaataaacaattacagattaaaaaaaaagagagaaaaacatactaactcgacaggcaagactgcagttagctggttgttagctctagttgcccacattcatgttccaggaataaataagtggtaccaaacaatgcattggttcatcagccttccttcactgttcactcttgcaaattctcttgtttgttgaataattcttttgtatcgncatgaagctcgggcaagaaaagtacgacatatggtggcaacccaactacaaggaagtcagatcatagctgagtagttcatggtctcatgcctcaacaacacaaaaaaaaaaacacctttgagttcttaaaacacat

SEQ ID NO: 5003 - DNA, 508 bp, Oryza sativa
  Clone ID: PAT_MRT4530_11833C.1
tatgccattcttgttatcacatccagttgagtgcatctcacgggcattcaatcttgggcgtgtcttcatccatttctggtctgtaaattttaaatttgtccctgagaagttctttgtatcaaaagagctagctgttgcattgttggttcttcacctcactactcttttggtctttgcacactacaagtggcttaagcatgagggtggcttgttccatttcttgcattccagattcaaagatgccacatcaattggacagttaatttttgccaagcccaaactgtcaactcttaacaaagaacatattgtaacggtcatgtttgttggaaatttcattggcatcgtgtgcgcacgatcattacactaccaattttattcctggtacttctattcactgcctttccttttgtggcaaactcgttttccaacatttgtgagggtcattttatttcttgctgtggagctctgctggaatatctatccttccactgcctattcgtcactgctg

SEQ ID NO: 5004 - DNA, 522 bp, Oryza sativa
  Clone ID: PAT_MRT4530_11834C.1
gttggattgttggtcaacaataggaaagagacgcgggggggggggggggagaaagaggacaaaaataaaaagggtaggggaggcggttagaaaaaaaaaaaccgttaaaaagggggcacccatggaaggagggacaaaaaaggcaaccgggctgggaaaaacactcttaagaacgggggaaaaagggatgccctcaggaaaagcaacaattggaagggggggagcaaaaggaaagggtaaactaacctgaaaaaaatcattaacaggggaccaaaaaaaacagggggggggatgaaaacaccaatggaaagctaaggaaaaagtccaagaaggggggaaatggtaaaagggggaacaaaagaatcagttgaaggaacagaaacaaagggaggaatttaaacaagggaaaaaaaaaaaaaagggggaacaaccggagaaatgggattggtgaatgggaaaaaaaaaacgaaagactggggccgaaactttgaggggggaaaaaaaggaaaaaaaaaagaaaaa

SEQ ID NO: 5005 - DNA, 1211 bp, Oryza sativa
  Clone ID: PAT_MRT4530_11835C.1
atggcccccggtggtggtgtactgttcgccggtacgtccgtctgctcggaggaggggcaggatgaggatgaggagaccattgtggaaagtcgtgcttttgagcaaagagtaaacttctgggagcagcctaatcaaagatgggggcggctgggcaggggcacagccgaacctggccatggaggaccagcacaggtcctcgcctctagcggccgtcacgtgatgatgagatgtgttggaagggatggagatgatggcctccgtcgaagtgagaatgtggcggccgagatagttgaggaggagaagccttcaccgctcaatgccctcaaccgcctccgcctctcgagctccttcgccccaccgctattgtcctcttcacgcgccgatgggggtagaggagaagccgcgcggccatcaaggagacacgcaccggcactaagcatgggttcgtcgtggacactcgatcagaacaaggtctttgagctggcgctggcgacatacggcaaggacacgccggaccgctgggaaaatgtggcgcgggcggtgggcggtggcaagacagcggatgatgcgaagaggcactataagaagctggaaaatgacatcggccgcattgattcaacaggtgccagcagcagcaactccaatggccgtagcagcagtgaggggcagaggtacctcaagccccagtgatggttggtgctcacctagggctagcctcaagctccagctagctccaccaacttcaatttccagcatccaacaagtaccctacatacactagattatatacataacatggttgtgatcgtgatggagacgacgatcctgctgctgtcctagctgctacaaaatctttattactccgatgacggatgacgacgacgatgattatgatgagccttcttctccagcttgctagaaggcgaattcagaagtaataaggagaaggggtccgagacatcatcaacctccccatggggaatactgttgtttgcgtctttcgttgtactgctctcgtgtctccatgtctacgtgtgtttgtagtattgtgacccacccacgaggcttgtcgatcgttggctgccggctggagatacgctggccagctgatggccgatgtacgttaattgtccgtcttctctgcatgtctaatctatcaaatatctatccagtttgtgctgtgctgcaaaaaaaaaaaaaaaaaaaaaaaa

SEQ ID NO: 5006 - DNA, 477 bp, Oryza sativa
  Clone ID: PAT_MRT4530_11836C.1
gtgcaatccaaaaccatctattttgatgtactcgatagaaaaattcacagaataaaacattaccatcaatcaccaaatatgactatgatcataaccataaacacccgtatacactcttagttaatcagtatcttaatactatatactcaacacaattaacccaatgttcctgaaacatccatgcatgatacacaacaatttagcatatcacgccttctagcacgtttcaatgcttacattgtccaccatgcctacacaatcaccttgcgccgtctcctacagcacgctattatgcaagaagagcacacactgttcctctttttgcacacatagcgagagttcaagaagcaacaagcatcaccccgccacttaaagcgtccacagatctccacagcgcggacatagaaaatgacccctttactgaacctcttcgtcctattgcatgacacaaatagagaatcggaagaggagaaaaag

SEQ ID NO: 5007 - DNA, 504 bp, Oryza sativa
  Clone ID: PAT_MRT4530_11837C.1
atggccgccgccgcccgtcatgtggcttcgtacatgggccgctttgctcctcggtgtggctacgccggcgacaccacctgcaccgccgccgcctggacgcggcctcagctgccacacgccccgtcgggcccactcgtcatcctccggcgcggcatcgcgatgatccccggcgaccactcccccggacccgccgacctctcccccgattgctttgaccctgaagctccagatgatccagccacctgcttcgcttacgacgagaaggacctcgagtcagaggaagccgtttgggcgctgtaccagcggtggtgcagcttccatgacatagagcgcgatcgtgatgacatggttcggcgcttcgtgtatttcaaggacagagcgcacaaaatcattgagttcaacaagtctggcaagtcttatacctggggtctcaatatatttggtgatatgacgccacaggagcaatctgaattggagcgtccaccgctccatcgaaggatttga

SEQ ID NO: 5008 - DNA, 596 bp, Oryza sativa
  Clone ID: PAT_MRT4530_11838C.1
gcacgaggcttggagtcatgccgtcgtggttggcttcgccgatctgatcttgattttcgggggttttccgatttttcgatcggtttctctccggaagtgggttttgtgatgtttgattttcctctcggtatttggggattttgtgattccgattggatcttggcggcttcgtttcttgatcgattttattttcggtgttcttggttttctgattattcgaggggttttcttggtgtattttgtggatctggatttttttttacttgtgacaatattttgggttagatctgtggggttctgaaatttattatccttcttctcctaatattgaatgaattagcatgttttgatatgttccaagtcagctaataagtgtatcagttcattctggttcgtagttaaactttcttccaaggatcgcaactctcttaatctaggaggatttccacaaatgtggttcttgcaagtttgatggtgtttagtgtccatctcagttacttctattatgatgtttgctgatgattagctgtgttgggttacccaggaaactgaagcaaagaagaagagattacagatggagaagctcaagaaacaga

SEQ ID NO: 5009 - DNA, 352 bp, Oryza sativa
  Clone ID: PAT_MRT4530_11839C.1
acggccactcatctctgcctaacctgcccgttcgccaagagcttctgggaaagaggataggaatcaatcctgctctctccaatgtccagaatgtttgcatgcttcagcctcacccaagactacctgtctaccttcaaagcaccacgcaattttctacctcctttgcttctgggctctttggaacaaccggcatgaccttgtcttccgaaatcggcagccttcactggacaccatgatcaggcgttgtagacaagaatctagactttgggcagaacgattgaaaatcgaagacaggtctgtaacggctcagtgggaacatgtattttcacctccctgtaactctgaaaaccta

SEQ ID NO: 5010 - DNA, 1551 bp, Oryza sativa
  Clone ID: PAT_MRT4530_1183C.1
atggacaacttgtacttgatcctcggtgcaatcctcgccgccgccgtcgtcccgttcattctgttccgcggcaatggcggcaagcgcggccgccgcctcccgcccggcccgccggcggtgccgttgctcggcagcgtcgtgctgctgaccaaggcgctgaccgacgtcgagccggagctgctcctccagaggctgatcgctcggtacggccccatcgtgtcgctgcgcatggggacgcgagtgtccgtcttcgtcgccgaccgccgcctcgcgcacgcggcgctcgtcgagggcggcgccgcgctggccgaccgccccggcgtgccggcgagcaggctcctcggcgagaacgacaacatcatcacgcgcgccgggtacgggcccgtgtggcgcctcctccgccgcaacctcgtctccgagacgctgcacccgtcgcgcgcccgcctgttcgcgccggcgcgctactgggtgcaccgcgtcatcgtcgacaagctggcggcgtccggccaggcaccccacgacgtcgtggacacgctccagtacgccatgttctgcctcctcgtgaatatgtgcttcggcgagcgcctcgacgaggccacggtgcgcgccgtcgaggacgcccagcgcgacctgctcatctacatcacgagccagatggccgtcttcgcctacttcccggcgatcaccaagcacctcttccgcggccgcctcgagaagatctacgccctccgccgccggcagagggagctcttcatgccactgatcaacgcgcgccgggagtacaagaaacacggcggcgagacgacgaagacgacgaacaaagagaccacgttggagcactcgtacgtcgacacgctgctcgacatcaagctccccgaggacggcaaccgcgcgctcaccgacgacgagatcatcaagctctgctccgagttcctcaacgccggcacggacacgacgtccaccgcgctgcagtggatcatggccgagctggtcaagaacccatccatccagtcaaagctccacgacgagatcaagtccaagaccggcgacgaccagccggaggtcaccgaggaggacgtccacggcatgccgtacctgagggcggtggtgctggagggcctccggaagcacccgccggggcacttcgtgctgccgcacagggcggcggaggacgtggaggtcggcggctacctcatccccaagggcgcgacggtgaacttcatggtggccgagatcgggagggacgagcgggagtgggcgaagccaatggagttcatcccggagcggttcctccccggcggcgacggcgagggggtggacgtgacgggcagcaaggggatccgcatgatgccgttcggcgtcgggcggaggatctgcgcggggctcagcttcgccatgcaccacctggagtacttcgtggccaacatggtgagggagttcgagtggaaggaggtggccggcgacgaggtggagttcgccgagaagcgggagttcaccaccgtcatggccaagccgctccgcgcgcgcctcgtgcccaggaggacgacctag

SEQ ID NO: 5011 - DNA, 460 bp, Oryza sativa
  Clone ID: PAT_MRT4530_11840C.1
atcagagtattgactgatgtttgaagattactgctgatatgaaaccgaatgaacctagctaaaaattaaccgttttaatctgaataacttcaaattttgttgcaaatgcaaggacaaaattgcatgatattttatctgagtttttcttggttatattatgagtatcatgagacatccaataggtgtggttaaacatataaacaatttaagcaagctagctgtgaggaaatgtagaagaaaatgcagagacattgatttggtatcgtagctagtgtttgcctgatttcagaatatatgtatggattgaaaagctactgaatcaattacaattaaaatcctatatctggtcctgtcatatatcataatattaccatattattgcaaagttctactctctgatcaatccctgacaatgcattgtcaagcactgcaatctcattacctaaatagctccaaactg

SEQ ID NO: 5012 - DNA, 1542 bp, Oryza sativa
  Clone ID: PAT_MRT4530_11841C.1
atgagggaagagagcaacaagaagagcaagctctcatggtccaaatcccttgtgaggaagtggttcaacatcaagagcaaggcaaacgatttccatgcggactatgatgctagccaagatcgagagatgatgaaacggtctcagacaatgaccattttattttcattttgctgtcttgctcagtttgggctgaatttgcttggtgatccaggaagaaatggtcatggagaccggatgccaaagaagaatgccgactgcattcgtcgaggaaggactgaatctgatgtgtcacgcctgactgaagttcaagattacagaatatttgcttcaacatggaatgtgggtggtaaatccccatcaaagggattagatttagatgagtggctccactcttcacctcctgctgatatctatattctaggatttcaagaaattgttcctttgaatgctggaaatgttcttggtactgaagataatgttccagcaaaaaagtgggtatccctcattaggaggacactgaacaggaatcctggggctagcagctatggtggctatcacacaccatctcctgtccctgatccagttgttgaactagatgctgattttgagggatcatcgagaagacatgataacttgtcatttttccatcggcgatcattccagaaccttagtcagagtttaagagtcgaaggaaattatatgtcatcacagccaaggttggaccgtaggttcagcgtttgtgacccagttagcttgggcggcagaccaagtgattttgatggaaatttcccatgtgcgggatcaccagatgatgaatatattgaggaggatggaagcaatggaacttatttttcaccgtttccatatggctacggtacctcaatagctatggaggaaaacgatgagcaaccaaatacctctaggtactgtttggttgccagcaagcagatggttggtatatttctcacagtttgggtgcgcagcgaattaagaaatgatgtgaaaaatcttaaagtctcttgtgttggtagaggtctaatggggtatcttggaaataagggttcgatatcaataagcatgtctttgcatcacacatccttttgttttatctgttgtcatttgacatctggagaaaaggagggggatgaattgcgcagaaattctgatgttatggaaatcttaagaaagactagatttcctcgggttcgtggtgctggtgacattaagtcaccagaaaccattcttgagcatgatcgtatcatatggcttggggatttgaattaccggatttccctttcatactgctcggcaaaagcactcgttgaaatgcataactggaagcaactgttggagaaagatcaattatcttatgttcgtggagagtcgcgcttctccgaccatagaccggtgtacagcattttcatggcggaggttgaaattatccgccagaggagaagaaatatgggctgtttcaactctagagttgaggtggaagagcttctgccatattcttacagctttggagacatcaagttcaactaa

SEQ ID NO: 5013 - DNA, 1315 bp, Oryza sativa
  Clone ID: PAT_MRT4530_11842C.1
gcacgaggctccggccacctcccacgccacgccacgccacgcttctcctcctccagatcggttcgcctcgccggcgatggccgaagatccggcggggtcccgccgctggcggtgcgacgccggcgacgagcacggctgttggctctcctcctccgccggcggcggcggcgacgaccacttcgaccgcctccccgacccgctcctgctcgtcatcttcaaccgcatcggcgacgtcaaggcgctcggccgctgctccctcgtctcccgccgcttccacgacctcgtccccctcgtcgactccgtgctcgtccgcgtcgactgcgtcatccccgacgaccccgcgtcctcgtcgtcgtcgtcgtcctcgccgtccgccgcgccatcctcccctacggcgtccgcgcgcgcgcgcaccgtcttctcccagatcgcgcgcatcgtgctcggcggcatcgtcaagcccatccaggcgctcggccagatactctcccccgccaactccgcctccgtcctcgcagcatccgtcacctcctccccctcctcctcctcctcctcgtcctcctcttcgccgccgcttcccggtgacgtgtcgcaccactcgccatcggaggtgctccgctccttcaaggagctacgccgcctgcggatcgagctccccgccggcgagctcagcatggaagaaggcgtgctgctcaagtggaaggcggacttcgggtccacgctcggcagctgcgtcatcctcggcgcctcctccgccggcaaggacggcggcgcgggagcagctcccgctgttgactgtggcgagtccgacgagacagggagtattccggagtcgttctacacgaatggggggctgaagctgcgggtggtgtggacaatcagctcgctgattgctgcgtctgcgcggcattacttgctgcagccgatcattgccgaccacacgacgctggagagcctggacctgacagacgccgatgggcagggagtgctcaccatggacaagtggcagctgcaagaactgcgggtgaagccggtatcggcatctgggggctcacacaggacgctgatgccagcgcttagcatgcggctgtggtacgcgcctcacattgagctgcccgggggtttggtgctgaatggagcaacattggtagccattaaaccaaccgaggaggcaacaagggacacggttgggagtgggattgctgggtctgcaggtggatgctgggtttcagatgcctttgaggagccgtatcggacagccgtggggatgctcctgaagcggaggacatatagccttgagatgaactcgttctaa

SEQ ID NO: 5014 - DNA, 1736 bp, Oryza sativa
  Clone ID: PAT_MRT4530_11843C.1
atggacctcgacaagtctacctccaacagtgcatccttgaagaaaatgcaggaggagggcactctccccggtcgtgggaccatggagagggaaccaggagagttgtttcttgacctcttccgtttttattacgagttgcgctggatggaacctaaaaaggtatccgggtgtgttggttttcgacttcgggatggcctgaagtcgcgatacatccctttccagtgcccctcttctcgtagcaaatggtgggcgaggtggttctatcttcagatagaagattcggatccagtctttattgttcctgaggagcaaccagacaagattccgtcttggaccgccaaacctgccttgacaccatccctccagtcttctatcgacatcatcgataacctccgagtacgagggctgtcgaggtatgaagtcgttgccgacttcattggtagatggatccagccgctccaggctcgagcccatctagcctttgactactctgggccggaggacgcgacccgggtttctcctcgggatttgaacagcgcaaccgtggagcatcgtgttgcccaggtgatgatcaatggtcccacgatggcgagcaacacccccacccctctttgcgagaaagaggcggctgaacgtgaagccgcaatcaacgctctccccttgattgacatcatcgggacgctcgcggaccaccaggcggcggcttcattgatggagggcgttgcccgggaggcgtccgacacggccattgccgctgcttctgccacgagcagtggcggccaagtcccaaagaaagggaggaagttttcctccgtgctcagcaaccgccggaaggcgcctacccgctcagcctcggacgcgtctcccccgcctccacgacggcagaggctggtgacactcggcgataaggcggcgcgggcgaaggcggcgcgagatgggtctggagggaactccagcacatctcctgcagtggcatcgactgatgtcgtggtcgcgcccaggagccgcgaggggctcaagaaccgcatgtcggaactcgagaataacccgtcggagatccgaggttcgttacgagtcacctacaccggcctacaccagctcgccggggaatgtggcgtcaggactaccatcccggcgaaccctgacgagttctcattgacgtcttcgctcgcggaactggcgacggtgatggaggcgatcccctccaagcacgcgaccaggatcggggaagagacgtccaataggatccacatcggggcgtgccacgtcctcgcgtgcgtgaggttggcacaccctgaacttgatctccagaagatcttggatcagggggcggctagcgatgcacgcaaggatgtgatggagaagtcagcgatctgggggaatccgttctcccactttttgaagatcctcgaaagtgcgcttgctgatcacgaccgtcgcatccaatactggaggatgaatttcgaggtcgccgaacttgagaggactatgttggaagtgaagagggaccgggccgtggaggcactccgaggtcgcgaggtgtggttcaactcgtaccttaggagttgttgcacaaccatggccgttgtttgcagggaactccgagtacctcgaggggatcccgaggagtcagcggccggctatatctcgtggctgaacggggcttgtgctcagctcgaaggcatcaggaagcgtatcgacgcggccctgaagcaggagtgtcgtcgatcgagccg

SEQ ID NO: 5015 - DNA, 480 bp, Oryza sativa
  Clone ID: PAT_MRT4530_11844C.1
atggatctcgacaagtccacctccagccgcgcgtccttgaagaaattgcaagaggaaggcgctctccccggtcgcgggaccatggagagggaaacgggaggtactgaacctgaacccgtcctgggccacatggttgtggttgaggactacattctttgtggttttcttcccccgccttccgagttttttcttctcatcttgaacttctatggtctttctctgcttcatttgaaccccaactccatagccttccttagcattttctctcatctctgcgaggcctacattggggtagagccgtttctcgacctcttccgcttttactatgagttgcgctggacggaacctaaaaagatagaagatttggatccagtcttcattgttcctgaggagcaaccagacaagatttcatcttggaccgccaaacctgccttgaccccatccctccaatctttcatcgatatcattgatgacctctga

SEQ ID NO: 5016 - DNA, 2379 bp, Oryza sativa
  Clone ID: PAT_MRT4530_11845C.1
atgcaaaccctaactcgctcgcctcggtttcttctccggcgatctccagcggcgatggacctcgacaagtccacttccaccagtgcgtccttgaagaagttgcaggaggagggcgctctccccagtcgtgggaccatggagagggaactaggaggtactgaacctgaacccgtcttgggccgcatggttgcggttgaggactatattctctgtggttttcttcctccgccatctgagtttttccttcttgtcttgaacttctacggcctttctctgctccatctgaaccccaactccatagccttccttagcattttttctcatctctgtgaggcctacattggggtagagccgtttcttgacctcttccgtttttactacgagttgcactggatggaacctaaaaaggtatccgggtatgctggttttcgacttcgggatggcctgaagtcgcgatacatccctttccagtgcccctcttctcatagcaaatggcgggcgaggtggttctatcttcagatagaagattcggatccagtcttcattgttcctgaggagcaaccagacaagattccgtcttggaccgccaaacccgccttgaccccattcctccagtctttcatcgatatcatcgatgacctccgagtacgagggttgtcgaggtatgaagtcgctgccgacttcattggtagacggatccagccgctccaggctcgagcccatccagcctttgactactctgggccagaggacgcgacccgggtttctcctcggggtttgaatagcgcaaccgtggagcatcgtgttggccaggtgatggtcagtggccccacgacggcgagcaacgtccccacccctctttgcgagaaaggggcggctgagcgcgaagacgcaatcaacgctctcctcctggctgacatcatcgggccgctcgtggaccaggcagcacgggcgaaggctacgcaagatgggtctagagggaactcaagcgcgtctcctgcagtggcctcgaccgatgtcgtggttgtgcccaggagccgcgaggtgacgtccagcggcccagccagcgatcttgtgcccgctcgagacccgcctgctgtcgtcctcacctgggaggagctccaagtcaagatgggacgcatcctcgaggctggtgctcgcggcataagtcacgagattgcggaggcgagggcggcggcggcatcgtcggcgaacgaacgcgccgacaggctgacgcgtgatctgacggaggggcttgagcaccgtatgtcggagctcgagaacaacctgtcggagatccgtggctcgctgtgggttacctacaccggtctgcaccagctcgccggggagtgcggtgtcacgaccaccatcccggtgaatcccgacgagttctcgctgacgacttcgctcgcggaactggcgacggtgatggaggcgatcccctccaagcatgcgaccaagatcagagaggagacgtccaacgggatctacatcgggacgtgccatgtcctcgcgtgcataaggttggcgcaccttgagctcgatctccaaaggattttggatcaggggacggctaacgacgcgcgtaaggacgtgatggaagaagtcagtgatctaggagagtctattctcccactttttgaagaagatgtcgatgtcgaggatgtccagcaacgcgggcagcctgagttgcctgtaatcattccggcacttgcgcttgagccgtatgtgccgcaagacgacatagaccagaatctgcccgtggagacatgcatgacgacgactcctttagacctcgagagtgcgcttgctgatcgcgaccgtcacatccaatactggaggacgaagttcgaggtcgccgaacttgagaggactatgttggaagtgaaaaaggaccgggctgtggaggcactcagaggtcgcaaggtgtggttcaactcgtacctcaggagttgttgcacagtcatggccgtcgtctgcagggaactccgagtacctcgcggggatcccgaggagtcagcggccggatatatctcgtggctaaacggagcctgtgctcagctcgaaggcatcggcaagcgtatcgacgaggccctgaagcaggagtgccgtcgatcgagccggtatgccggagggcacgtgctggtgtgtatacgagatcatcgtccgcagttgtacctcgagttcctccacgaagggttttctcattctcggaggactcccgcggagatagacaacctagcgaagttgatggcgccgctggcggagaaagtcttccagtcaatggattggcgttggccttcctggtactctttttatatctgtgacaagcatcttaggaaaagtgtaatatatttcggaattttttgcagactgtaa

SEQ ID NO: 5017 - DNA, 213 bp, Oryza sativa
  Clone ID: PAT_MRT4530_11846C.1
ttattttcatgcttgctgtggcgtatgataagttgggacattaaagacggtctagaagatgaatatcggtatgggggttgacaatgattctgtaactatgttttacggtacatctgacgctgtgttttaagaaaatagtcgtacataatatacgtggcgtacacattattaaagttacatttattagcctgtaaactaattaatttctaataa

SEQ ID NO: 5018 - DNA, 2106 bp, Oryza sativa
  Clone ID: PAT_MRT4530_11847C.1
atggagagggaaccgggaggtactgaacctgaacccgtcctgggccgcatggttgcggttgaggactacattctctgtggttttcttcctccgccttctgagtttttccttcttgtattgaacttctacggtctttctctgctccatctgaaccccaactccatagccttccttagcattttttctcatctcagtgaggcctacattagggtagagccgtttcttgacctcttccgcttttactacgagtttcgctggatggaacctaaaaaggtatccgggtgtgttggttttcgatttcgggatggcctaaagtcgcgatacatccctttccagtacctctcttctcgtagcaaatggcgggcgaggtggttctatcttcagatagaagattcggatccagtcttcattgttcttgaggagcaaccaaacaagattccgtcttggactgccaaacccgccttgaccccatccctccaatctttcatcgatatcatcgatgacctccaagtgatgattagtggtcccacgacggcgagcaacgtccgcacccctctttgcgagagagaggcggctgagcgcgaagccgcaatcaacgctctccccctgactgacatcatcaggccgcttgcgaaccaccaggcggcggcttcgttgaaggagggcgtcgcccaggaggcgtccgacgcggccattgccgctgctgctgctgccacgaccagcggcggtaaggttacgaagaaggggaggaagttttcctccgtgctcggcaaccgccggaagacacccaccccatcggcctcggatgcgtcttccccgcctccacgacgacagaggctggtgacaatcagcgagaaggcggcgtgggcgaaggcggcgcaagatgggtctggaggaaactccagggcgtctcctgcagtggcctcgaccgaggttgtggtcgtgcctaggagccgcgaggtgacgcctagtggcccggctagcgatcttgcggctggtcgaggcccgccggctgctgtcctcacctgggaggagctccaggtcgagatggggcgcatcctcgaggctggtgctcgcggcataagtcgcgagatcgcggaggcgagggtagcggcggcgtcgtcggcgaacgagcgcgctgacaggctgacgcgtgatctggcggaggttcgcgaggacctccagaaaatgagggagctagtggccggcaacgagcgacaacggcaggggcttgagcaccgtatgtcggagctcgagaaaaacttgtcggaaatccgtggttcgctgcgggttacctacactggtttgcaccagctcgccggggagtgcggtatcacgaccaccattccggcgaatcccgacgagttctcgctgacgacttcgcggaactggcgacggcgatggaggcaatcccctccaagcatgtggccaggatcggagaggagacgtccaacgggatctacaccggggcgtgccacgtcctcgcttgcagatgtcgacgtcgaggatgtccagcagcgcgggcaacctaaattgcctgtagtcattctggcacttgcgcttgagccgtatgtgccgcaggacgacgtatttgcttgccgggcagacctcgaaagtgcgcttgcttatcgcgactgtcgcatccaatactggaggatgaagttcaaggtcgccgaacttgaggggactatgttggaagtgaagagggactgggccgtggaggcactccgaggtcgcgagtactataccgtttgccctttcgacctatccgttactctgagggtgagaaaccgaggcgaagcatatcttgactcccagtccaatgtagtaatcctggaaatcggcgctgatgaattgggagccgctatccgttatgatgcggtgaggcaatccatatctgcaaaatatccccttaatgaatttgatggctttgtcggccttgatttcccccgtgggtgttgcctcgatccatttggtgaatttgtcgattgccatgaacaagaatttgtaaccgccctgtcctcgtgggaatggaccgagtatgtcgagcccccagcacgagaacggccaagtgagagggatggtttgcagtgcttgcgctggtag

SEQ ID NO: 5019 - DNA, 2190 bp, Oryza sativa
  Clone ID: PAT_MRT4530_11848C.1
atggaattcggaggggtattgcagttgtggaatgaatggggggtacagatgctggtcctagcaagcttcgcgttgcaggtgttcctcctcatcttcggagggatccggcggcacagctcctcctccgtgctgatgttcttcctctggtcggcgtacctgctggccgactccacggcgatatacaccctgggccacctctccgtcgacggcaggtccgacgagcacgagctggtggcattctgggcgccgttcctcctgctgcacctcggtggcccagacaacatcaccgcatacgcgctcgaggacaacacgctttggttgcgccacctgcagactctcgccgtgcaggttctaggagctgtgtatgtgatttacacatacattgtcggcagcgggaccgatcttctgatggcctcagtctcgatgttcatcgccggacttctcaagtacggcgagaggatatgggcgctcaaatgcggcaacatcagcagtatccgcagcagcataagcaccagaaagttcaagactgacccttacgagttgctggcattgggtaccagcgaagaggagctgctgcttggagcccactcccaattcgacatctgcaaaggcgtctttgccgatatcataatgctgccaaatccgtcgctcctctcgcgatccaaacggcgatcggtgatatcctacctggggatggatctgtacaagctggtggagatggagctgtccctgatgtacgacttcctctacaccaaggcagcggtgatccacacatggtacggcttctgcatccatttcgtctcgttgttcggcacggccaccacgttcctgctgttccagctgatcatcagcagcagcagaggagatgggtacagcagagaggatgtggtcatcagctatgtgctgctggttggggccttggtcctggagatcatatcagtgtgcagggctgtgctatccacctggacatgttctctgatgcaccggaggggcagggcatgggagtggcctctccacattatcacatcctttagccgccgtgtccacccggcaagccggagactctggtcaggctcaattgggcagtacaatctgttccacctttgcgcccgcaacacgaacgagattgggagtaggttggcaaccagattggggctccaggactggtggaacatgatgcacttctcgggcaccttctcgaataccggctctttctcaatacaagatctcaagaaactggttttgcaagcactggaagagaaagagcgagcgctgcaatacaaggataccgacctgaactccaggggcagcttcatactcaagagtatgaaggcctatgacgactttgcccgatggagcgtcaacatcgacttcgacgagagcatccttgtttggcacatcgcgaccgagctgtacatccggagatccaaggccaggcacgcgaaagagctcgttgaggctaccgaggtgctgtccaattacatgatgtttctgctggtggtgaagcccaacatgctgcccggtgctgcacgacacaacatacatctcccctcctgtgaacagatagaagggcattgtcgtatgggctttggtggtgagaaggataacccggtggcggcatcgcccataagctggaacccatactgtatgctcaaggaattgctccaccatgatggccctagttgctcaagtatcccacggagggagaagctcgcggagatcgtgtggagtttctgccaattcgcactgggatcagtaaaggcaccaaatccacacggcgaatccatccgcgacagtgcaaacatgtactcggtgttgctcgccaacgagcttctcggcatcgagtcgcggtggtgtgagcagcgtgacaccttggaactcatcctaggggtgtgggtggagatgttgctgtacgctgcgaaccattgcagccaggagtcgcatgccaggcagctcagcaatggctgcgagttcatcaccatcgtgtcgttactagcacaccacttcaagtactactctggagcatccaggggcgcggacgagctgtatgagagtaacccttcaatgagaacggtagcgggatatgaatgctatgtaggcggccgtggctttggcaacttagaagatcgtcggcccgtggtgacgatcgatgttctccggaaagaagagatgagaaaacagagaatgtag

SEQ ID NO: 5020 - DNA, 2832 bp, Oryza sativa
  Clone ID: PAT_MRT4530_11849C.1
tcacccagcgacttggctcctgcaaactccggcttcgtaggctgtggtcgctgtgttggctatgagattcgatcccttaggtcctcccggggggtcccttttatatcgcaggtcaggtggtctccaagtaggactcggaggtatcggacccttattcgtaaccctgacagtagcccccgacttctgcttaaataaactcctataaccgatcacgacttctgatgtcggagttgttgtcgttctcgactggtcgatctcggtgtggggatcgtagagacaaggagtgatcgacaacaccaggcgaagttcaacggttatgagtgaatttaaattgaagtccgagaaaccgcctcgcgcaacggacccagaaatttccgacggccatctctctcctttccttggaattcgcaccgtcggtagtgcgcctccagcagtgcgtccttgaagaaattgcaggaggagggcgctctcctcggtcgcaggactatggagagggaaccgggaggtactgaacctgaacccgtcctgggccgcatggttgcggttgaggactacattctctgtggttttcttcctccgccttctgagtttttccttctcgtcttgaacttctacggtctttctctgcttcatctgaaccccaactccatagccttccttagcattttttctcatctctgtgaggcctacattggggtagagccgtttcttgacctcttccgtttttactacgagttgcgctggatggaacctaaaaaggtatccgggtgtgttggtttttgacttcgggatggcttgaagtcgcgatacatccctttccagtgcccctcttctcgtagcaaatggcgggcgaggtggttctatcttcagatagaagattcggatccagtcttcattgttcctgaggagcaaccagacatgattccgtcttggaccaccaaacccgccttgaccccatccctacagtctttcatcgatatcatcgatgacctccgagtacgagggttgtcggggtatgaagtcgctgccgacttcattggtagacggatccagccgctccaggcttgagcctatccagcctttgactactctgggccggaggacgcgacccgggtttctcctcggggtttgaacagcgcaatcgtggagcgccgtgttgcctaggtgatgatcagtgatcccacgatggtgagcaacgcccccacccctctttgcgagaaagaagcggctgaacgcgaagccacaatcaacgtggcggattcgttgaaggagggcgttgcccaggaagcgtccgacgcggccattgccgtcgctgctgctacgagcagcggcggcaaagttccaaggaaagggaggaagttttcctctgtgctcggcaaccgccggaaggcgcccaccccctcggcctcggacgcgtctcccccgcctccatgacggtagaggctggtgacactcggcgagaaggcggcgcgggcgaaggtggcgcaaaaggggtctggagggaactccagcgcgtctcctgcagtggcctcgtccgatgtcgtggtcgtgcccaggagccgcgaggtgatgcccagcggccctgccagcgatcttgcgcccggtcgaggcctgcctactgctgtcctcacctgggaggtgctccaagtcgagacgaggcgcctcctcgaggctggtgctcgcggcataagtcgcgagatcgcggaggcgagggcggcggcggcgtcgtcgacgaacgagcgcgacgacaaacttgcgcgtgacttggcggaggtctgcgaggacctccagaaaatgagggaactggtggccggcaacgagcggcaacgacaggggctcgagaaccgcatgtcggaactcgagaacaacctgtcggagatccgaggttcgttgcgggtcacctacaccggcctacaccagctcgccagggaatgtggtgccaaaactaccatcccggcgaaccctgacgagttctcattgacgtcttcgctcgcagaactggcgacggcgatggaggcgatcccctccaagcacgcggccaggatcggggaagagacgtccaatgggatcaacaccggggcgtgccacgtcctcgcatgcgtgaggttggcgcaccctgaactcgatctccaaaagatcttggatcagggggcggctagcgacgcgcgcaaggatgtgatggaagaagttggcgatctgggggaagacgttgatgtcgaggatatccagcagcgtgggcagcctgagttgcctgtaatcgctccggtactcgcacttgagccgtacgcgccgcaggacgtgctctcggaaaaggagagcagcttaacttggttgtttgcttgccgagcagacctcgagagttcgctcgttgatcacgaccgtcgcatccaatactagaggacgaagttcgaggtcgccaaacttgagagggctatgttggaagtgaagaaggaccgggccgtggaggcactccgaggtcgcgagggtctgccgggaactgcgagtacctcgcgggaatcccgaggagtcatcggccggctatatctcgtggctgaacggggcatgcgctcagctcgaaggcatcggcaagcatatcgacgaggccctgaagcaggagtgccgtcgatcgagctggtttgccgaagggcacgtgctggcatgtatacgagatcatcgtccgcagttgcacctcgagttcttccacgagggattttctcgttctcggaggactcccgcggaggtagacaacctggcgaagtcgatggcgccgctggcggagaaagtcttccagtcgatggattggcgttggccttcctggtagtctttgtatat

SEQ ID NO: 5021 - DNA, 219 bp, Oryza sativa
  unsure (1)..(219): unsure at all n locations
  Clone ID: PAT_MRT4530_1184C.1
cccaaacgccgagntcgatatatcggcgccggcaccacggattcactgggttctgtgaagagtacaagtagggtgtgtgatgaagaggatatatatatatatatatatatatatatatatatatatatatatatatatgtgcggntaaaagtttgaggngatgctttctngtgtttaattaattagctataatcagatcagatgcatgcagtgtgttct

SEQ ID NO: 5022 - DNA, 966 bp, Oryza sativa
  Clone ID: PAT_MRT4530_11850C.1
atggatctcgacaagtccacctccagccgtgcgtccttgaagaaattgcaagaggagagcgctctccccggtcgcgggaccatggagagggcaacgggaggtactgaacctgaacccgtcctgggccacatgattgtgattgaggactacattctttgtggttttcttcccccgccttccgagttttttcttctcatcttgaacttctatggtctttctctgcttcatttgaaccccaactccatagccctccttagcattttttctcatctctgtgaggccgacattggggtagagctgtttctcgacctcttccgcttttactatgagttgcactggatggaacctaaaaaggtgtccggatgtgtcggtttccgacttcgggatggcctgaagtcgcgatacatccccttccagtgcccctcatcttgcagcaaatggcgggggaggtggttctatcttcagatagaagattcggatccagtcttcattgttcctgaggagcaaccagacaagatttcatcttggaccgccaaacccgccttgatcccatccctccaatctttcatcgatatcattgttgacctccgagtacgggggttgtcggggtatgaagtcgctgtcgacttcattggtagacggatccagccgctccaggctggagcccatccagcctttgactactctgggctggaggacgcgagccggatttcttctcggggtctgagcggcgcaaccgtggaacaccgtgttgcccaggctctccccttgactgacgtcatcgggccgctcgtggaccatcaaacggtggctttgttgaaggaggacgttgcccgggaggcgtccgatgcggctgttgccactgctgctgcaacgaccagcggcggcaaggttccgaagacggggaggaaattttcctccgtgctcggcaaccaccggaagatgcccactccatcggatttataa

SEQ ID NO: 5023 - DNA, 2082 bp, Oryza sativa
  Clone ID: PAT_MRT4530_11851C.1
atgaaccttgacaagtccacttccaccagcgcgtctttgaagaagttgcaggaggagggcgctctccccggtcgcgggaccatggagagggaaccgggagcaaatggcgggcgaggtggttctgaggagcaaccagacaagattccgtcttggaccgccaaacccgccttgaccctatccctccagtctttcattgacatcatcgatgacctccgagtacgagggttgttggagtatgaagtcgctgccgacttcattggtagacggatccagctgctccaggctcgagcccatccagcctttgactactctgggccggaggacacgacccgggtttctcctcagggtttgaacagcgcaaccgtggagcgccgtgttgcccaggtgatgatcagtggtcccacgacggtgagcaacgcccccatccctctttgcgagaaagaggcggctgagcgcgaagccgcaatcaacgctctccccatgactgacatcatcgggccgctcgcggaccaccagacggcggcttcgttgaaggagggcattgcccaggaggcgtccgacgcggccattgccgctactgctgccacgaccagcggcggcaaatcggaaaatgtcgccctcatatcgtactcggtttacttaggcctcggatgcgtctcccccgcctccacgacggcagaggctggtgacactcggcgagaaggcggcgcgggcgaaggcggcgcaagatgggtctggggaaactccagcgtgtctcctgcagtggcctcgactgatgtcgttgtcgtgcccaggagccgcgaggtgacgcctagcggccctgccagcgatcttgcacccggtcgaggcccgcctgctgccgtcctcacatggggggagctccaagtcgagatggggcgcatcctcgaggctggtgctcgcggcataagttgcgagatcgcggaggcaagggcggcggcggcggcgtcggcgaacgagcgtgccgacaaactggcgcgtgacctggcggaggttcgcgaggacctccagaaaatgagggaactggtagccggcaacgaacggcaatggcaggggctcgagaactgcatgtcggaactcgagaacaacccgtcggagatccgaggtttgttgcgggtcacctacaccggcctacaccagctcgccagggaatgtagtgtcaagatcaccatcccggcgaaccctgatgagttctcattgacgtcttcgctcgcagaactggcggcggcgatggaggtgatcccctccaagcacgcggcagggatcggggaggaaacgtccaatgggatctacaccggggcgtgccatgtcctcgcgtgcgtaaggttggcgcaccctgaactcgatctccagaagatcttggatcagggggcggctagcgacgcgcgtaacgatgtgatggaggaggttggcgatctgggggagtccgttctcccactttttgaagaagacgtcgatgtcgaggatatccagcagcgcgggcagcctgagttgcctgtaatcgctccggtactcgcactcgagccgtatgcgccacaggacgatgtggaccaggatatggcgatgactcctttagacctcgagagtgcgcttgctgaccacgaccgtcgcgtccaatactggaggacgaagttcggggtcgccgaacttgagaggactatgttggaagtgaagagggaccggggcatggagacactccgaggtcgcgaggtgtggttcaactcgtacctcaggagtttttgcacagctatggtcgttgtctgcagggaactccgaatacctcgtggggatcccaaggagtcagcggccgggtatatctcatggctgaacggggcctgtgctcagctcgaaggcatcggcaagcgtatcaacgaggccttgaagcaggagtgtcgtcgatcgagccggtatgccggagggcacgtgctggcatgtatacgagatcatcgtccgcagttacacctcgagttcctccacgaagggttttctcgttctcggaggactcctgcggagatagacaacctagcgaagtcgatggcgccgctagcggagaaaatcttctag

SEQ ID NO: 5024 - DNA, 263 bp, Oryza sativa
  unsure (1)..(263): unsure at all n locations
  Clone ID: PAT_MRT4530_11852C.1
tgcctcctgcgcctccagcggcgncgccttcttcgtctgatgagttcgtagatgagctagagctcgccgtcatgtcgatcagcgaggacgcctgcacgctcgccgacctcatgctacacgacgatggcatacccatcacctctgaggagatcgacacgctggtgaaggcggacatcatcaaggtcgaggcctactgacccgacctcttcgccaagctcatcgagcaccgcaacgtcgatgacctcatactctacggcggatct

SEQ ID NO: 5025 - DNA, 402 bp, Oryza sativa
  Clone ID: PAT_MRT4530_11853C.1
atggccgcgatgtgttgtacgcgcgcgcgcgcgcgcgtgcgtgcgtgtatgcgcgcgcagagagcggggcggcgtacagcacgcgagccggcgcgcggcagcttttgtcgcggggggagagggagagagagagagggacgcggccccatcggcccgggaccgcatggggtggtggcaactggcaagagatcccgcggcccccgcgcgtttggtgtggggttcgcgcgggccagcgggcgcgggcgtcggacgagcgagcgagcggtgcgcggcgtgccggcgttagtgggggaggtggcggggttgggggctcggcggtgtgtggtctggtgcgacgcggtgtgcgggaccgtgtgggtgtggccgcccgtgcgcgtgcggtggccgcggggttttatccgg

SEQ ID NO: 5026 - DNA, 743 bp, Oryza sativa
  Clone ID: PAT_MRT4530_11854C.1
atggacctcgacaagtccacttccaccagcgcgtccctgaagaagttgcaggaggaaggcgctctccccggtcgcgggaccatggagagggaaccaggaggtattgaacctgaacctgtcctgggccgcatggttgcggttgaggactacattctctgcggttttctcccgccgccttctgagtttttccttctcgtcttgaatttctacggtctttctctgctccatctgaaccccaactccatggccttcctcagcatcttttcccatctttgtgaggtctacattggggtagagctgtttcttgatctctttcgtttctactacgagctgcgctggatggaacgtaaaaatgtgtccgggtgtgttagtttccgacttcgggatggcctgaagtcgcgatacatccccttcaagtgcccctcttctcgtagcaaatggcgggcgaggtggttctatcttcagatagaaaatttggatccaatctttgttgtccctgaggaacaactagacaagattccgttttggaccgccaagcctgccttgaccccatcccttcatgaatggtgggcttttataggggagagaggggataaggggggagagggaagtgaagggggtgacgcgacggtggcgcggcggcgcggggcgcgaggcggcgatgggacgcgcgcgcggcgacggaacggcgacagcgacggcgcggcagcggcggcgcggggcgcgaggcggcgatggaacgc

SEQ ID NO: 5027 - DNA, 5031 bp, Oryza sativa
  Clone ID: PAT_MRT4530_11855C.1
atggtgtggctcaaccgagtgataagggtgctgcagacgacctccaagaaaatcaaggtgatggctctcaaggagtatagggcgtcggctctcaagaagttcaaggtgatggtattaatcaaggtggcactgcggcacaactacagtttaacaacttccagaatcagtccagcaatagccgattcagcaaacaccaccgaggcagcaggttgtgcagacgattcagcaaacaccactgagacaacagatgtgatgaaggagcagtttgggctcaggccgaaggatgctggaaatttgtatcggcaaccttaccctaaatggtttgagagagttcctctccctaaccggttcaaagttccagatttttcaaaattctcagggcaagatagtacatcgacttatgaacacatcagccggtttttggcccagtgcggtgaagcaccggctgtggatgccttgagggttaggttgttccgattgtctttatctggatcttcttttacttggttttcttctttgccatatgggtcaattaacagtggggccgatttggagaagcatttccacagttatttctatagtggcgtgcatgagatgaaactgtccgatctaacagcaatcaaggaaagacacgatgagcccgtgcatgagtatattcagaggttccgagagatgaggaataagtgctacagcttgagtttgaccgatgcccagttagccgatttggcttttcagggtatgattgctccgatcagggagaagttctcatctgaagacttcgatagcttatcacatcttacacagaaggtaaccttgcatgaacagaggtttgcagaggccaggaagaactctagaaaggttaatcatgtctgtccctacatatatggatcggatggtgaagatgaggatgattccgaaatagcagcagccgaatgggtgagaagcaaaaaggttgtaccgtgccaatgggtgaagagttctggaaaagaggagaggtatgactttgatattaccaaggctaacaagatctttgatttgctacttcgggagaaacagattcaactttctgctggtcatacaattccgtcggctgaggaattgggcaaaagaaggtattgcaagtggcataactctgggtctcattctaccaatgattgcaaggtcttcaggcagcagatccaagtagccattgagggaggcaaaatcaaatttgatgattccaagaggctgatgaaggttgatggcaacccttttcctgtcaatatgaagaaatatgacaagcaacaggagaggcgttatgaggaagatgatggtggtttgatcctcattgcggctgcgagttctttagattctgctggaatgaggaatcagaaaaggagggttcagagattgaggaacatggagcgttttcaggaagttgagcaagaaatcaatcatcggcagaagaagacgaagccgaagcaagaatggcgggttaagaatcaagttcctacagccgatgtagccgcagccgatgaagcaaagagattggctaaaaggaaaagtgttgtgactgcatcagttaacatggtcttcatgttgcctgccgaatttggggttaaacgagccgacgttgatgaagttgaagaggagtcggctaggttgattttatcaccagaacaagcggtctttgagaagccggaagggacagagaatcggcaccttaagccattgtatgtaaatggctatgtcaatgggaagccgatgtctaagatgatggtcgatgatggggctgcagtgaatttgatgccttacgctacgtttaggaaactgggcaggaatgctgaagatctcatcaagacaaacatggtgctcaaagattttggtggcaatccatcagaaactaaaggagttttgaatgtggaactgacagtcggcagcaaaactatccctacaacattctttgtcatcgatgggaagggttcctacagcttgttgcttggaagggattggattcatgccaattgttgtattccttcgaccatgcatcaatgcttgattcaatggcaaggcgacaagattgagatcgtgccagccgatagccaattgaagatggagagcccaaattgttattttgagggcgttgtggagggctcaggagtctacgccaaggacacaatggatgatctcgatgacaagcaaggacagggtttcatgttgcccgatgatttggaagaaattgacataggaccaggcgatcggccaaggccgacatatatcagtaagaacttatctccagaatttagaaccaagttgatagagctcttaaaagaatacagagattgcttcgcttgggagtattatgagatgccagggctcagccaatcgaatgttgagcatcggctgcctatcaaactaggggttcgaccgcaccagcaacctccgagaaggtgcaaagccgatatgctagaacctgtgaaggctgagatcaaacatctatatgatgctggttttattcgtccgtgccgatatgctgagtgggtttctagtatagttccggttatcaacaagaacggtaagatcagggtatgcattgatttcagggatttgaataaagccaccccaaaagaagagtttctgatgccagtagccgatcagttagttgatgctgcctcaggacataagattttaagttttatggacggtaatacaggatacaaccaaatctttatggctgaagaagatatccataaaacatcttttaggtgtcctggtgcaatcggcttgtttgactgggttgtgatgacttttggcttgaaaagtgctggagctacatatcaaagagccatgaattatatctatcatgacctgatcggctggttagtggaagtttacatcgatgatgtggttgtcaagtccaaagagatagacgatcacatagccgatctgaggaaggtttttgagagaaccaggaagtatggcttgaagatgaacccgacaaagtgtgcttttggtgtatcggctggccaatttttgggatttcttgttcatgagagggggatcgagataacccagcggagtgttaatgcaatccagaagattcggcctccagggaacaagatagagttgcaggagatgatcggcaagataaattttgttagaaggtttatttctaatttgtccggaaggttgaggcattatctattgtccaatgaatgcactgtcatatgcaaggccgatgttgttaaatacatgttgtcggctccaattttaaaaggaagggtcggaaagtggatattttccttaacaaagtttgatcttccgtatgagtcgctgaaggctgtcaaggggcaagctctagccgatttcattgtcgatcatcgtgatgattcaatcggctcggttgagattgtgccgtggactttattttttgatgggtcagtatgcactcatggttgtggcatcggtttggttattatttcccctcggggggcaagttttgagttcgcttatactatcaaaccttatgcgaccaataatcaggctgagtatgaggcagttcttaaagggttgcagttactcaaggaagttgaagccgatgctattgaaattatgggggattccttgctagtaatcagtcaattagcaggagaatatgagtgcaagaatgatacattggtaatttataacgagaagtgccaagaattaatgaaggaattttggctggttactttgaagcatatatcccgagaacaaaatattgaagctaatgatttggcccaaggggcatcggggtataagccgatgatgaaagatgttaaggttgaagtcgctgcaataacagccgatgattggagatatgatgtgcatcaatatttacagaatccatctcaatcggcttctcggaaattaagatataaagcgttgaggtatactttattggatgatgaactctattatcgcacgattgatggggtgttacttaagtgtttgagtaccgatcaagctaaggttgtaatcggtgaagttcaagaaggaatttgtggcactcatcaatcggctcataagatgaagtggttgcttcggcgtgcagggtatttttggccgacgatgctggaggattgtttcaaatattacaagggatgtcaagattgtcagaaatttggagcgattcagagggcaccggcgtcggctatgaatcctatcattaagccattgccatttagaggttggggaattgatatgatcggcatgattaatccaccatcgagtaaaggacataagtttatattggtggcgaccgattattttaccaagtgggtggaagcgattcctttgaagaaagtcgattctggggatgctatacaatttgttcaagagcatataatctatcgatttgttattcctcaaaccattacaactgatcaaggatcgatcttcgtgtccgatgagtttgttcagtttgccgatagcatgggtatcaaattgttgaattgttcaccatattatgcacaagctaatggaaagatttccgattatcctcggcagtggcatactagattggccgaagcattgtggtcctatcggatggcttgtcatggttcaatccaagttcctccttataagcttgtttttgggcacgaggctgttttgccttgggaagttagaatcggctcaaggagaacggatttgcaaaatgatttgacagccgatgagtattataaccttatggacgatgaaagggaggacttcgttcaatcaagattgcgagcccttgcaaaagttatcaaggataaggaacgtgttgctcggcattataacaagaaagtggtgcctaagtctttttctgaaggtgaacttgtttggaaattgattttgccgataggagctcgggatagcaaattcggcaactggtcgccgaattgggaaggaccgttccaaatctataaggtcgtgtctaagatagcttatatgctgctaggacttgatagagaagtttatggacgagcgttgaatggcaagtacttgaagaaatattacccaagtgtttag

SEQ ID NO: 5028 - DNA, 422 bp, Oryza sativa
  unsure (1)..(422): unsure at all n locations
  Clone ID: PAT_MRT4530_11856C.1
gacggatctagtgccggcgacgatggcgggcggcgtgagtgatggatccggtgccggcgacgacggcgggcggcgtggcgacggatccgacgccggcgggcggcgnnggcgatgaatccggcaccgtgcggcggcgggctagggtttgggatattttggatttttatttttttttgtttgctgaatttattttcgcatgcggctggtataagcaaccgcatgcatgcggttgggccggccgcatgcgaaaagggtgatttttgcagaccttctctctcatgcggaagatgccttttgcccgtatggaaaaagccttttttactagtgtctgtccgttttaaaacactaaataaatgcttatagtcaaattggaataaaaagtgaattgcattttgggccaaaaaaaaaaaaaaaaaaaaaaa

SEQ ID NO: 5029 - DNA, 2433 bp, Oryza sativa
  Clone ID: PAT_MRT4530_11857C.1
atggacctcgacaagtccacttctaccagcgcgtccttgaagaagttgcaggaggagggcgctctccccggtcgcgggaccatggagagggaaccaggaggtactgaacctgaacccatcctgggccgcatggttgcggttgaggactatattctctgtggttttcttcctccgccttctgagttgttccttctcgtcttgaatttctacggtctttctctgctccatctgaaccccaactccatagccttcctcagcattttttcccatctttgtgaggcctacattggggtagagccgtttcctgacctcttccgtttttactacgagttgcgctggatggaacctaagaaggtatccgggtgtgttggtttccgacttcgggatggcctgaagtcgcgatacatccccttccagtgcccctcttctcgtagtaaatggcgggcgaggtggttctatcttcagatagaaaattcggatccagtcttcattgtccctgaggaacaaccagacaagattttgtcttggaccgccaaacccgccttgaccccatcccttcagtctttcatcgatatcatcgatgacctccgagtgagagggttgtcggggtatgatgtcgctgccgacttcattggtttgaacagcgaaaccgtggagcgctgtgtcggccaggtgatggctctccctcttactgacgtcattgagccgctcgtggaccaccaggcggcggcttcgttgaaagagggcgtcgccctagaggcgtccgacgtggccattgccgctgttgctgccacgactagtggcggcaatgttccgaggaaagggaggaagttttcctccgtgctcggcaaccgccagaagacgcctaccccatcggtaagcctctttggttatcgattgcgtagtcagaagatgtcgccctcacatcgtactcggtttacttcggcctcgaatgcgtctcccccgcctccacgacgacagaggctggtgacacttggcgagaaggcggcacgggcgaaggcggcgcaagatgggtctagagggaactccagcgcgtctcctgcagtggcctcgacagatgacgtggtcgtgcccaggagtcgtgaggtgacgcccagcggccctgccagcgatcttgtgcccgctcgaggccctcctgctgacgtcctcacctgggaagagctccaagtcgagatggggcgcatcctcgaggccggcgctcacggcataagtcgcgagatcgcggaggcaagggcggcggcagcgtcgtcggcgaacgaacgcgccgacaagctagcgcgtgacctggcggaggttcgcgaggacctccagaaaatgagggagctggtggccggcaatgagcggcaacggcaggggctcgagaaccgcatgtcggaactcgagaacaacctgtcggagatccgtggttcgctgcgggtcaactacaccggcctacaccagctagccaaggagtgtggtgtcacgaccaccatcccggcgaaccctgacgagttctcgctgacgtcttcgctcgcggaactggtgatggcgatggaggcgatcccctccaagcacgcggccaggatcggggaggagacgtccaacgggatccacatcggggcgtgccacgtcctcacgtgcgtgaggttggtgcaccctaaactcgatctccagaagatcttggatcagggggcggctaacgacgcgcgtaaggacgtgatggaagaagtcggtgatctgggagagtctgttctcccactttttaaagaagacgtcgatgtcgaggatgtccagcagcgcgggcagcctgagttgcctgtaatcgctccggcactcgcgctcgagctgtatgtgccgcaggacggcgtggaccaggatctgcccgtggagacgggcatggcgacgacttccttagacctcgagagtgcgcttgccgaccgagatcgtcacatccaatactggaggacgaagtttgaggtggcggaactcgagaggactatgttagaagtgaagagggatcgggccgtggaagcacttcgaggtcgcgaggtgtggttcaactcgtacctccggagttgctgcacagccatggcgggagtttgcaaggagctccgagtaccttgcgaggatcctgaggagtctgtggccggttacatctcgtggctgaacggggccaacgcccagcttgaaggtatcgacaagcgtatcaacgaggtcttgaagcaggagtgtcgtcggtcgagccgatatgcaggagggcatgtgctggcctgtatacgagatcaccatccacagctgcgccttgagttcctccacgaggggttcgcacgttcttggagaactgatgcagagatagaccagctggcgaagtcgatggcgccgcttgcggagaaagtctttcagtcaatggactggcgttggccttcttggtag

SEQ ID NO: 5030 - DNA, 4998 bp, Oryza sativa
  Clone ID: PAT_MRT4530_11858C.1
atggtgtggctcaaccgagtgataagggtgctgcagacgacctccaagaaaatcaaggtgatggctctcaaggagtatagggcgtcggctctcaagaagttcaaggtgatggtattaatcaaggtggcactgcggcacaactacagtttaacaacttccagaatcagtccagcaatagccgattcagcaaacaccaccgaggcagcaggttgtgcagacgattcagcaaacaccactgagacaacagatgtgatgaaggagcagtttgggctcaggccgaaggatgctggaaatttgtatcggcaaccttaccctaaatggtttgagagagttcctctccctaaccggttcaaagttccagatttttcaaaattctcagggcaagatagtacatcgacttatgaacacatcagccggtttttggcccagtgcggtgaagcaccggctgtggatgccttgagggttaggttgttccgattgtctttatctggatcttcttttacttggttttcttctttgccatatgggtcaattaacagtggggccgatttggagaagcatttccacagttatttctatagtggcgtgcatgagatgaaactgtccgatctaacagcaatcaaggaaagacacgatgagcccgtgcatgagtatattcagaggttccgagagatgaggaataagtgctacagcttgagtttgaccgatgcccagttagccgatttggcttttcagggtatgattgctccgatcagggagaagttctcatctgaagacttcgatagcttatcacatcttacacagaaggtaaccttgcatgaacagaggtttgcagaggccaggaagaactctagaaaggttaatcatgtctgtccctacatatatggatcggatggtgaagatgaggatgattccgaaatagcagcagccgaatgggtgagaagcaaaaaggttgtaccgtgccaatgggtgaagagttctggaaaagaggagaggtatgactttgatattaccaaggctaacaagatctttgatttgctacttcgggagaaacagattcaactttctgctggtcatacaattccgtcggctgaggaattgggcaaaagaagattctgctggaatgagggtatgaggctaccatctatcgaggactgccttgggtgcggtaatattgcagaaagtccaagccgatcgcataataaaggtgatcggccaaggcaaacaagagtgcctgttcatcaaagattgggcccagtaaatcgagattataaccaagaggacaatgaagacaggaagattcaatggtgtccttctggtatttttacaaagaatcagaaaaggagggttcagagattgaggaacatggagcgttttcaggaagttgagcaagaaatcaatcatcggcagaagaagacgaagccgaagcaagaatggcgggttaagaatcaagttcctacagccgatgtagccgcagccgatgaagcaaagagattggctaaaaggaaaagtgttgtgactgcatcagttaacatggtcttcatgttgcctgccgaatttggggttaaacgagccgacgttgatgaagttgaagaggagtcggctaggttgattttatcaccagaacaagcggtctttgagaagccggaagggacagagaatcggcaccttaagccattgtatgtaaatggctatgtcaatgggaagccgatgtctaagatgatggtcgatgatggggctgcagtgaatttgatgccttacgctacgtttaggaaactgggcaggaatgctgaagatctcatcaagacaaacatggtgctcaaagattttggtggcaatccatcagaaactaaaggagttttgaatgtggaactgacagtcggcagcaaaactatccctacaacattctttgtcatcgatgggaagggttcctacagcttgttgcttggaagggattggattcatgccaattgttgtattccttcgaccatgcatcaatgcttgattcaatggcaaggcgacaagattgagatcgtgccagccgatagccaattgaagatggagagcccaaattgttattttgagggcgttgtggagggctcaggagtctacgccaaggacacaatggatgatctcgatgacaagcaaggacagggtttcatgttgcccgatgatttggaagaaattgacataggaccaggcgatcggccaaggccgacatatatcagtaagaacttatctccagaatttagaaccaagttgatagagctcttaaaagaatacagagattgcttcgcttgggagtattatgagatgccagggctcagccaatcgaatgttgagcatcggctgcctatcaaactaggggttcgaccgcaccagcaacctccgagaaggtgcaaagccgatatgctagaacctgtgaaggctgagatcaaacatctatatgatgctggttttattcgtccgtgccgatatgctgagtgggtttctagtatagttccggttatcaacaagaacggtaagatcagggtatgcattgatttcagggatttgaataaagccaccccaaaagaagagtttctgatgccagtagccgatcagttagttgatgctgcctcaggacataagattttaagttttatggacggtaatacaggatacaaccaaatctttatggctgaagaagatatccataaaacatcttttaggtgtcctggtgcaatcggcttgtttgactgggttgtgatgacttttggcttgaaaagtgctggagctacatatcaaagagccatgaattatatctatcatgacctgatcggctggttagtggaagtttacatcgatgatgtggttgtcaagtccaaagagatagacgatcacatagccgatctgaggaaggtttttgagagaaccaggaagtatggcttgaagatgaacccgacaaagtgtgcttttggtgtatcggctggccaatttttgggatttcttgttcatgagagggggatcgagataacccagcggagtgttaatgcaatccagaagattcggcctccagggaacaagatagagttgcaggagatgatcggcaagataaattttgttagaaggtttatttctaatttgtccggaaggttgaggcattatctattgtccaatgaatgcactgtcatatgcaaggccgatgttgttaaatacatgttgtcggctccaattttaaaaggaagggtcggaaagtggatattttccttaacaaagtttgatcttccgtatgagtcgctgaaggctgtcaaggggcaagctctagccgatttcattgtcgatcatcgtgatgattcaatcggctcggttgagattgtgccgtggactttattttttgatgggtcagtatgcactcatggttgtggcatcggtttggttattatttcccctcggggggcaagttttgagttcgcttatactatcaaaccttatgcgaccaataatcaggctgagtatgaggcagttcttaaagggttgcagttactcaaggaagttgaagccgatgctattgaaattatgggggattccttgctagtaatcagtcaattagcaggagaatatgagtgcaagaatgatacattggtaatttataacgagaagtgccaagaattaatgaaggaattttggctggttactttgaagcatatatcccgagaacaaaatattgaagctaatgatttggcccaaggggcatcggggtataagccgatgatgaaagatgttaaggttgaagtcgctgcaataacagccgatgattggagatatgatgtgcatcaatatttacagaatccatctcaatcggcttctcggaaattaagatataaagcgttgaggtatactttattggatgatgaactctattatcgcacgattgatggggtgttacttaagtgtttgagtaccgatcaagctaaggttgtaatcggtgaagttcaagaaggaatttgtggcactcatcaatcggctcataagatgaagtggttgcttcggcgtgcagggtatttttggccgacgatgctggaggattgtttcaaatattacaagggatgtcaagattgtcagaaatttggagcgattcagagggcaccggcgtcggctatgaatcctatcattaagccattgccatttagaggttggggaattgatatgatcggcatgattaatccaccatcgagtaaaggacataagtttatattggtggcgaccgattattttaccaagtgggtggaagcgattcctttgaagaaagtcgattctggggatgctatacaatttgttcaagagcatataatctatcgatttgttattcctcaaaccattacaactgatcaaggatcgatcttcgtgtccgatgagtttgttcagtttgccgatagcatgggtatcaaattgttgaattgttcaccatattatgcacaagctaatggaaagatttccgattatcctcggcagtggcatactagattggccgaagcattgtggtcctatcggatggcttgtcatggttcaatccaagttcctccttataagcttgtttttgggcacgaggctgttttgccttgggaagttagaatcggctcaaggagaacggatttgcaaaatgatttgacagccgatgagtattataaccttatggacgatgaaagggaggacttcgttcaatcaagattgcgagcccttgcaaaagttatcaaggataaggaacgtgttgctcggcattataacaagaaagtggtgcctaagtctttttctgaaggtgaacttgtttggaaattgattttgccgataggagctcgggatagcaaattcggcaactggtcgccgaattgggaaggaccgttccaaatctataaggtcgtgtctaagatagcttatatgctgctaggacttgatagagaagtttatggacgagcgttgaatggcaagtacttgaagaaatattacccaagtgtttag

SEQ ID NO: 5031 - DNA, 985 bp, Oryza sativa
  Clone ID: PAT_MRT4530_11859C.1
gatcaaatcaagtggcacgcttgcatacccgaaggcgagttttggacctgcactggagtttttcatcaacacgcttttggcacgcttggttgatgaagccaacattgtgcccgtcactctagacaagttgacacctgagcagcaaaaagaccttgatacaatgatgcagttaaggcattatctattgtccaacgaatgtattgtcatatgcaaagccgatgttgttaagtacatgttatcggctccaattttgaaaggaaggattggaaagtggatattttccttaactgagtttgatcttcggtatgagtcaccgaaggctgtcaaagggcaggctatagccgattttattgttgaacatcgtgatgattcaatcggctcggttgagattgtgtcatggactttattctttgatgggtcagtgtacactcatggttgtggcatcggcttggttattatttcccctcggggggcaagttttgagtttgcttatactatcaaaccttatgcaaccaataatcaagctgagtatgaggtagttctcaaagggttgcagttgctcatggaagtagaagccgatgctattgaaattgtgggggattctttgctagtaatcagtcaattggcaggagaatatgagtacaagaatgatacattgatggtttataatgagaagtgccaagaactaatgaagaatctttggctagttactttgaagcatgtatctcgagaacaaaacattgaagctaatgatttggcccaaggggcatcggggtataagctgatgatcaaagatgttaaggttgaagtcgctgcaataacaaccgatgattggagatatgatgtgcatcaatatttacagaatccatctcaaccggcttctcggaaattacgatataaagcgttgaagtatactttattggatgatgaactctattatcggacgattgatgcggtgttgcttaagtgtttcagtgccaattag

SEQ ID NO: 5032 - DNA, 210 bp, Oryza sativa
  unsure (1)..(210): unsure at all n locations
  Clone ID: PAT_MRT4530_1185C.1
cggaccgccaattcccggggtcgcccccacgcgttccggttgcacccgnatagcatctaccagcccttggctggtgtcnttgtactgtaattttcacaatattgtagttcgtgaagtgtaaaatataagcctcaggtatcatctgtatgttgacatgtgtaaacttgaggtgatattaaatagtaaataaaattcatctttcatatttat

SEQ ID NO: 5033 - DNA, 258 bp, Oryza sativa
  Clone ID: PAT_MRT4530_11860C.1
catccccacagctttgcgtttgcactgctcgcgatctccatccatttttgagctcctcgttagctacggctctctttcactcatggacaaaactaagatcgggctcaatgggttcgtccgcatgggcaggctgctgcccaggggggtgctgcagagcgaggatgggcagctccctgccgtgaaggataccttcatcaccaccgagcacatgacatacatgtacaagcatgacaccagccactgtcaatggaagcttcc

SEQ ID NO: 5034 - DNA, 246 bp, Oryza sativa
  unsure (1)..(246): unsure at all n locations
  Clone ID: PAT_MRT4530_11861C.1
gtcccttccgctcagctcgcccccatggcgacctcgtngtcgccgcgcctgctctcctccttcctnggcgaccgcctcctctccgccagcgccaggncgctcntncgcggggccgntncaggaagaaggcgggccgngtatcaggcgacgagaacgntctnnaacctggtggatatcctnttcaanagaggtcananttanaaaccggaagataaccctagacgnctanggtctnggaaagtatct

SEQ ID NO: 5035 - DNA, 147 bp, Oryza sativa
  unsure (1)..(147): unsure at all n locations
  Clone ID: PAT_MRT4530_11862C.1
gtcgtgggtgacgtcagcaccaccaccatctgcttccccctccctccctccctcccgtctcctcccccattccatcgcatccgcatacaaaccccaaccctagccgtctccgtgctagggccgtcgtcnncttcgcgcgccctgacc

SEQ ID NO: 5036 - DNA, 845 bp, Oryza sativa
  Clone ID: PAT_MRT4530_11863C.1
taagtcgttagggcttgaggcagttgagaagaaggattatctttctgcagcaggattctacagtgaggccatggaccttgaccctgatgatgcaaccctgctgtccaataggagcctttgctggctttatctgggtgaaggaggcaaggctttggtggatgctcatgaatgcagaaaaatgcggcctgactggccgaaggcctgctaccgtcagggtgcagctttaatgttactgaaggactatgtgagcgcgtgtgaagcactttttgatggattcaagttggatcctgaggacgttgagattgaaaatgcattacgggaagctctagagttcttgaaggtgtctcaaagcacttcggctaactgaactgtatgggttttgcagcggatgttctggttcatgttttacctttccacaaggctcttttggcattgaatccctgaactggttccctttcgtaagttgaatggcgagtcggtgactatcgcagaagtttcattgtgctaactcgaactgacggtgagacatctgagagtactttttgctgcatctgtgtgatgccccattataatgtctatgtaaacataccgaactactgttacgtcattttgttgatcactgattatgtgcatcggtgcttcctagatagcaactgctgttctgcagagtatatcccctccgataaaaataataataatcaaagatggaatgtgaccctttcagtgtaacgaattcattgtactaagaggatcaccccgctcttaggtggggtctttttggacggagggagtactagacaagcacaatatgactgcgagggggtaagggatttccgtttgttgcc

SEQ ID NO: 5037 - DNA, 1241 bp, Oryza sativa
  Clone ID: PAT_MRT4530_11864C.1
gctcgcggctcccccggcggccctcctccccaggctctcccccctcctcgctgttgctccaggcttcgtatttatctccccctctccgtctcgccgtctctcagctctctctgctgctcctcctagctgcatgctaagctaaatcttctgttggattgcctagctttgctgctttgcttgcttgctgtggtgtggtgtggtgtgaattttgttgattggtcggagcttggggttgtgtatggtggtggtggtgtggtagctagtagctgctagtgctagatggtcgcaggggcgttggggtacatggcgagagcggcggacggcggcagggcggcggagctcgtcaccagggatttcctcggcggctgcgtcgccgccgacgacgccagggacgccgccgccgccgcagcagcaactgccaggcacgactccgtgtccggcaagctgtccctgcagaagcagacgtgcccggcgacgccgacagacctcaacctcttccccgtccccggcgccgccgcgtccgccgccaagccgtgcccgtcgtctacggcggcggcggcctccggcgcaggcggcaccacgacgacgacgacgacgtaccacagcgtgtgcacgatcgagaaggtgaagacggcgctggagcggttcgagcgcggcaagcaccagcaccaccagcaccagcagcacagcgccggcgcgtccccgtcgtcgtcgtccgtcaccacctcctccgtgaagcgccgtggcggcggcggcgtcggcgacggcgcggtggagcagggcgacgggtgcgactcgccgtccgcggcgggcggcggcggcatggtggccgccgcgtgcccgaggtgcttcctgtacgtgctcatctcccggtcggacccgcggtgcccgcggtgcgagtcgcacgtgccgccgccgccgtcgccggcgccgaagaagaagccccggatcgacctcaacgtggggttcctcggcacctagctttcctaccctaccttcacctgcatcgccacggtggacacatgtgactagccatagctagctagccagccatgcccccaattctgttaggaaatcaatgaatcaatcaatcaaacacgtactccatagaacacgaggatgatcatgacgatgatgatgatgatactagtagtcctagctccactatgtaattgatcaaaaagcattttcgcccttaaatcaacttttccatttttgtcttcaaaaaaaaaaaaaaaaaa

SEQ ID NO: 5038 - DNA, 2096 bp, Oryza sativa
  unsure (1)..(2096): unsure at all n locations
  Clone ID: PAT_MRT4530_11865C.1
gcacggccaatctccaccaccacatcatcttcttcctcctccacctcttacctcgtcgtcctgagcgctcctggatgcagttgccttctcctgacaactcctcttcgccttggctaagttagctagctcatcatcacactctgcatacgtgcttgtcaactccattgagagcgtcgccgttgatggctgagccgccggcgaccaaggtgtaccacgatggctgccccggctgcgccatggagcggaggaaggaggagcacaagggcattccctacagggagttcctcttcgttgccatcaccaccctcgcctcctctctgccaatctcttccttgttccccttcctgtacttcatgataagagacttgcatgttgctcggacagaggaagatattggattctatgctggatttcttggcgcatcatatatgatcggtcgtggtttcgcatcgatcttgtggggtatggtggcagatcgtattggccgtaagcctgtcattatcttttccatttttgcagtcattgtgctcaatactttgtttggattaagtgtgaagtactggatggctgttaccacaagatttcttcttggtgctctgaatggattgcttgcaccaataaaggcgtactctatcgaagtttgccgagctgaacatcaacctttgggcctatcaattgtgagcacagcatgggggataggtcttgtagttggcccagcaactgggggatacctcgcacagcctgtcaaacaatatcctcatatttttcatgagaagtcaatatttgggagatttccatatcttctaccctgcctttgtatatcactttttgctctcttggtcctcctaagctgtatatggctaccggagaccctacataagcataaaggccttgaagtgggagtggagacagctgaagcttctactactcaagaaagtgcagaatcacatcagaaaagcttattcagaaattggccattgatgtcatctattgtcacatattgtgtgttctcccttcatgacacagcatatagtgagatattttctctgtggactgtaagtgatagaaaatatggtggactcagcttttcatctaaagatgttgggcaagttcttgcagtggcaggtgccagccttcttgtatatcagctttttatctacggttgggttgataaaattcttggacctatccactcaacccgcatttcagcggcactatctataccgattattgctgcttatccctttatgacacacttatcaggaataagacttggtgtggccctctatagtgcagcaatgatcaaaagtgttcttgctataactataattacgggcacttctcttctgcaaaacaaagcagtgccacaagggcaacggggtgctgcaaatggaatagccacaacagccatgtccttgttcaaggctattgctccggctggggcaggagttatattttcttgggcacaaaagagacaacatgtggcattttttccaggtgaccagatggtatttcttctactgaatctgaccgaggtcattgggctcatgttaaccttcaaacctttcttggctgttcctcaacaatataaatagaacattcagatactgctagctggtgtgacaaagatcataaagatgtagttacagtgagtaataagtatggcttggtattaaaagatggtttagatgtggttatagcataatggtaggatcatgcagcattccagtgcagagtctctgttggattttgttctgctttgggcttatgagcaagataaccttgtatattgcagtgttgaatttgaataactgctcttctaaaaaaaaaaaaaaaaaaaaaaaaaaaaaggggccggtacccaatcnccccatantgaatccttattacaaattccactgggnccgtccgtttttacaaacntccntgaactggggaaaaaaccccgggngtttaccccaacnttaaatncnccctttggnaaaaaanaatcccccccttttcccccaannttngggcgtttttttanccaaaaaaaaaggccccncnaccccaaattngccccctttnccccaaaaaaatttttgccnccaann

SEQ ID NO: 5039 - DNA, 1405 bp, Oryza sativa
  Clone ID: PAT_MRT4530_11866C.1
atggttggtagatcctttgccgcgatattttggggagttgtggcagatcgtataggaaggaaacctgtcattgtgttttcaatattgtctgtggtcatatttaacacattatttgggctaagtacaaagtattggatggcacttactacaaggtttgttctaggtgctctaaatggtttacttgcgccaataaaggcttattctattgaagtttgccaaactgaacatcaagctcttggactctccattgttaacacagcatggggtttgggtctcgttgttggtccagctcttggaggctaccttgcacagcctgttgaaaaatatccacatgtattttctaaggagtcagtttttgggagattcccgtatctcttaccttgccttggtgtatcattgtttgctgctattgttctgataagttgtatttggcttccggagaccctacataagcataaaggccttgaagtgggagtggagacagctgaagcttctactactcaagaaagtgcagaatcacatcagaaaagcttattcagaaattggccattgatgtcatctattgtcacatattgtgtgttctcccttcatgacacagcatatagtgagatattttctctgtggactgtaagtgatagaaaatatggtggactcagcttttcatctaaagatgttgggcaagttcttgcagtggcaggtgccagccttcttgtatatcagctttttatctacggttgggttgataaaattcttggacctatccactcaacccgcatttcagcggcactatctgtaccaattattgctgcttatccctttatgacacacttatcaggaataagacttggtgttgccctctatagtgcagcaatgatcaaaagtgttcttgctataactataattacgggcacctctcttctgcaaaacaaagcagtgccacaagggcaacggggtgctgcaaatggaatagccacaacagccatgtccttgttcaaggctattgctccggctggggcaggagttatattttcttgggcacaaaagagacaacatgtagcattttttccaggtgaccagatggtatttcttctactgaatctgaccgaggtcattgggctcatgttaaccttcaaacctttctatgggcgccgcatgacaaaacatggcagattccagttctgtcagctggtgtggcaaacaccatagagagatagttgtagctagtactatgttttagtattaaaacatggtttagatatggttgtagcagagtgttagaaacatgcaccattccaggtgcagagcctctgttaggttgttcttctttttgttctgctttgggtctgtgagataaataatcttgcaaaagctatgacattttttattgcagctttggagtcccccc

SEQ ID NO: 5040 - DNA, 458 bp, Oryza sativa
  Clone ID: PAT_MRT4530_11867C.1
acattctctcctttttttaccactccaaaagtttcatatattattcaacatcaaataaagcagtacccaagccacaatatataacaaacaagcctcttacaaactttaacacacctttaccaagcatacccatcagagttacacggctactagggtatgtgtgcacaatggaacacgcaagcttgtgcacaaccaaacatactgcccccgaaaccatagtttttccaaggagtctggcagttgcacttaaaccatgaatccaggggtgcaacttctttaacagacccatctgaacaccaaaccgtgaatcgattttcctccggtcaccctgcagctgcatcacctggccaagacctgggacctggacaaaaggcccattgcaacaaaactgctggttgagaactttgaggatcctagatgcaagtgaatcacttcataaatccctatacaaccatcag

SEQ ID NO: 5041 - DNA, 2822 bp, Oryza sativa
  Clone ID: PAT_MRT4530_11868C.1
atatgcacttgctttgctgttttagctctctactcccacatcgcgcttgctggcccgtgtcacatgattactcgcgcatagtgcaacctgatgcgcaagctcgagatggtgcccaacgagggtccggcttgcagagctggggcgaccgtcacattggtagcgtccgtctccaccttcaaatggcgaaggagcttgtcttccgacttgatgtcacgcaagagaaccggtctctttctcccttggcgacctagttgtggcgggacttgaagctgaaacgcctcgggcttgcctctcttgagcgcaccatagcttgccagcgttcgttcttgatctggctcaaggagggtgacgctaacaccaagtttttccactatcacgctagggcctgaaggcgaaagaacttcatcactcacctttgagatggagaccagctcatcgtttcacatgatgagagctttaagagctcgtctccactcactttggatctatcttggggacgtgcgttgagcttgatctcgctcttgaccttcactcccttggcctcagccctatgcagcttggggggctagatgacccgttctcggaggaggaggtgtgggcggtgattaagtctttgccttctgacaaggcgcctggtcttgatgggttcacgggtcggttatacaagacttgctggtcggtgattaagtcggagttcttggcagctctcaactccctctttttgactaaaggccggggatttgcctcccttaatgatgccctcatctcccttctgccaaagaaggatgtggtcgttgacgtcaaggatttttgaccgattagcctcatccacagctttgggaagttgttctccaagatcctggcttcccgtctctctctccaccttgacgggcttatggcggccaatcaaagtgccttcgtcaaaggtcgatccctccacgacaactttcgctatgaccaactcgcggcaagggccctccatgccaggcgcactctccgcctccttctcaaggtggacatcgcaaaggcctttgacacggtcagttggccattcttgcttcaggtgcttgctcatctcgggttcagttagcgttggcgggattggatctccctcatcctcagtgcctcctcttcccgagtgctgatcaatggggtgcctggtccacgcttccctcaccgaatgggtcttcggcaaggagatcctctatcccctatactcttcattctagtcatggatgtgctcaatgtgatgctctgtaaggcctccgactcgggcgggttccttcagcttaacgatcgtgccttgcgacctcacgcctccctctatgctgatgatctagttctcttcctttccccggttcgacaggatcttgggttcatccagtgcatcctttctgtctttggtgcagctttcgggctgcgcaccaattttgccaaatgctcgattacttcgatccgttgctcggccgaggacctagagctagtttaatcttgcttcccctgcacgatttctgattttgcttgcacctacctcgacattccgctatctgttcgcaagttgccgaaggtggccctacaaccgcttgttgacaaagtctcccatcggcttccccctggaagggacgtctcaccacgctggccggccgctctgtgctggtccagtctgtcctctcctccattccggtccatgtgtctatggcgatcggccttcctgtctgggttattaaagccattaacaagaagcgtcgagccttcctgtggacgggtacggactcagctcatggggggcagtgccgggtatcttggacgaacgtctgtcgtcccaaagcttttggtgggctgggaattcctgacctcaggatggcagggtttgccctgcgtgtttgctggctccggcttcagcgctcagggcatccctactaggatggcctgaaggccccagttgagcggaccgtctccgacatgtttgaggcgtccaccttctttgtgctgggagatggtgagtcgatgctcttctggtctgaccgttggatcggtggcctctttggctccagaccttctcttcgttgtgccccaacgactccgaagttcgcacacggttgcttctggcctggtgaacaattcctgggtttctgacatcggtggcgccctcattgtcctggtcatctcccagtttcttctggcttgggatgcggtgcttcacaatcggctctcgccaggtgtcgaagatcgtcttgtttggtgttggacgagtaaccagtgctgcacggtgcgttcagcgtaccaggcgttcttctatggccaacactccttcgcctgtgctgatcttctttggcacgtgaagggtcctgctaaatgcaagttattcctctggtttgcattttagcagcgctgctggacagccgatctcctctagaagcgtggtatcgatagcaactcggcttgccccttttgtgctcaggagcttgagacggcgaaacacattctcctagactgcgtgttcgctcggcaggtctggctctgtgtgctgtcgcctcctggttgggctgccctttctcctccccgtggaaactggctctaggactggtggccatcttctagggcttgcttacctacgcatctccgtgccgacttcgactcccaagtcctccttgtctcttggcagttatggaagaaacataactctagggtcttcgactctgcgctctcttcggtcttagtggttctagagtccatcctctcggagggtcgtctgtggtcgttagctggcgttgcttcttttggggatttcttgcgagtgtagcggggctctgccctcctcc

SEQ ID NO: 5042 - DNA, 198 bp, Oryza sativa
  Clone ID: PAT_MRT4530_11869C.1
atggaggagcaaagcgttgaacctccacgagcgctcaggcaaaacaccaggccgatcgacgccggggccaacagcaagctgcagggcgttgttgctcgtttgcgtgagtgccctgttagtcaagcaggggagagcccagctgtgagcggttggattcaaggcaacccacttatttccgactcctcccatgcctactag

SEQ ID NO: 5043 - DNA, 1125 bp, Oryza sativa
  Clone ID: PAT_MRT4530_1186C.1
atgtactccataaccgccgcgccggcgacggtgtcccacctcgtcaggatcgacggctactcccgcaccaagaacctccgcaggggaaggttcatcgaggccatgaacttcaccgtcggcggccaccgctggttcatccggttctaccccaacggccacggcccccgcgatgtcggcgtcgtctccgtctacgtcggcatcgcgggcgcctaccgccgcggcggcggcgacgccaagccggtcatcgccgacgccaggttcagcctcgtggaccgcgacgggaggccggcgccgccgtcgttcgtccagggcatgcccgccgtcgacttctccgggaacgacttcgggatgaacatcaagagggcggagctcgagacgtcggggtttctcaaggacgacggcttcctcgtccgctgcgaactcggattcgtcaacagcgccggcgacggcgacggccgcagaggggttcagatcaaggaggggatcaaggtgccaccgcccaacctgcaccgccacctcgccgatctcctctggaagaaccaatccagcggcgacgtcttcatcgaggtccaggggaagacgttcacggcgcaccggtggatgctcgcggcgagatcgccggtcatggcggccgagctctcgtcatccgactccgacgacgcggcctacaccgacgccgacgccaccaagaacacaatgatgacgctgcgcgtcgacgacgacatggacgccgagacgttcagggcgctgctccacttcatctacaccgacgcgctgccgccgccgccccagccccgcgcccgcgacacgaaggagaaggaggacgaggcggcggcggccgaggcggcgaggcggctgcacgcggcggcggcgaggtacgggatggagaggctgcagctgatgtgcgaggacgcgctgtgcaggagcctgagcgtcctcacggtggcgtcgacgctggtgttcgcggagaagcacggatgccgcgtgctcaaggcggcgtgcctggacttcctctcgtgcaagaggaagctgaggcaggtgacgaggctggacgatgacttccgtctgctcaccaccacttgcccttccgttatcaaggagctcttcgcgcaggtcttgaagtag

SEQ ID NO: 5044 - DNA, 654 bp, Oryza sativa
  Clone ID: PAT_MRT4530_11870C.1
atggcgaaggtgcgggggaaggcgggtgcgggtgcgggcgccgcggcggcggcggcgacgaggaccaagtggaggagcggcgcgcaggagaggatctacgggcggcgcctgctcgacgcgctgcgggccacgcgggacggggctgcaggcgggggcgggggcgcgccgccgcagccgcgggcggtgaaggccgcggcggactcggcgctggcgctcaccgcgcgggggcagtcgaggtggagccgcgccatcctgctggccggcgcggcgtcgtccaggcgccgcgtgctcgtcaaggccggcgggaagatccgccgcggcggcggtggcaacagctgccgccgcccgcaggcgcgcgccgcggcggcggcggcggctaaggcggccgcggccgcctcctccgccggcgagcccccgatgctgaaggagaggaaggtgaaggagcgcctccgcgtgctgggccgcctcgtccccggatgccggaagctccccgcgccggcgctgctcgaggagacggccgactacgtggccgcgctggagatgcaggtcaaggccatgcgcgccctcgccgacgcgctcgccgccgcgcagctctcctcgtcaactccgcagcaggcggaggccgccgccgacgagaccgagatggagaggtga

SEQ ID NO: 5045 - DNA, 345 bp, Oryza sativa
  Clone ID: PAT_MRT4530_11871C.1
atggcgttggaggttgtggcggttgggtgggcgatcaggacgatcggatggatcgtgtcgcccatgaccaccaaggcggtgaacaaaggcatcgacctgctcaactgcgaccaagaagcccagctgcgcaacctggtggcatgtcttgagccgcagctgcgtaggcagatggaacacatgacatccatgccgtatctggacaagtgggtgcagagcctcagatctgccttctacgacgcagaggacatcgtggacatccacgattaccttaacctcgccctccacatgcagctttgtcgctttggctgcaaaccaaaccaagtgacctttttttcccccttctaa

SEQ ID NO: 5046 - DNA, 327 bp, Oryza sativa
  Clone ID: PAT_MRT4530_11872C.1
atgggctgccttcagctcgtcttcacgctcccaagtagcttcttcctcagcgtggtttctccattggaccttgcaaaaacggattacccggttcctggtcctgcgttccatggtgtccaggattttcactggtctctccacgtaggtcaagtcttcgcgaacttcaatctgctcagagtcggcctactcggatggcactcgaaggcatttctcgagttgcgacacatggaacacatcatgcacgttgcccaaggaggcgggcagctccaactgattacggcgtcggttatctgcataactcttctgccgggactgtgccacctttag

SEQ ID NO: 5047 - DNA, 894 bp, Oryza sativa
  Clone ID: PAT_MRT4530_11873C.1
atgggtgacgtgcggcggcgcgacagcgcaggtggagtgcgcgcagcgagcacggggctggcgtgcggcggcgcaggtggcacgagcgtgatgcccacggagtcgggtatccgtggatacccaacccgatgggcacgggcgtgggcacattcttttgtccgtgagcatgctcaacctgtcatccgcgaacttagtgggcacaaccgggcttcatatttcacccgtggggggctgcgcgtcgtcggcgcggctcactggagggggctgcgcatcgccggcgcgacaaatgggagggagcgcaggcggcggcgcacatgcgcacgggagggagcaagcggcggtgcacgcaggcaagcccgtccactctgtgtctccgtccttgtagcatgttcatcttatgccagatctgaaattgatattatgtggtatctagtggatacccatcaggcatgcccgtacccatcgggcatggggttttgctcgaaagacttggcggcgtgggtcgggcgtgggcgtgtgggtctcggcgggcgtgggcggcgggggcggccgcagcggcagcgctctgagaggaccggggacggtggaaggggaggaggggttgacccgaaggtgctgcggtcgctgccggtcacggtgtatagccgcaacacagtggcggcggctgcgaaggaggaggaggacgacggcgtcgagtgcgcggtgtgcctcgcggagctcgaggagggtgacgagcgcgagcacgacatagttgcagtgcgccgcgcactcgaacccgcgctcgccctccgccgcggcgaactgcgtgtgcacctccagcggcatccgcgccacttccgtccacgcgccgcagctgcttgctccacctccgtggccgccgccgccgccgcgtag

SEQ ID NO: 5048 - DNA, 956 bp, Oryza sativa
  unsure (1)..(956): unsure at all n locations
  Clone ID: PAT_MRT4530_11874C.1
cntttccttttancccccttcccccccctttgggggttttntnggggggtttgggggaaaccattttnnaaaaaaaaccccaaaaatttttgggaaagaaaaaagaaaaaaaaaattttcccccngtttaattccctttttaatttttgggggccttcccttgggggaaaatttgggggaaaccccccncannggggaaccangaaaaaaaaaaccaaaaacccccccttaantnccttttgggggantttcccnttcctttaacaaccccttcccctnttccccccaaagaaaanccggtttgcgggaaaccttttcccattccttccccccanttnggggggaaaacaacttgggctttccgnccccntttgccccccaaaaagaaaaattttttgggggnggaaacccttaaaaaaaacctttggcccccccgaaatttnttgntttggggcgattccttnccncccccccccccnaaatnaaaaaaaaannccgtttccnttgnaagnaacttggccctttcccccccccangnaaattggttttgaaaaaaaaaaccttgnttttttggaaaaaatttgnaaccccccgnaattngggccccccggttgcccttggcctttttttggccttggnccctttgntttgnaaanaaaaaaaaaaaanttnttccnaattgnccctggcccccccccctnnaatttttttcctaatttgggggggganggaaagaaataaaacctccctttttnaaaccccctttccccccccttgggttttgcccccanaaaaggggtttngggggnttttttctccccccccccanggggaattaaccccccanccancccccttgnaanttttcccnccctttttncccngggttggggaaaaaattttttnaacctggaanntggggcccttttctttnccccaangggggaaanaagggg

SEQ ID NO: 5049 - DNA, 310 bp, Oryza sativa
  unsure (1)..(310): unsure at all n locations
  Clone ID: PAT_MRT4530_11875C.1
cggctttcgagcggccgcccgggcaggtactgtcgtcaatagctgaagcttagtggcttttcttggaagcagggtatcactcacttcggctgcaagcagcctcgttatcacctctcatctcagatccccggatttgcctaaggaccacgactacgggcttgaaccaactattccaacagttggccgagctaaccttctccgtccccacatggnactattgagcggtacctcggccgcgaccacgctaagccgaattctgcagatatccatcacactggcggccgctcgagcatgcatctagagggcccaa

SEQ ID NO: 5050 - DNA, 184 bp, Oryza sativa
  Clone ID: PAT_MRT4530_11876C.1
tttttatcttccgtctgggggtccttctaccgagatagtccatcgagtgctctgatttgcatcaactaagctagcatagcattatcaggctcaggaccaatgacgtgatgctcggtcagcctgatcctggctgatgtgaatatggatcagtagcagatgcacaagaatgtgaaggtcaaagcca

SEQ ID NO: 5051 - DNA, 2658 bp, Oryza sativa
  Clone ID: PAT_MRT4530_11877C.1
ggggcaatcatatcaggcaagcaaaacttcgcctcttgaagcaaatgagagtgatatctttacagagatcttgccttgaaggtatattataatcaagttactgaaattctacgcataactatttgatctgggatcacatttcctccgatcatacacaaaacggaagctaactgagagctcaatatacttgtaaacctattagcacttctactatacaccagggaaacatggcagggaaaagctttgatcctagaattactagaaggcagggggtaaaaaaaacaaaaagaggacaggaagaatgggtgagggaattatacatggtcgaatagctcaacttcgcaggattttcgaaaaggagctttaatatctgtgtgagacgctctgcttattcctgtcccaggcagccctaagagcgtcgtaggagttttttccttcgaccactcgatgtgaatcttgtcgagctgggctccagtctctacagttctgttgttcattcagcattcgccagctcctgctcccagaatcactacttggggctgaaacagagccagaatcgacaaccatgtcgccctctagtatgcgtagaacctcattttcacaatagcggtcacccaagcgtggatctatgagctcatcaattgcatactcctccaagaaagggcgtgcccattcagtcaaaaattgctggcccttgggtcggttgatgtcaacagccttgcgcccagtgacaagttcaactaacacaaccccaaaagagtatacatcagctttctctgttatttgtccactctgtgcgtattctggtgccagataaccgaatgttccaattactctcgtgtcaacacccatgtcaccatcaggttgccatcgtgccaacccaaaatctccaaccagtggctcataatcatgtgtaacaaggatgttgtttggtctcatgtcacgatggattatacaaccaactctgcattcttcatgcaaataccgcagccctcgagcagccccaactgcaatcttttgtctagcagaccattgcaatgtctctttattacgaccataaagatgtgaatccaaggatccattgcagatgtactcatagaccagcaaacgcctcctatcctcaacacaaagaccaatcagcattacaacatttcggtgttgcgcacaactcaatacttccacctctgaacagaactccacatcgccctgagaactagcaagtttgtgttgcttaacagcaattgcttgaccatcatgaaggacacctcgatgaacagatccaaatccaccttcagccaggaaattggcttgagagaaaccaccagttgcaagttccaattcagcataagtaaaccatcggggaggttttccaaaaacaggtgccttgtgctgacatattgaacacaatggaggtggtccagggggtgcactccttgccaacgagacagcatccctaacatttcctcggaagtttagatctgaccggcttctcatagaactaatttcattcaagagatccagcttggatatattctccagcaaagcatctgctgtggcagtgcgagcttttcgtggaccttttccatgtgttctcgacgatgctgatccctgtagaatgtcaaccatccatggttgaagcgagaaggatgctggaggactcaatgtttcgctgtcagaatcagaaatattgatgtccaaatgctgcaccctatcctttgttgctggtgcctctttcttcatagaaccatttgtgtcagaagcactatatggagaagtccctggatctgaacttgagacagaggatgttccagcttcagtactttcaaaagttgtctccaagtcagggctgctatttggtgttacagccggtcctcgaattgacgtccgtggctcttttacatcagttgttgttttaccaacagaactatccaacataggtggaagtgaacaggatactttggaatctttatcaggagatcccacaagattcaaccgaacaactttaggttgagaacgcttcataacaacaatattacactgtagctcctccacgcaatgtttctcttcatgcttcaactccttgtctatcacaacccagcttgcttgtgctcgcttagactcagcagctacaacaccaggaggtgacccagacacaaccttagtcttcacatttatcttgtttggatcgtaaacattcttaagtttgtccatcatttgagaagacagctcagaaatatccttctgatccaacatagtcttgttgccacttgcgcaatcaccagcaaagagtggaaagccccagaacttcctgccagagctatgtgacgggacgacgacgagaagcaagatactgccgccgggctgcacgacgtgcgtcaacgcccacataagggccgtcttcgagatctccctggtggccgcccgcaccgccaccaccaccttctccgccgccgccgcccccgccgcgccgcccttctccgccacagccttccccttcctctgcagctgcagctgctgctgctgagtagagctcaccatcataccctgtcgtccctccaccactccaccaaaacaggcttttcctcctcctcctcctgctcctcgccactgatcgatgggtcccaactcccgagcttgctggtttgctactgctgccat

SEQ ID NO: 5052 - DNA, 438 bp, Oryza sativa
  Clone ID: PAT_MRT4530_11878C.1
tctaatcttattggatgcatgcattatatttatgtggatgatctaaactacaagatgataataattgtttcttggtctttgggttaagggtggttgtgtcttatattttatattttagaataaaggaagtaatagatatatgtggtgtgtctcatgttacgccggccgccaccgctgccaaatccgtgcaggggatggccgccgcctccggatccgggcgcgagggggccggttgaagtcgcccctcgccgccgtgcacggtcgccgccgcctcgcctcgtcgacaacgaaagtcaagagaggagaggagtgaaagtcgggagaggagaggagaggaagtgagagagatagaggggaggaaagtgaaaataaaaaggaagagagacgaggtgtgaaaattttaaaatgattgagagggagaggaggtgtgaaaatttt

SEQ ID NO: 5053 - DNA, 372 bp, Oryza sativa
  Clone ID: PAT_MRT4530_11879C.1
atggatcccttgaatgatggctcaaagttcccgaccccgattacaccgtctctattgaagaatgatggttcaaagttcccggagtctaggaatcctaagcagtgcaacatcatacaagatagagccgtggccggcagcgcgccggccagcgggtgtgtagaaattgagaggagcgccggctcgtcgccgtcgtcgtccaggcacagcactccacggcatatggtcggcttccggaactccctcttcggcatcctctcatcgtcacaagtgaacggaatggcaaatctacaaaacacaacgtttggagtcccaaatatacaatttttctcctacaacttcatcggccacgacgcggtgctggtgtcggcgtag

SEQ ID NO: 5054 - DNA, 2019 bp, Oryza sativa
  Clone ID: PAT_MRT4530_1187C.1
atggacgccaagctgctcctcctccccttcccctcgccgccggccactctccaccaccacccgccgccccccaaatccctcttcctcggcgcctccctcccgctcctccacccgccgccgccgctgcggctgctgcggcccggcgccccgcggcggctggcggtggtggcgcaggccgccgtgaagcggcgcaaggagatcccgttcgacaacgtcatccagcgcgacaagaagctcaagctggtgctcaagctccgcaacatcctcgtctccaacccggaccgcgtcatgagcctccgcgacctcggccgcttccgccgcgacctcggcctcacccgcaagcgccgcctcatcgcgctcctcaagcggttcccgggtgtcttcgaggtcgtcgaggagggcgtctactcgctcaggttccgccttaccccggccgccgagcgcctctacctcgacgagctccacctcaagaatgagtccgagggcctagccgtcaccaagctccgcaagctcctcatgatgtcgcaggacaagcgcatcctcattgagaagattgcgcacctcaagaacgatcttggactcccgccggagttccgcgacactatctgcctcaggtacccacagtacttccgcgtcgtccagatggaccgagggccagggctggagctcactcattgggaccctgaattggcggtgtcggcagcggaggttgccgaggaggagaatcgagcgagggaagaacaagagaggaatctgatcattgaccggccactcaagtttaatcgggtgaagctaccacaggggctgaaattatcaagaggggaggcgcgcagggttgcgcaattcaaggaaatgccatacatttcgccgtactctgacttctcgcatctgcgatccgggtcggctgagaaggagaagcatgcttgcggcgtagttcatgagattttgagcctgacacttgagaagcgcacgctggtggatcatctgacacacttccgggaggaattccggttctcgcaatctctgcgtggtatgctaattcgccacccagacatgttttacgtgtcgcttaagggggacagggactcggtcttcctccgtgaggcatacaagaactcccagttggtcgagaagagcaaactcgtgctgcttaaggagaagatgagggctcttgttgcagtcccacgcttccctagaaggggtgtgccggcaactagtgaggaggctgatagaaccaatggagctgcgcaaatgctgagtgaaggaagcgatgtagaagatgatgaagacgagggattgtcggatatggaagacttaattagtgagatttctggtggcaaatctgacacagactaccactggggagatggctgggttggcgagaatgatgactcgccaccagacttcgaagacgatgatggctcaagtcttaaagaagtcaaggtgactatgaagaaaactgctaattctgccaatggcaaggcacatgttcctgtttttcctgatggcagaccaagggaacgatgttatttcatcatatctagaaagtcgcaaaaccctcagtcctttgagtcacaggaaggttcaggatggaatactcggttcattgactactactttgttgttgatgatgatgatgatgagatattgagttctgttattcttcatgggctcatggcctacttccgctccttcgtcgacttcgcagggtcccacactgactcaacaaaattgaccgtagtcaaagcaccacgtcggatcaaacgggagctatactgccttgggacgtgcacgtctctccatattgcgcgaccagagtgggcccaccaaggttcgcttctggaatggatcaagtcggcccatgcgaatttggcgctaccgcagcgatccaactcggcgatactgcaactaactacacgtgtcgtatcggctacacgaggcattatgttgggacgaaagctcatccatgcagaactgttcgatggagacgatgccggtcccggcgccgcgtaccgatga

SEQ ID NO: 5055 - DNA, 1121 bp, Oryza sativa
  Clone ID: PAT_MRT4530_11880C.1
agctaacccaacccaaaccaaacacgagccggacgagacggagcgctccctccctctctgtcgcccgcgacgccgcgaagccgcgggcgccaccgccgccgccgccgccgccgccggagatggacggctccggcagctgggacgccatagactggaaccaaatcaaggagccgaggccgccgcggagttcgtcccggggcatggaggacttcctcctcgaggatgaggaggtttacgcccagggtcatggtgttgttctactaaacacagatgaggctggcattctttcagtgacaaatttccgacttctctttgtgagccaagccacaaaaggcgttatagagttgggtaccatcccactaactgcaattgagaagataaatgatgacgtaaagcttcaacccttgccccgccagcatgataagaagcagccccgtgaacttcttcaagtcatcggtaaagacatgagggtcattgtgttcgattttcttcctaaaaccaagcagaaaaacgaagtgtttgatgctttgagaagatatagcaaacctactcatctgtgggatctatatgcattttcttgtgatccctccactgtttatcagaaatctgatccaaagatgcggctcttgaaggaataccatcgcctttttaggaaatggttcccgcatagtggatccgagttcgaaaaagacttgcgtaatgaatggtggaggtcttatgctccctatattttggaaaggctgatgactgttggtgaatggtctggagctgttctggcaaggtcatctcagccattggtaggattgatgatgaattttcggaacaataccgatgagaagcttgtttttgctctttgcacccaaattattgatgccactgggtctctaaggaagttatatatagttgatgcccggccaagagcaaatgctttagcaaatggtgcaaagggaggtggctcagagtcagcatcaaactacccaagatctgaggttctctttttaggaatacaaaatatccacacaatgagagatagtctttttcgccttagggactatgttgatacccatggatcagtatcatcaaatggaacatcatcagctgtatctcttgttggagaccgg

SEQ ID NO: 5056 - DNA, 450 bp, Oryza sativa
  Clone ID: PAT_MRT4530_11881C.1
tttttttttttttttttttttttttttttttttttttttttttttttttttttttttttttttcccaacccaagcaaaaaatgctttctgtccagggggtcaaaagggaaaacatgtgttttatgctggaacatcccaaataaaacaggggctccaaaatggggggggcgaataacatataacggggggtgggcaactttttaagccccaataggaacatccttactgcccccgggggacccatttttaacctttttaccgccttttttggtggattggcttgatttttttttttttaccgacttttgcaagttcttttttgctaccaatgcataaggctttgcctgggcaatttcacaattttttactgatgagccatttgggtcatttttgggggggcccttttttatgtccggatctacaacagacatccgggggaagggggaaccc

SEQ ID NO: 5057 - DNA, 548 bp, Oryza sativa
  unsure (1)..(548): unsure at all n locations
  Clone ID: PAT_MRT4530_11882C.1
gcacgagctcgtgccgaattcggcacgagaatcttttgagcctaatcacgccatgatttgataatgtgatgctatagtaaacatttgctgataacagattaattaggcttaacagatttgtctcgcagtttacaggcggaatttataatttttttttattattagtctacgtttaatacttcaaatgtgtgtccatatacgtcaaatattttttttttttgcaaaacaactaaacacggcctaaacctaagactacaaagtaaaatggcaacgacgtatagacgatgctgggctgatgtcaatctatcagcctttcacaggcatgcaacttaagccatttgattttaccactttacaactaaatgttgaaagcttacttttgacccaaaaaaaaaactcgagggggggcccggtcccaattcgccctatagtgagtcgtattacaattcactggccgcgttttacaacgtcngtgactgggaaaccctggcgttacccaacttaatcgccttgcatcaaaattcccctttctccagctggcgtaatat

SEQ ID NO: 5058 - DNA, 177 bp, Oryza sativa
  Clone ID: PAT_MRT4530_11883C.1
atggatcaagatggagcaagggagttcaccctagcgtcgccgtgccccgttggtggcggccagagcctagcgtcgccgtcgccgccgtcgcttcagtcgtcgtcgtcgctcgggaaagccgtcgtcgggttcgccaagccgtcgccaacttcgtctgcccctccatcgtcgctgtag

SEQ ID NO: 5059 - DNA, 452 bp, Oryza sativa
  Clone ID: PAT_MRT4530_11884C.1
ctagagccaaatggcgccggcggccttgagcatggggacgagcttgccggcgaggtggagcgacatgacgcggtcggtggagccgacgagcttgccggcgatgaagacggcggggacgggcggggagcggccgaggcggcgggcgaggtcgcgctccatgtcccggccgtggagcgggtcgcggtcgagctcgtggacggcggcgccgacgccgaggtcggagaagaggctcaccaccgtgtggcacatcgggcagttgctcgccgtgaagatcaccaccgccttctccgtcgacagcttcgccaccctctccatatcgatcgatctccggcgaaactaatcaaacaagcttaattagctatctgctgctgatcgatcgattagtgtatgtgatgatgatgatgatgatgatttgctgcagtgatggatgtttgcctcgtgccgatcctgca

SEQ ID NO: 5060 - DNA, 297 bp, Oryza sativa
  Clone ID: PAT_MRT4530_11885C.1
ctagccaaattgctcctccggctagccaaatgtagccagcctcctctactggccaaaggtaggtcccaccaccactcccatccccatccatcctctttctctgccgtcgcgcctcacgcacgagccgtcgccaccatcaccgctgcgcgtgcggagagccaccgccgccgctgccgcctcgcgcacgagccgtcgccgccatcgccccgccgctggatcgatgcggccacgcgggagaaaagaaaggggaagagaaagagaaagaggaggaagaagaagggaatggagatatgagga

SEQ ID NO: 5061 - DNA, 702 bp, Oryza sativa
  Clone ID: PAT_MRT4530_11886C.1
atggccacgcagatgtgcagggactttaagtccacctgccccggcacgccggcgactagcgggctagcaacgggcgggaggagcatgttggaccgccaccgcttcgccttgggccgcgtcgtcgctctgcctccaagctgggtcgctgccgctccgctcaaggctgcgccgtcactccaccatgaggctgggccgccgcacgcgtcggggtcgcccagccgccatgccgtcgctcagcctcaacgtcgggccgccactccgttcgaggctgcgctgtcgctccaccatgaggttgggccgccgcgccgccgctacacgttagggacgtcacgccgtcgctccaccttgggctgcgcgcgaggccgcgccgccgcagctccacctctagctgtcatctctatgtggccgttacctcgtcctcgcgtgcgtctcggcgtctcagccatggtggagactggagaaggccagcgcggtggcctcccgtcgccgaccagcccccttgaccagatggcccttcgcgcgacgtcactgctgcacggcggcgtcacgggcggggtcggcctcggcatcctggccgctggccgcgctcgaggcgcagaaggaggaggaggagcagaggccggtggtgtccgccgccgtcgtcctctgccaccgcacggcgccgcaccgcgcggcagatcttcttcaccaacagaatcgtag

SEQ ID NO: 5062 - DNA, 335 bp, Oryza sativa
  Clone ID: PAT_MRT4530_11887C.1
gtctaaagatcacaacgcttgctattgatatccgataggtggagtcaacaagacataactgatatcttacaaagcacacctccccaactgcacccaattacgccatgatcactgggcaaaagcaaacgggttcccattcctccccttcaccagccccaaaccataaaccccacaacaaatcctcctaagtgacggcatataaggtgatgaaaacaaagcaggatactccagagtcgtaatggccaacttcaagttgacacttttcatgccacagcccctaatacggctgggcaccctaaaacccgaggtgcacgtgcttgaaggggcccctaact

SEQ ID NO: 5063 - DNA, 485 bp, Oryza sativa
  Clone ID: PAT_MRT4530_11888C.1
atgaggcgaacgccattctcgctgccgcggccatcatcgtcgtgttcgtggtggtgccgtggtggtggtctcagctcgggctccggccgcgcgccgccgccgccgaaacgagagaggggtggggggtattatcggatgaggcggattgtggaaaggaagggaagggcccaagtattccacgtagcgagttcgcacagcccggtggcccacgagaaaatggacatttagccatcttcaaaacacggtttcgctagaatacaccaatatcaaggcggcgcaactcgctggattgccattttctcattttctcttaattccgaaatcattttgcctcttctttgtggtgattagacggaaatgcccttggggccaatggcaggtccatctcttctctttctttctctccttcgttttgtgctgccggcggagatggtcgagcgcggcgaggtggtcgtcatcgttgctgacgagggcgtcgacctgtc

SEQ ID NO: 5064 - DNA, 438 bp, Oryza sativa
  Clone ID: PAT_MRT4530_11889C.1
atggcactcgaggtgcagctctccctgttgccgtcgccccaccgcctcgctagagccggcagccgccgccgcgggggaggtagtgacggcgaggagctcggcggcgggcgtgatgagcatgagggagagcgggaacgcgcctcgccggtggagccggagcgggaggtggtgggcgtggtcggggagcgcgagcggctcggtgggcgacccgcgcagcgcgtccaccaatggcgccgccaccacaagctggaggtgcgccgacgcgagcttctcgaaggtgttgtccaggcgtcgcgccgccacgtgctgtgtcgctgtggtcttgccccgtgcgagcagcagccgcggcggccggcggcgcgcaacgtctctccgcctcaagcgaagctgagatgccttcgttcgctctctcttttggttatcacgcctggtacctag

SEQ ID NO: 5065 - DNA, 332 bp, Oryza sativa
  Clone ID: PAT_MRT4530_1188C.1
ggtaggtacaggcgaatctacaaacagatgcgtgcacagtcgtgctcgattggttgcttgctcggctcactctgatcgatactgggtggagcgaggtgttgtgagctgtggtctgagccttctatcatgctgctgatcgtgcagctgctctccgagcagagcaccagcgtgagcaccagtgactggtacattaactgacacatgatccgacagatcctgcccgagtcggctgctccggcggctgctgcggcggtggccaagtgcgagcgcacgtccgaccaggcagcggccgagacaacgaaggaggagaagaacgaggatctcgtcgacga

SEQ ID NO: 5066 - DNA, 600 bp, Oryza sativa
  Clone ID: PAT_MRT4530_11890C.1
atgtcatgtgcgacgccacaacggcgcgagatatttcggtcggcgccgtgccgtgccgtgcgcgaggcgtgtgtgccgctgccggccacggcgtacgacgcgccgaacaccgatggcgtctttgtggcgtgtagcctcattgactacacctcgtcctcatccatcgccatcgatgtcgcgacacagcacgtggcggcgcgacgcctggacaacaccttcgagaagctcgcgtcggcgcacctccagcttgtggtggcggcgccattggtggacgcgctgcgcgggtcgcccaccgagccgctcgcgctccccgaccacgcccaccacctcccgctccggctccaccggcgaggcgcgttcccgctctccctcatgctcatcacgcccgccgccgagctcctcgccgtcactacctcccccgcggcggcggctgccggctctagcgaggcggtggggcgacggcaacagggagagctgcacctcgagtgccatctgatttgggggaggggagtgaaccacaacagcggcgccgacaccatcaccgccgcacacaccggcgatggtgaggcgtggcacggggaggagcaacgccggtcatag

SEQ ID NO: 5067 - DNA, 1112 bp, Oryza sativa
  Clone ID: PAT_MRT4530_11891C.1
gcggccgccttttttttttttttgagatcaaatctattctgctcatcgtcaccatatccatggtaatgtacccatcaacttttggaacaactgaacaagcacacatattttcaggacatgcatgcatgaccgtataatatacgtatacggctacagagaaatacgtacacggctaaaaccttacacttaattacttctcctccatattatcacgtagagtaagtacgtacatgtttgtactatggcgtacaaaatgcaaagaacaccccggaaaaaacgcaaattagatagcagtacatactagcggccagcgtgcatgtgcagcggagggatttaatacgccgccgccgccgccgccggcgcgccgccgtggccgccggacttgtggccgacgaccgacgacagcgcgttcctgacggccaccgcgacgccgcaccctttcacgagccccctctcgcactcgcgctccatgccgaagcacctcgccgcggcggcgtcgtcgtaggcggcgccggcggagcacgcgcgcgtgtggtgggagcgcgccaccgccatgggggacgcctggtgcacggtgaacaccggcgacatcgacacggacgacggcgaggagtaggaccacgacgaggaggaggaggtggagcacggcgacgtccggcgccacggccgccggaacatggcgccgaggacgccgcgcgcgccgccggcggaccagccgctcctcctggagccggacgaggcgccgccgccgccgcctttcttgccggcggaggcgtagtacgagggcggcggcgtgagcggcgggagcacggcggtggagggcgagctcttgggcgtgccgggctgcgactcccacaggaacggtacggatcccgccgacgcgacgccgtagtacaccctgaacgacggcacggcgagcggcgccgccgccgccgccgcctccttggacatcatcctcgagtagagcttgctcccctccttcacatacacctcctccttgccgttcgtgctcgccatagcagccaccaacacactcacactaagctagctcttcactctcttcttggctagcttagagcgggcgcgtgggctagagagagagaaggtgttct

SEQ ID NO: 5068 - DNA, 297 bp, Oryza sativa
  Clone ID: PAT_MRT4530_11892C.1
taaacaatttcaaccaaaagaacaaacaggtcaacataaattacaaaaaaaccctcaaggtcaagagcctactcacaacttgctgcaacactaaaattatatctggcggacaaaatcaacctctgcaaaaattcaaggatgggagaaaaagggacccgatccacaagaaaggccaaagtaggcaatctaaaacacaagtttcggccggccgcttcaaattgcaaatggaagaccccttggctagaaaaaggcaacccgaaacctgaaaaaagggaaaaagccctaaaccaaacgaac

SEQ ID NO: 5069 - DNA, 567 bp, Oryza sativa
  unsure (1)..(567): unsure at all n locations
  Clone ID: PAT_MRT4530_11893C.1
tcggatgaaagtatcgcacatattcttgtttccggcaggtagctgctcacatgggaatcgtttgacggcaaatgctgctgtgtaccaacaaaaagagataaaaatcaagcaattgtcgtgcaagtaccaatcaatcgncaggtcgttttcttctttccttacccaatggaggggattggagcagttgccgcgtccaaaaaagatcagaaatctgcctgctcgtcgacatggatgcattggatcatacagctacacaagctttctccagtcggattggtagattacacgcgtaatcgccgaccagatggagagaatcagagtgctaattcgcctcttcttcaccatgaacacgaagcttctcatgatcctgtcgccgatagcttcgcctgaactactacaatttctgtccattttccttactgccgttcgtagctgaaggttccggcctcacaggcagatatgttcatttttattcctgaaaaaagtatggagatttcataacggaacgatacgaactcatatcgccatcagaaattaaaatatgaaattgaattataatttgcagcg

SEQ ID NO: 5070 - DNA, 1449 bp, Oryza sativa
  Clone ID: PAT_MRT4530_11894C.1
caaaagccctacccttgaaccctctcccaccccgcctcgcccgcggctttgccgccgcgtgccgccgcctcgccatcccgagcgagcatgcggccgccctcctccacctcctcccctcgccgccttcccgtttgctagggctccggccgccttgccgttccttcccctcctcgtcatcactagggtttcgacctcgcgccgcgggggagtttgtagcccgactgacccgaagctgttgccgccgcccgccctcccggccgcgccatggtgaggctcaccgccgacctgatatggaagagcccgcacttcttcaacgccgtcaaggaccgcgagctcgacatccgaggtaacaagatccccatcatcgagaatctgggcgccaccgaggaccaatttgacacaattgacttgtcagacaatgagattgtcaagcttgagaacttcccgtacttgaatcgtcttggcactctgttagttaacaataacagaatcacacgtatcaatcccaatcttggtgagttcttgccaaagttacatacattggtgcttacaaacaatcgtcttacaaatcttgcggagatcgatcccctggcatctcttccaaagcttcagtttcttagcttacttgataatactgtaaccaagcagccagactaccggttgtatgtgatccataaattgaagcatttgcggttgctggatttcaagaaagtgaaacaacaggagagaattgcagcagcacagaagtttcactcaaaggaggcagaggaagaggcaaagaaggtgccagccaaaacttttactcctggacaggtggtggatgctcaagataccacaatggaggagcagggtccaaaagtagttgctccaacacctgagcaaatcacagctatcaaggctgccattgtgaattctcagacacttgaggaggttgcaaggcttgaaaaggcactgagcactggccaaattcctgctgaatttgcaatccccaagccagatgctaatatggctgatgcttcagaggaaactgaaaagatggagacagatggtcagaaccaagaaaatggggcggatgagaagaagcaaaatgaagaaagcaccccaattgaagaggattgaaggcatatgcacacactgatataatctggcaccaagttggtgttagatttccgttttatttgtgggggcaaagccacattgcgatgcctgatctcgttgaatgctctcgctggtctctagcatagtaccggtatttctgtatcttgtgaatgctaacatttttcagaagatggaaaaactatttgctgtgtttaggaaacaagcttggggtattttataccttccagtaccgctagatttcttgatgttgtagactgtagacgctgtttcatgtggggcatgcgagatgttcactcttattttctggaaatttcccccttattgctctct

SEQ ID NO: 5071 - DNA, 486 bp, Oryza sativa
  Clone ID: PAT_MRT4530_11895C.1
atggggaggggaaaaagatacgggaggaggggttgcctagaaaggaaagggtgtgaggattcctcgcggtgggacgccaccgccacgccgcgcaagccgccgctgccgctggccatcttccggccgcgtcgcgccgccaacggcgagaagtccgtgggggtcgctggggagtccattgcctctggttttgagggggagattatgatccaggaacggtgtattgtgtggtacacctctgatcagagtaaaactattcgaataggcgtgcccgtggttatggactactccatcccgctcaccggcgtgcaccgacgatcgggagagcaggtctccggaacctctgccttcgacgtcttgcaccgggagaaggcagcaataaggggatttcttccccttgtggtgggtttccccttcgggaccgggaaaaaggttgggatcccggccttttcccggtcagccgaacgaagccttgaggggtcaaattag

SEQ ID NO: 5072 - DNA, 591 bp, Oryza sativa
  Clone ID: PAT_MRT4530_11896C.1
atgcgtgaagtgtcacgccaaggatatgggacaggtgtcgaccctgggattcgcctacagtttttttctttttcagggggattcgtctactgttggctgcaccgcacaggctactgcaggaggaagagagagagagagagcgcacgtaacgccgcggggaatgggtcacgcgccacacgtgggcgacggccccgcgcggtggcgaggcgaattgggtggaggggacggggggccgagatatgtcacatcgaatttttgatacgggccggccgtggccgtgggccgcgcggccacgtgacgatgccggcggatgccgcgtcccggagcggcgttggccactgtggccgcgcgcgcgcgagcccgaggccggaggccaccatcatccgtccacccacccgtgccgtcgcgtcagctgctgatcgcggtctcgatcgccttggcgcggaacgctccgatgtcgtcgcgtgcgggattgtggcggcgtccgtgcctcacgcggacgtgatcgcgcattgggggtgtggtgtactggtggtggagcaaacttttcgcaaggattgtgtatttttgtgccgtgcgagggctggttga

SEQ ID NO: 5073 - DNA, 293 bp, Oryza sativa
  Clone ID: PAT_MRT4530_11897C.1
accatcgttcgctcacgcgttcgcttgagggagaattttttgtgctgaaattgttgatggatccagaaatttttgctcgtatcaagaagaaggggagagaaatcttggtttaaatgcatggggctgaaacgattctgcgactggatatcgcctgcgagaacaaccaccccttagcttggacgctcccgtgagcagcactgccttgtccggggccggcaccctgttgccggaatcctcatgcgcgttgcgagagccgacggtgggcatcctcacgggcccgacgagctcaggcg

SEQ ID NO: 5074 - DNA, 477 bp, Oryza sativa
  Clone ID: PAT_MRT4530_11898C.1
agtcgaatgccgaatgctaaacaaccaatacgcgttgtgtgcgatagccacttacgaacgcctctagcgtgtcaattagttcaaacagcgcgccaatatccaaccattattgcaaccgcttcaactgatagtacaaaaatagcgcaattgaaagcctttggcgtgcaaattatccaatgtaaggtagccaacaaacaagttgatttagttgatttattagccaaattaggtgcaatgcaaattgacagtgtcttgcttgaagggggatcaacactgaattttagtgcattgaaagctggcgttgttaacagaattcattgttatattgcacctaaattattaggcggaagcactgccaaaagtcctatcggtggtgcaggtattttgcaactagcggaagcggttaatttaacgcttaaatccacacaatacataggcgacgatatcttgttagattatgacgtttcatcatcgcaa

SEQ ID NO: 5075 - DNA, 239 bp, Oryza sativa
  Clone ID: PAT_MRT4530_11899C.1
gttttagatcgcgagcgacgccctgacgcttgggaaattattgatagcatacgtcggacggcaagacgctaagaagcccttggaagagcttgtcttcaatttgacgctctcaaacatcgtttagtacgctggaaccatgcccgatactgatgtaatctagatcactactgctgtgatcccaacactgtacccagagctcgattatttctaattcattcatgtttatcgaaacctaccat

SEQ ID NO: 5076 - DNA, 344 bp, Oryza sativa
  unsure (1)..(344): unsure at all n locations
  Clone ID: PAT_MRT4530_1189C.1
gagaaaatggtgaacaacatgaanaaaatggttgaaaaacaaaatgaaaatggtgaaaaatgtgaagaaaatggtgggaaacctgctcnaatatctgatgatcaagctgttnntggcngcgncggttctgctgataanaaggaccaagaagangaaactgagaaggacnatgaaaaagaaaaggaggacaaggaagangaaactgagaaggacaatgaaaaanaaaaggaggacnaggaagangaaactaagaaggacnatgaaaaagacnaggaagangaaactganaaggacnatgaaaaanaaaaggaggacnaggaagangaaactaagaaggacnatga

SEQ ID NO: 5077 - DNA, 1455 bp, Oryza sativa
  Clone ID: PAT_MRT4530_118C.1
atggcgtcatacgacaaggccatcgagtcatacaagaaggccatcacaaccgctgcatccgttgcagcgtctgtgatgctggtccgcagcgtcgtgaacgagctggttccatacgaggtgcgtgatgtgctgttttccggcctcggctacctgcgttcacaaatttcatctcagcacacaatcatcatcgaggagactgagggctggtcccacaaccacgtctacaacgcggtgcgggcttaccttgcaacacgcatcaacaacaacatgcagcgcctgcgagtcagcagcatggatgaatcttccgagaagatggttgtcaccatggaggaaggtgaagagctggttgatatgcatgagggaacagaattcaaatggtgcttaatctcacgtagcatttcagctgaccccaacaatggcaatggcagcggccaacgtgaggtccgctcctatgagctgagcttccacaggaagcacaaggagaaagccctgaaatcatacctcccattcatcattgctacagccaaggccataaaagaccaggaaagaattctccagatatacatgaatgaatactcagactcatggtctccaattgatctccaccacccatccacattcgacacgcttgccatggaccagaagctgaaacagtcaattattgacgaccttgataggttcatcaagagaaaagattactacaagaggattggcaaggcatggaagaggggttacctgctgtatggtccaccagggactggcaagtccagcttgattgcagccatggcgaatcatctcaagtttgacatatatgatcttgagctgactggggtccattccaactcggagctcagaaggcttctagtcggaatgaccagccggtccattcttgttgttgaggacattgactgtagcatcgaactgaaacaacgggaggcaggggaggaacgtaccaagtccaactctacagaagaagacaagggagaagacaaagtaacattatccgggctgctcaattttgttgatgggctgtggtcaacaagtggagaggaaaggatcatcgttttcacgaccaattacaaggagcgtcttgatcaagcacttatgcggcctggcaggatggacatgcacatccacatggggtactgcaccccagaggctttccggattcttgccagcaactaccactcgatcgactatcatgtcacatatccagagatcgaggagctgatcaaggaggtgatggtgacgcctgcggaggtcgctgaggctctcatgagaaatgatgatattgatgttgcactccttggtctactggagctcctaaagtcaaagataaaagatgccagcgagaccaaggctgaaagcaaggatgcaaataagcagacggaggagaataaagatagcaaagcgatggagaacaaaaatgactcctcaactgatgaatgcacttag

SEQ ID NO: 5078 - DNA, 264 bp, Oryza sativa
  Clone ID: PAT_MRT4530_11900C.1
atggctgtgcaggcgcagtatgggggtgggatggcggcggggatgtgcttgccagaccatgaggtggaggcgcagatgcgggagctcggcgcgatgttctcggcggcaggtggtggttgctacaacggcggcggtggcggcggagggtatgactgcgccgccgtggtgagcggcgcggcgcagagcgagctgacgtgcaacaacggtggtgtttgtggtgacatgatgcagcggcggcagaagcagaaaagaggaggccagtaa

SEQ ID NO: 5079 - DNA, 197 bp, Oryza sativa
  Clone ID: PAT_MRT4530_11901C.1
ttggttgtaatattacgtaatcaatgatcaaattaattaattcccaaacatgtacatctatccatataaccggccggcggtggcggtggtggaggccgcggcggctgccggccgtgcagcggcggcagcagcaccggcgtggtggtggtggctcggtcaggacggcccttgaggactgtgcaccgacccctgcccat

SEQ ID NO: 5080 - DNA, 406 bp, Oryza sativa
  Clone ID: PAT_MRT4530_11902C.1
cggacgcgtgggaaaaaaaacaagaaataaataaaaaaaaaaaaaaaaaaaataaaaaaaaaagaaagaaactagggagcaaaagagatcaatagccaagaagactattaagccagagcacttggcgatggcatgagttctcgtcgcggaagtccgggtgggctgtacatttgataggttgcctgcttttgagccaattctgagtgtgaggtctcaagctggcacatctgagttcttcgatgtctctgatgagttcgcttcaatgtcccggtgtatctgttgtccgccccgttattgaacctagaggcctactactaccccattacactagtggtgcatctatagggtatatcatccgagggagaggtataacagggccgactttcccaggctgtcctgagaccta

SEQ ID NO: 5081 - DNA, 639 bp, Oryza sativa
  Clone ID: PAT_MRT4530_11903C.1
atggccgagggcgcagagctggtgggggagagcgcccaccaggacatgccgcgggtggtcgccgcgctcgccggcatcctggagcgcgtcgcggggcgcaacgacgcggccgcgacgcccgcggagctcgccgcggcgccggcgtcgccgttccgggcgacggccaagccgggcatctccgtccgcgcgtacgcggcgcgcatcgcgcggttcgccgggtgcagcccggcgtgctacgtcgtcgcctacatctacctcgaccggctcctgcgccgcggccggcggtgcctcgccctcgccctcgccgtcgactcctacagcgtgcatcggctcctcatcaccgccgtgctctccgcagtcaagttcatggatgacatatgctacaacaacgcctacttcgccaaggtcgggggcatcagcctggcggagatgaactacctcgaggtggacttcctgttcggcgtagggttcgacctgaacgtgacgccggagacgttcgccgactactgcgccgtgctccagtccgagatgctctgcgcggcgccgccgacgaggctgcactactgctgcctgtccgaggacgatgccggcagcagcagcagcagctcgctgcgtgaagcggccatggaagcaagctag

SEQ ID NO: 5082 - DNA, 1236 bp, Oryza sativa
  Clone ID: PAT_MRT4530_11904C.1
atgtcgtgctcgcgtgggtggtggaacgacctcccgtcggatctcctcgcgctcgtcgccggctgcctcacgttccaggcctacacccgcgcccgcgccgcctgcgccgccaggcgcgccgccctccccgcgatctcctcgccgtcgctcctcgtcctccacgacgaccaccgcgaacgctccagcttctccgcatggttcttgtcccccaggatctccatcgctagcttggccaccaacctgatctctacggggagggcgcagcgctgcgtcggctccggccatggctgggtcgccttcggcgacttcaatgcctccctcgtgaacgcgttcaccggcgacgagatccccttccattcgttcccggagaagcacggcgtggtgatgtcgaaggtcgtcttcgcgccgaacccgacgccggcggagttcacggcggcggcgatcaccggccacctccgcgtcacctacaccactcgcgggaacagcggatggaccgacgtcgagctcccgcgtctcggcgctatcggcggcggggactacatcgccgacgtggtgtaccacgagaaagaattcggcggcggcaagaagaagaaggtggtgtactgcctcaccggaggcggcgacgtgctcgtcctccgcctccccgccggccgccgccgccgccagcgaaggccggcgtcgttcgagccactgttcgacaaggcgagcgccgtgttctacccggcggccgcgttcgcgccaccgcacagcacgggcgacaagtacctggtggtctgcgatgacggccatctctaccagatctggatggacgaaaagatctcctatggcagtggcgccatagcatccgttctcaggtactaccctcgccgccggccgtgctggctgccggcgaaggatctcggcgggcgctcgttcttcgtcggggtgaacaacgcggtggcgctgcgcgtggatggtggcggcggcggcgcgtcggggctgagaggcaactgcgtgtactggagtgccaggtgtagtagccgggccaaggtgttcgacgtggagtccggcaagtcggcgacatgctttccggtggtcgacttggagacgggcaagtcggcgccgggctttcccggcggcgcggaagctcatagagccctctgctggttcttcttggctgatatgcgtagcagcagcagcaatacgagagtgggaacgtcggctcatcagcttcagaaaagggctcgtcatgcatga

SEQ ID NO: 5083 - DNA, 780 bp, Oryza sativa
  Clone ID: PAT_MRT4530_11905C.1
cttccatcgtccgtaaaaaaaaccgagaaaaaaaccgggtcaaaaaagaaaaaaactaaattggtccgatccaaaaaccgggtgaaaaaaccgaaaaagaaaagaaaaaccaaatgtaaaaaaaacggggcaaaaaaagaaaaataaacaaaatctgtccgatcaaaaaaccagaagaaaaaataaaaaagagtccaactcccgtcaaaacaaaataaatagcgaaaatatataaaaaaaaagtcgactccttctcagaaaaaaaaaaagggagagaacaagggcataaaggtgcataaaaagaaaaaagaaaaacttcaaaaaaagaaaaaaaaaggaaaaaaaaagaaaaacaacaacaataaaattttgtttcccctaagtggcaaaaaaaaccgtagatccgattcctttaaaaacggaaaaataaagtttgattcctgtacaggcgaaaaaaaatctgaaaaaacatctaaaaaagaaaaaaaaagcaaaaaatgaacattaaaaaacaagcaaaaaacgcgtgagaaaaaaaaagcaaaaaagagagaaaaatatgagaatagaaaagcaaaaaagagagaaaaatatggttttcgtcgtcagtaaaaaaaataaaaaaaatatgctaggaagaaactgttagaaagaacattgccatttctgaaaaatggtttgagaaaatcacacaacaaaaaatacaccgtttataaaaaaacaagccgctcattaaaatacaaacattatctttgacatgattatacatgaaaaacgtat

SEQ ID NO: 5084 - DNA, 372 bp, Oryza sativa
  Clone ID: PAT_MRT4530_11906C.1
atgtcgtcggcggcgaaggaccccgaggcaggtctcggcggtggtgtccatggaatggcctcggcggcggggcgccacaaccatcttgtcctcctcgtcgcaagcgtcctccgttgctacagcctccagatcaaggcgacagtcgttgagctctctgcaggaacagaagtcgatgacgagagcggggacatgaaagaggaggggacgacgggctcccacttcagccaccgagacgagctctgttttctccgtctcccttcccaagtggtgcgggcaacgacgcagcgaagccacatcctccacaatgtgcctcatgccttctctcctgacaacccacgtcaccaacccttgaaggggctgaagaatgggtga

SEQ ID NO: 5085 - DNA, 792 bp, Oryza sativa
  Clone ID: PAT_MRT4530_11907C.1
ccggccgggaacctcacatatattgtgttcatcctcataccaccaaccaattagtgccagtagcacatttctgcagttgtagttcaagtaaggtatatcattcagagcaacaaagggaagcaatgaagcaaactttggatgtacatagatcgttgaggccaccaatgccaatggctcaacaacaaatggatgaatcttggagggaccgacaaaaggagattgagatgacaaaggacttcagtgagcacatgatccctatggcccgcttgaagaagatcgtatcttctcaaaagggtaacatgatgatgacctttgacatgccagcgttcttatcaaagatgtgtgagctctttgtacaagaacttgctgcgcgtgcatgggcatgtgcccaatctcataaccgatgcatcatactagacatggatattgctgaagccgtagcctctactgagtcttatgactttcttgttgatatcctccacaatcacagtgtgaagcaaaaatccactccttgttcttccaccaagcgttgtaggttagttgatcaaccttctacatctcacattccccaccgacatctgctgccacagtttgctcctacatatactttggccatccctattactcctagtttaatgccattaatttctcaatgcacaccatcctcttttccatccttgccacaagaaaagttcccattgatggcacccacacccattgtgaatagatcaatgttgtttatcaataatatagcaaggggtctgggcttacaagggaacaatatcaatgcag

SEQ ID NO: 5086 - DNA, 272 bp, Oryza sativa
  Clone ID: PAT_MRT4530_11908C.1
aagctttttttttttgggaagaatggcacaataatcttgattcacttcacccttattatgcgtttatatgtaaactggaggatgactactacctctcgttttcgacttttcaaagttaaacaagaccaactccgaaattcatacgtagctcatgtagtacagtgatagacaagaccagcattaacatgcacatctgatgatgtctccttgaacattaacatggagcttatttatagcttaaaactcttcctaacaccatcgctctaaagctt

SEQ ID NO: 5087 - DNA, 372 bp, Oryza sativa
  Clone ID: PAT_MRT4530_11909C.1
atggagctacccacgctgtcacgccacgcaacacaggccacagcacgcggcgcgggagcgcgacccatcgctgcctcgctggactctggagccggcgacgccgacgcgcctctcggccgcaactggcgctgcgccaccgcggctgcgcgcctctgccctccgccggtgcgccaagccggcggccgcccgtccctgcctggctgcctggcttgcttccttgctgctggcgtgctgccggcctgccctgcggtctccagctcgccgcaacgccgccgccgcacgccgcgcccgccgcccgcaccgcaacgcacgccgccgcccgcgccacaagccctcaaggcgcaaccggctgtgaggctgtctcaaaattag

SEQ ID NO: 5088 - DNA, 629 bp, Oryza sativa
  Clone ID: PAT_MRT4530_1190C.1
gggtagcgagcgcacggcgtcccacgcgtccgaggtgttcgacgcggaggtagacgacggcggcgaggtggggagagagaagatgcttctggaggagcttctccggtgccagatccaggagtggtaccccgcgttccgccgccacaccgtccccaccgtcatcctcccgctccccgccgccttcctccgctacctcgccggccggcctgcctacccggacaccggcggtgaacaccccgagggccgcgacgacgacgccgagccgctccccttcttcctcccggtcatgacctccgggcgcagcgcgttcccgtcggcgcacgcccaccaccccgacccggtctccctcctcgaccgcgacaactccgacctcttcttcgactccgccgacgatgacgaccgcgacgccgacagcccgctcaggccagccttcccggagctcgaggccgcggttgactccgccatcgcggagctcggcggcgccgcgctccccaagctcaactggagcgcgcccaaggacgccgccttcatgtccgccgacggcacaatccgctgcacctgcttcgctgaggtcgccatgctgcttcgctccttcgactgcgtagcccacgacctcgcctgcgcgcgcc

SEQ ID NO: 5089 - DNA, 243 bp, Oryza sativa
  Clone ID: PAT_MRT4530_11910C.1
atggctgcggtggcggggtcggcggcggtggagcctgctcgcggctcctcctcttcagcggcgccggtgcgcacgaggttagttgtaccggtgagggagagtggcgtgagcgtggtggtggcggcgtctgtggtggagccagtggcggctgctgcggcggagctacgaatccgatttcatgcatgtttcaaagaagacaaggtgctctccaaggttgaacaagggctcagcttcaccccgact

SEQ ID NO: 5090 - DNA, 1404 bp, Oryza sativa
  Clone ID: PAT_MRT4530_11911C.1
cgagagcgactcctccgatcctcatcgctccctccgccttgccgccggcgccgcgcccccgccggaatcctcattcgcttcgcctcgcttctcttctccgagatctggaggaactagctagtaccaattaagattcaccatggagccagatgcttctccaacaagtaccacttcttgttccaagcaatccaagctaccattggcattgttaactctggaatgcaacagcaacaaatgtttcctgttcgatccatccaccaagcagacccgtggagcaaccgacatggccgccttcttcctggacgccgcgacattggcgttcgagaaccgcgggtggctgctcatggtccagaactaccgccatagcccccggcgagagaaaacactgcgaaccgtcttcctgtccacgccggcaacggccggcgggtggacctgccggtgttccgctccgtcgccggtggcctcttcgtcttccacatcaactcccatggggagccactggtggtggcctgcgtcgagacggcctccgattatcccaccatcctgccccggcgacgtgtactggacaacctacaagaacacgaacacctcccccccgcagcaagctcgccacgggcggcgccgcgccgcgttcacattcatcgtggacgcggcgttgcgcgggaagcaggtggtctgcgccgactaccgtgggaggatctccgtgttcgacatgacggagacggcctggaggacgccggtgccctcgccggggtggaactggcaagaggatcacttcctcgtcaccgcctctggcgaaggcggtggcgaggaagaggaagaagaggaggtcatcctagtctcatgtcgccgtcacgatgatcagttctgcgagttcaagttcttcaagctggatatagcaatggcgccgtcgccattggacgccggcgatctggatgggttcagctggttcctctgccgtggtagatcctcccgtttaagggaggagaaaggtgggaggaaagtgtacacgttctgccctgaccggctgtggggtgagagcagaacgatcgatcttggaaacggaaagaagaggaagatggctcctttcaatccacgaggtttgatagagaaatccatcacaaatgtatatgcacacaatctggttgatggtgttgttgaggagcttctcccggcatcgattgtgactgaggcacgccattgggttcactctgctgtcttcagtgaaccatttgcctgattctagaatttgggttaattggacctgatgatgctaaattttcaaacatggcatttcagtgtaagcctagtgacattgtcggaggaacttcactgctttcatcttttgacattttcttctgggtaatcacatgataaaacatggttccattcacaggcccttgc

SEQ ID NO: 5091 - DNA, 1768 bp, Oryza sativa
  Clone ID: PAT_MRT4530_11912C.1
gggctgcaggaattcggcacgagggcgaaaacgagaagaagaaaaaatccctctcctcgtcgtacggtcgtcgcgcgtagtaagctcaagctcagtaggggaatcgaggatgtcgtcgtcgtcgtcgacgtccccgcggttcggctcgatgataagcgcgaagctggcgtcgccgccgccgtcgctgctcctcccgccgtcgcctcgcctacagggccgccgcctgacgccgccctcgtgcacgcccggcacccccgccgcgctgccgagcccggggccggacaaggagccggagcgggaggcggcggggtcggggtccgggtcggccaccaccccgcgctcccccgcgcagctcgggagctcgcagctgcaccggtggtcgcgggcccgcgcgcaccggtccgggcggcggctggagtggccgacgatacgggaccgcggcagcggcggggcctcgtcgccgccgaccccgaccaggccgcacccgtcgtccgacgaggcggcgtccgcggcggcgaaggtcgcggtggaggaggaggatggctacggggtggttgggagggacgaggcggcgaagtcgatctacatggtgtccgacgggacggggtggacggcggagcactccgtcaacgccgcgctcggccagttcgagcactgcctcgtcgaccgcggctgcgccgtcaacacacacctcttcaacgggattgatgacatggatagacttattgagatagtaaagcaagcagcaaaagaaggagcactggttttatatactcttgctgatccttcaatggctgaggcaactaagaaggcctgtgagctttggggtgttccatccaatgatattcttcgtcctactattgaagccatagcttcccatattggtgttgctccatctggaattccacgaagttctcctagccggaagggtcaacttactgaggattacttccgacgaattgaagctattgattttaccatcaaacaagatgacggtgctcagccacagaaccttaaccgtgcacacattgtacttgttggtgtttcacgtactggaaagacaccattgtcaatatatctggctcaaaaagggtataaagtggcaaatgttccaattgtaatgggagtgaatcttccaaagtccctttttgagattgatcaagacaagatttttggattgacaataaaccctgtggttcttcaagcaatcaggaaggcaagggccaaaactctaggatttcatgggcaaaaaagcaattatgctgaaatggaacatgtcaggggggagttggatcatgccaatcaaattttcgcccagcatcctatatggccagtcatcgaagtcactggaaaagctatagaggaaacagctgctgtcgttgtgaggatattccatgataggaaacagaagtgcgccatgccacgcatatcaaaacgggtggctccaattagaatctacgattatctgtcagagatggttaacactcacgttgagtatcaaaagatttttgctagggacttttaagtctattctgcagctgtgaagtgaatccaaaagtctaaaaaactacccactatccggcatttttcacgtgttccatattaggttagcatcacctgtgcatagagagggttttaattcattttgtagatcatcaccaccttgtgagctgtgtgtcatattctttgttcgttcgtttaactctttgttgaagtcatgtactaccactcttacggaaatgacatatgagtaaaagacaattctttc

SEQ ID NO: 5092 - DNA, 3201 bp, Oryza sativa
  Clone ID: PAT_MRT4530_11913C.1
atggcggggacgcatggttttcgtagggtaggcgtggtcgagatggaagcggcgacggcggctgaggtggccggtgccggcagcggcacggatggcgatttgcagattaaaggcagcaaggagaatggtcagactgcggagcagccggcggccagcgaggcgcttgagatgccctccactccgctcccgctcccgagggacatagattggtcggagcatttctccttcttcaattcggtgggcgggtttgggggcagcatggatggcgcgaggggcttgactagtgttggcctatctaattctgagtcgaggccggatagtgtaacccagatccagagctgtttgaacaatgcagacgagagggttgaggagctcacattgaaaaattgcatcagctccgatgcgcaacatgaggtttcagctggtggaagcacgagcagcggggagaagcctacagttatgaggggtctgtggggtaattttacaaggatgtcatggagagctagcgacgtggctaacagggaaaaattagcagcgaatcgtggtgacgttgcaaacttgagggtcggtgacatgcccatcagggaaaatttggcggtgagcttcggcaacaatatgatctcacgaaatgatgcatccaacaaggaaatgggaatgagccatggggatcatgcgaataacgagttcaatttgccgtttggtaatcagcagccttttctgtctccacggcctaatcagaatgagcagcgagttgaaagggagaatgctctcatagtgagtagcttttcagctagaattctggatcagatgaggagtaagaatgtaacaccttcgtctggggttcagagcttcccatttaagagtgtgttgaagggtaaaggtgttgtatatcaaggtgcacgagaggagatccaagttcaaggtaatgcaaggaccagctcccctatggaggagcttcgccagactaattccagtggattatctactgatgcctgcagtattggtacaatctttggcagtggtggaaatgttttagaaccacagtgcgagggaaccagcctaagggaactaattaagcctgcacgccaaacaatgagcaagtttgagaaaatgcacttctttaagcagattcttgatctcgtagacaaatctcatgcccagggttttagtttacagcatttgcgcccatcatactttactatctcagcctcaaaccaagtaaaatatattggttcttatggtacccaagatttatcagccccaagcaaactggatattgcgacggatgatattttcaatacaaaaagataccttgatcccaaagttgagtcccaagattctaatggcgataatgcttcaatcacaaagtatcaaaaagttggtgaacaaggatccattgctgtaaggcgaccagtgcataccttttgggctaatcacagagggggcaaccaaagtgaaggtgttgatcctggtgctttgtggcagggcaattcgagctgcactgtccgagaacgttttaaggctgcagaacctttctatggtggcagtatgccctatgctcaacgaccatcaagttctggcaaccaacagtcagtatttgaattgaggatgctggaggaaagctggtacagaagtccagaagagatcagtcagttgaaaggcatacttccatcaaacatctacagccttggggttcttttgtttgagatctccgtcatcgcattttgcccccaaattttctttcagaaagtcctaaagaagctggtttctgtctttggttactccatccagatccctgttctcggcctaaggcaagataataaaacaccagttgctgtcaatgaagaagacaccgaatctggtttgctactgggcttcctttctcaactcaaggaagaaaaggagatgcacgctgccaaattgtcagctgatcttgcgagcttggaaacagatatcgcagaggttgagaaaagacactcaatgaggatgggatttagtttagaggacatggatgtactggcaggttctaatgatctctcaggagcttctgcatgtgccctgggaggtgcatcactctcaggtttgccaccatctttgtgcagatcgagcatatatgaggagcgggtcatgagaaacttggagcagcttgaaaatgcatattactccatgaggtccaccattgacacatcggaggccaatataattaaacgagttgataatgatgctttaagggttcgtcaaaattttcacgagctgcatagtgatgctaatgctatcgatgagcaagcagacccccttggatggtttttcgatggcttatgcaagtatgcccggtatagtaggtttgaagtacggggaattctgaagaatgcagatatacttaactcaccaaatgtgatttgttcgttaagttttgatcgggatgaagaatattttgctgctgctggtgtttcaaagaaaattaaaatatttgaatttgatgcccttttaaatgatcgtgttgatattcattacccattgatagagatgcctagcaaatccaagcttagctgtgtctgttggaacagctacataaaaaattacttggcatcaacagactacgatggcactgttcagttgtgggatgcaagctcgggtcaaggattcacgcagtttacggagcaccgaaaaagagcttggtctttctccccatactcctctcgtatgttagcttttggctcggctgattataagatatactgttatgatctgaggaatacaagaatcccatggtgtactatttctgggcatggaaaagctgtcagctatgtacgattcttggatccagaaacacttatctctgcatcaactgataacaccttgaaaatatgggatctcaaccagactaattccagtggattatctactgatgcctgcagtatgacgttgagtggccataccaatgagaagaattttgtggggttatctgttcacgatggatacataacttgtggttctgaaaataatgaagtattttcttattacaaaacctttcccatgccaataacttctcacaagttcggttcaatcgacccaataactggacaagagacaaatgatgataaccaacaatttgtgtccagtgtttgctggcgagggaggtcgaacatggtagtggctgccaattctactggcagcattaaagtgcttgagcttgtgtga

SEQ ID NO: 5093 - DNA, 1010 bp, Oryza sativa
  Clone ID: PAT_MRT4530_11914C.1
ctacggcaacggcaggagagggtgcgggggcgggggcggggggcgctctcggtggtcgcggccgaaggcgcggatgtggtccttgagggagcgcttgtgcttgaagtcggagccgcaggcgcagtgccagcggcggccgcagttcttctcgtgggtgcgccagtcgccgcggacggcgaggggcttgccgcacttgcggcaggcgaagggcttggcgcagtgcttccgcttgtagtgggtctgcagcgtgcggaagtccttgagggggcgcgcccgcgggtggtccacgttgttccggcaccccgccgcgcagcagaagcacggcagccgcagcatcgccgccggctgcgtcccccgcagcgactccggacccctcctgtactgcgacccatgcccccacatatgcatctgcaggttgttgtatctgctgaaggtcttgcagcaaacagggcaggcaaagtgtgtaggaccaatgaggatctgggttggggtagggatccaatacttgcccttggtgagctttcccatagagaagtagtccaagcagaggtcatcactagctgcttcttcttcctcctccctctccacctccaccttgtgatcatcatcatcatcaccatcaagctcttgtgatgtcgtcgcggtcgcgccgagaggattgctcttcgcgaaatcgatgaccgagctgttaggatcaggagaaggcaggccaatttggagtgatatgtccacatcctccatgacctcctcttccttctcttgcttataacagccatggatcttgttgtgatcatggattgaagggaggaggctgagaagagggatttcctcctttttaggaagggaattgtggggagaggaggattgagagattaggcttctttggttggggaagatgtgatctttgcttggattagccatggcagcttggagagattacttgctggagtggagcagtgcagcaaggggatatgtattatagagagaagaaagtagagctagagagagag

SEQ ID NO: 5094 - DNA, 887 bp, Oryza sativa
  Clone ID: PAT_MRT4530_11915C.1
ccacgcgtccgatgttttattacccagtgcgagggaaccagcctaagggaactaattaagcctgcacgccaaacaatgagcaagtttgagaaaatgcacttctttaagcagattcttgatctcgtagacaaatctcatgcccagggttttagtttacagcatttgcgcccatcatactttactatctcagcctcaaaccaagtaaaatatattgttttcttatggtacccaagatttatcagccccaagcaaactggatattgcgacggatgatattttcaatacaaaaagataccttgatcccaaagttgagtcccaagattctaatggcgataatgcttcaatcacaaagtatcaaaaagttggtgaacaaggatccattgctgtaaggcgaccagtgcataccttttgggctaatcacagagggggcaaccaaagtgaaggtgggtgatcctggtgctttgtggcagggcaattcgagctgcactgtccgagaacgttttaaggctgcagaacctttctatggtggcagtatgccctatgctcaacgaccatcaagttctggcaaccaacagtcagtatttgaattgaggatgctggaggaaagctggtacagaagtccagaagagatcagtcagttgaaaggcatacttccatcaaacatctacagccttggggttcttttgtttgagctcttttgctgctgtgaaacatgggaggtacattgtgctgcaatgtcagatctccgtcatcgcattttgcccccaaattttctttcagaaagtcctaaagaagctggtttctgtctttggttactccatccagatccctgttctcggcctaggcaagagatatttagggtgtgacttgataatgagggtcgagaa

SEQ ID NO: 5095 - DNA, 291 bp, Oryza sativa
  unsure (1)..(291): unsure at all n locations
  Clone ID: PAT_MRT4530_11917C.1
gccgcccttttttttttttttttnnnggggacaaccgaggagngggccacccncccaacaggggcggacagaacgggcaagccaggaggaccagcttacagcgttcggatctgacaggctgacctagcggcagccatgaatcatgtctgtcattgcaggctaggttactcgcactagacgaagcggaggggggggcgaacaaacagcagcaatgcgcggaagccaacgatggccagcatgagggaggaggccatcctaagcccaggtcatgtagcccgaaaagacggatgc

SEQ ID NO: 5096 - DNA, 984 bp, Oryza sativa
  Clone ID: PAT_MRT4530_11918C.1
atggcgagcgggaggcggcgaatgcggcggcggcctcgggttcgcagtggaggtggtgattcggtggcggattggggaaatggagcaaaggccggcatgcggcgaggcgcggcggagctagtggtggcggcggctagagcggcggtggcgtgcggtcgaagctcagcggagggtggcagagatggaggggtggaccagtgggggttggaggggcagccagaggaacagggaaggggggaggctgtgtttagagagatggttgtgaaagtgtcttactgggaactgagtgatggtgagatggcagtggcactgctagctgtggtcgggaaaaggcgatgggcagggtcaacacagcgggaaacgggcgtcaaccaacagtggcgcatgcaatggggtacatggggtacatcacgtgtagaggataggaggagggttttgttgtggaagaggataaggtggagtgtacatcgttgtctcttcttcaaacatgttcgttcgactctaacaacagcaagatgcaccgacactacttcctctatgccgctctatgcactgcgaccgtctctgaggctttctttgctagtccccttcgacactagtgcaatactcaagttggtcgacaacctcgcgcgcacggtattggcagcaccattgtgtgcatcttcccgagttgtccctaggcttggcaaacctggtgtgataccttgttctccagtgtcaccatctttgtcttcagcacatcattttacaccttggtccttggagccatcctgcgcacgcacgaccactctacgatgccccttgtgcgtcctgtggctcggctacctcgtcatcagcaccaccgacttcagctacatcgaccgcagctactctatgcatggcttcatcgaccatggctacgttttacccttcactttagctacatcgattacaacacaaaaggctatcatctgtgttgagcactctcctaggatttttctctaa

SEQ ID NO: 5097 - DNA, 465 bp, Oryza sativa
  Clone ID: PAT_MRT4530_11919C.1
atgtcgccggcaagaggacaaacatctagagaccgcatgcacaacctatctgagaggagtatcgatgatgagtatcgacgccgctgtccgtcgatgcctcgaggagaaccaagacaaggctatcacctgatagccccaccaaagggagaggaaaggctcgacaacacccccaagaaggaaaacggtgcccgaagcaccggcactagatccgaccgcgtggggactggatccggccctaaggacgctggatctggctaccgccatccgacacccgaagccctccctctagtcttggtagcgcccaagccgccgcaactgcgagaggaaggtagggagccatgcctccactatccttacacccgcccagctttgctggcatcactcaagtggtggcaaggcggagagaaggggaagagagtggtgacggtgcttgcctggtctccccccgtgccgccccgggactga

SEQ ID NO: 5098 - DNA, 371 bp, Oryza sativa
  Clone ID: PAT_MRT4530_1191C.1
aggtggcaatcacttagttctggcaaaagatgttggcgtaggaatcatgagtggtggcattagtgggatggcgttctggacagctactctaccattggatgttgcaaagaccattattcagactgaccctgaccctcatttgagtcgaaahccctttcaaattttaaaaatggtttatagaagagctggaatgggtggctgttatkctggccttggtccgacgcttkcacgagcattccctgccaatkcagctgcaattgttgcttgggaatacagtgctaagattcttagtataaggcgtgactagcataagatbctgtaaacybkaattgctggtccaattttccataatataccgggggacacacctg

SEQ ID NO: 5099 - DNA, 479 bp, Oryza sativa
  Clone ID: PAT_MRT4530_11920C.1
cagaaacggcacctgggatatcagcagcgagccagagacattcaaataagacatttctacactcgtttttacaaagcaaagaacagataaattgcgtataaattgttccaaactacatttgaaggtccaaagaaaattaattaaatatgggtgcatttccaaattaaactatttcaggcggaccacattaggaccaaaaataatggaatggaattggcttctttcaagaggctaaaataaaataaccctcagctgtggtagcctgtgctatcccaaggtagtcctcactgattgcaacttttaggagactggcagttaataagtaaaaatcatctgggatgacctccaccctggaaataatggtcgacctgattatttttgggtttgacaccaatgcaagcaatgatggcgatcattggtacttcagatctcagtcaaattcccattgacagcatagcctgagagtcccagtattcttt

SEQ ID NO: 5100 - DNA, 602 bp, Oryza sativa
  unsure (1)..(602): unsure at all n locations
  Clone ID: PAT_MRT4530_11921C.1
gcaaaatagaaagatctagtgtcccgcagcaatgaagatcattttcgcctttgctctccttgctattgctgcatgcagccgcaccctgcgcagtcttgatgtccacaggtcaaagtcataggaaatatcacgcctgaagtcgngctgtanctgttacagcaacaggngctcagcncatataatgagcgcgtaaggtagcagcatggcatactggctagtcccttatggcactagctgccttcaactgagaaacaaccaagtcggggcacactgcgcgcatgcggcgcaacaattgcactattaggacattaccagctgggcaggtcatagtgcagcacatacaaactcagcagttagtcgatctctactagatcggatgagtctaaagttcaagctctgacggttcaaaccgtgcaaggtagaacactgattgaccttaggtacaatggtagtggcagtaccagcaacaccctgggcgttgagttgtactgagatgacaagtatagtggtttttaagttaaggataactgaagatatcatcatatgtgacatgtgaaacttnagggggatataaatagaaagaaagtangncttttatattt

SEQ ID NO: 5101 - DNA, 779 bp, Oryza sativa
  unsure (1)..(779): unsure at all n locations
  Clone ID: PAT_MRT4530_11922C.1
gttatttacgagtgtttgactttgcaaaggagcaactaatatttggtgggaaaagttattttggggctctattgtgttgctcttggagaacctggaaggtgatatttgattatgctctccatatttcagcacggatggttagcgcagttgcatttgattcgtactggtccccaccaaaaccgtatgaaagaaaacaaaatagcatgcatcgcttcgcttcaccaaaatcggatgaagcagaagaagatcccatatattccttcgcttcaccaaaatcagatgaaacaaaagaaaataccaatatcatgtatcgcttcgcttctattggtcaggatgcccagctgcttctctgggatctaactaaggatgagcttaatgtgtcactaacccatgcttccagctgctcagaatcatctagcagtggaagctgctcagcgtcatctagcagtggaagctcttctacagaagacagggacaaagaattcccccttggcttccttcacccttctccacggctgcaagaagtaccaaagctctcacctgaggttgctcatctggtcggcgtggaacccctcttcacactggaattcaccagcgaatcggttatcaccgtatgtcgcagggggcgaatcaccaccaggccaagagaagaaatcgacaatgaaactgaaaccgaccagcagcatcctggttcttccaagctggtcatangcaatggcacgggaaactattctaatccttcgaggggatgttccctcgtttgctcaaaaaccatctaa

SEQ ID NO: 5102 - DNA, 602 bp, Oryza sativa
  unsure (1)..(602): unsure at all n locations
  Clone ID: PAT_MRT4530_11923C.1
tttnttnttttttttgtcgaacgcacaacttctttttaaaagaattcaactctgccagaattctatgtttatctgcattgaaggataatgggtcattacatctcacatctaattccacttccgatgccaatagcatggttgcttctacgttgttctcaacacaattttgaaaaaataacaaaatatctcaacaaggtaaaacagatgcctggacacaaagaagtaaatatctacagaactcaatcacaggtattggccaaactctgtttgtagcaacaacattcatatgtatcatcctgtatctcacgaagttcaagcatttcacctacttcatcacggttgctatgaagttctccactgcatctctatctgaatctgaccatttttggaatcaatgaggtggtacttctcattgatccgcttgttgctggatcacatctgcgaggcttatatcaatgtagcctaaggtttccttgccggggtatcgatcctttctttgaagctctacttagaacttcaatatgccggttatcatttacagggggttcctcgcatacagactcgtattcgtcctccaaccgtggatcctgttttcctcgtgc

SEQ ID NO: 5103 - DNA, 420 bp, Oryza sativa
  Clone ID: PAT_MRT4530_11924C.1
gtgcccacacgtgcgcccacacgtgcgcggaggggggcgcctactcgaacggcgactcgttcgtattatagtacattgtacaagggccactggttattgttctactacacgggggggccagcagacgtgatccacgccgacgcgtctgcgtacactgcatgcgacgccactaacgctatctgctactacagaacgggacgtacttattcatttgagcttaccgagactgatacctactactgcatctgcaaatacagatactgattctgcggcatgcgcctccaaatgaagaccgaaaagatacctccaccgtcccattcagccgctggcgcggacaagtcttataccgcattcacggcctcgtgcgcctcgctattttaaggatgtttcaactgcgtgctctactagattcttatgatg

SEQ ID NO: 5104 - DNA, 395 bp, Oryza sativa
  unsure (1)..(395): unsure at all n locations
  Clone ID: PAT_MRT4530_11925C.1
ccacacatccgcataataatttgtgcaccctnccaggttgtcccaaaaaaaaaaaaaagagttggagaaacatatagatcgagtcttgaataagagaaaccttaactagggaattcatttagttttctgactgatgtattcttcggtgggagggaataaaattaaacaagtatatattgacgtacacacatattaccccttgatattggggtatgcacatacacacatgaatgccacttgatattgtttatgcacatacacaacataatacccatccagtatcacttcactatcaactccatttgaatttaatttcagaattatctcatcttatcanttacgccgattttgtcattcccaactcttaagcttgctaaaaaaaaaaaaaaaaaaaa

SEQ ID NO: 5105 - DNA, 711 bp, Oryza sativa
  Clone ID: PAT_MRT4530_11926C.1
atgctgccatcgaacacgaccagcttcccgcccgacgcctacaagtaccaagagccgccggcgtcgccaagggggtgcatgtatgacaatgacccggcgatgttgccgatggtcttctcctctcacgagaactgcacgctgccgctgccaccggcggctctcaagaacttgcagctgccgctaccgaagccttgtcccaccgatggagggatgacctacttgtactgctgcctcagggcctcgcagacgagcaggctccagaagccatcgtcggcatgtgaccttgcgaagcccaagaggaggaggcactcttggctgtccatgatcctccatgacgactacggctgcaagccgtcgacgatgtcttggactaggaggaagttgagggagaagtggctgtcgtcaatggccggtgctgacaccgcggctgagaacgatcgtgcctgtgagcaagagcgagagggtggagctgacatacttcttaagggcaccaacgaaacaaggatccaggatgcagagggcgacaacatctacaacagccagacgtcgccgccggccgcagctgagccttgcacggctggcgagaaggtgcgaataccgaacagcaccgaccggacagagaaggttggccggaagttccggtccctggacctggaacttctggaccctgcatcgggtgaaattttcctaagtgttggccgaaagttctga

SEQ ID NO: 5106 - DNA, 810 bp, Oryza sativa
  Clone ID: PAT_MRT4530_11927C.1
atgaagtttgacatgccgacgcggccaccggcctcctctgtctccgcgccatcggcaagggcctcgcagacgagcaggctccagaagccatcgtcggcatgtgaccttgcgaagcccaagaggaggaggcactcttggctgtccatgatcctccatgacgactacggctgcaagccgtcgacgatgtcttggactaggaggaagttgagggagaagtggctgtcgtcaatggccgtaaccagcgatggtgggggcgtggagggaatggaagcggtggaggaatccagcatcagcggcaacgatgcggtgccattgcttgcacgtggaggcgatacgatgagggagacggtggaagcgatgctcaggagagctcgacgagcggctgagaacgatcgtgcctgtgagcaagagcgagagggtggagctgacatacttcttaagggcaccaacgaaacaaggatccaggatgcagagggcgacaacatctacaacagccagacgtcgccgccggccgcagctgagccttgcacggctggcgagaaggtgcgaataccgaacagcaccggtgagctccccctccccctttactcctcctcaagccagcggttgcaagatgaccctaccctgctgtcttccccatctatggtggcttcctgctgctggatccaccaccttcgactgccgatgccggcccaccaccctccgtcatccctgcagcgacgatggtaccgctacttgcgtcgccgccctcccgagtccacagcctaccatgggtcctcccgcgctcatggcaatccctctaagccctag

SEQ ID NO: 5107 - DNA, 211 bp, Oryza sativa
  Clone ID: PAT_MRT4530_11928C.1
aatggaagcctggggttttattggatgatttggcgggtaaaaaaaaattactaattgtgcattacttggcaggcctttttcaatgaaaggtgtacccccctaaaccccgaagaaattaacaggtgaaacgaaggggtaaataataaactcaaacgaggccccccagcttttttttgagggcccagagcttcctggccttctcccgggttgc

SEQ ID NO: 5108 - DNA, 382 bp, Oryza sativa
  Clone ID: PAT_MRT4530_11929C.1
cccacgcgtccgcccacgcgtacggttcatctgattatacatagatgattaccttttcttgaaaagggaaaaaaaaaaaaaaaaaaaaaaaaaaaaaaaaaaaaaaaaaaaaaaaaaaaaaaaaaaaaaaaaaaaaaaaaaaaaaaaaaaaaaaaaaaaaaaaaaaaaaaaaaaaaaaaaaaaaaaaagggggggcccttttaaaggggggctgggttcttgtagggatggaaggaatcagtttgttcaaaaaaagggaaacataattggagtccgcgggacaggatacaaaatcgctgaggcgggaaaaccccgggggtggcaaaaatatagtgcttacaaaaaaaaacccgtttgccaagtttcccaattaccaaaaggg

SEQ ID NO: 5109 - DNA, 421 bp, Oryza sativa
  unsure (1)..(421): unsure at all n locations
  Clone ID: PAT_MRT4530_1192C.1
gtataatngcgggcccctgccacctngttcaattctctctgtatgccaagattttggnttgttggttttagccttgcgttgctcatgagacgaatgttgctgagcngcgaaaatattttgttacagtgccaagtacctggatatattgtcatgcatntccntcttagaatgacatcaagggcacaaagtttcatgttacacttgtatgatatacaggtgacatgttgtacagataggtttgtttatcttataccatgtagttagtgattgggttctgtgtacaggtaacagtctgtaacttatcacctttaatttcgtcaatacaatgctacgtggtggggctgattggtgttgcaatatttgtgttttaccccatttgaatataatttgatgtcaggtttaaaaaaaaaaaaaaaaaaaa

SEQ ID NO: 5110 - DNA, 357 bp, Oryza sativa
  Clone ID: PAT_MRT4530_11930C.1
atggcgatggcgtcaacggccagtcctcttcgatgtccgtttcctctccctgttcgcctcatcgcccctgtgcggcggccatggcacgccgacgacgtcgtcggcacatcaccatcgccgccgcggccgccgccgccgctacgcaagcgcgaagcgacgggcaaggcggcggaagcagatgatggagagggtggcgccagggtcggggccgagcacggcgactccggcgatcgcataccggcggcgaaccacgtcggaggtagatccgcctcgcccgatggcggatctggtcccccctggccagatcgagttggagaggtggcggtagcgggagtggtcggcggtggcaatggctag

SEQ ID NO: 5111 - DNA, 396 bp, Oryza sativa
  unsure (1)..(396): unsure at all n locations
  Clone ID: PAT_MRT4530_11931C.1
cttggatcctttgngcggccgnccttttttttttttttttttttttttttngcctcnnnntttttttnttttttttttnngttntttttttcnnncnngtnncntctttttncccgagcnnnncctttttgnacgcttcanggggctcnntttttgaaggaacgggatttgggggttcntttttttnccctgtngttngttngttngattngagcactacntatttttttnngcncttgtgatgttctttcnncttttttcccaggttggtctganagggcttnttttnctttcnnaaagttttgtcctgccnnacagcgcnngagcttttgcncantgacttggntntcccnctcaacggttggccttggnnncnncgctnnntctcttcctttt

SEQ ID NO: 5112 - DNA, 811 bp, Oryza sativa
  Clone ID: PAT_MRT4530_11932C.1
ggccgcccctttttttttttttttttaaggggcaaacagatcctcagctcatgatgatttcagataaataaacagctgatccagcacagtaaacataaagttcagaggtccaaattgctcatatccccttggctcacaccacaaaaattttcttatctcctagcaagccacagaaccaagcaaaatataaaggaaagtacacaatgtcaagcacaagttctggatatcgggaacgctatatctagtgggacttgacatagtcctggactatgttgaggccctctgactcttcaccgaagtccttgacaacgacgcaggagcagcctacgaccttcctcgccttgccctcagaatcaatcttgcaaagccctgcccactcgccaagagttttagcactaggcacggtaacgaggtgaacattgtgctcagcgcagagtgccttgaccaacttgacataatcaggctggtcacagtcctcagcaagcacgcaaagctgagcggcatgcttctcaatggccttggccgcctcacggagccccttcacgagcccatcatgagcgcttgacttcttcatcacaagctgcagagcagtcatcaggtccatcggctctccaagaaccggggcaggtggggcctcaactggagtctcttccgccatgtctcctgcgctagaaagacccgaggggccgacagcgacgacgacgggagggatcttgggagagcggcggcggcggaggaggaggagggttagggttttcgcgaggagggcaggtggggcccggccgggaggatcccaatcgccctaaggagt

SEQ ID NO: 5113 - DNA, 699 bp, Oryza sativa
  Clone ID: PAT_MRT4530_11933C.1
atggtgagcccctcaggcaatcgcaacaactgcgcttctacagggcaagtaggagaacagggtgcagaagctgcagcagggccctctcacgacaaaccaccctacccggttgatgaaatcacgcggaggacaccgtgtgacatgcatattccctttaggaacttatcaatcaaggtggcgtcgggcatggccataccagtggaccaaaatgggacatttcattgcaggtcgactccaccttggtactcaaaggtcgaagttgaactggtggaagaaggcttcgaggatctcgagctagacatcccagaaggagacagggagacgaaactaggagacacagccccacaccattatactatagtgcaaaaaatggcgtacgactgcactcccgaggagactgacaagatcataagaacagaagtgaaggcgcacttcaagccagggagtctaaaaaagaagactcctatagacccgtcagctaagaagttctttcagaagatgagcgcaccaatcacacataccttactatcggactatgaccgatcaataacgaagtcttttaagaagacaagaggaaagtccaaagatgtccctcagctcggaaagcaaccaaaacaagcagttgagccattgttaccacctgatgaaaaggagataagactatttatggcagagatgggtctaaagagggagcaatag

SEQ ID NO: 5114 - DNA, 1885 bp, Oryza sativa
  Clone ID: PAT_MRT4530_11934C.1
ttttagtgggatctgtgtaagttttatttatttattaatagcctaaggggcgatcagatcctcagctcatgatgatttcagataaataaacagctgatccagcacagtaaacataaagttcagaggtccaaattgctcatatccccttggctcacaccacaaaaattttcttatctcctagcaagccacagaaccaagcaaaatataaaggaaagtacacaatgtcaagcacaagttctggattatcgggaacggtcatacatatcttcagcttcggatgatgatttgtattaaaagcagacgattttcagcacggtaaacataaattcagaggttcaaattttgctcatatctccctggctcgcacttgaaaagaattcttatctcctagcaagccctagaaccaagcataaattaaaacaaaaggtacagaatgtcgagcacacgttctggatataagaatgctatatctagtgcgatttgacatagtcctgcactatgttaaggccctcagactcttcaccatagtccttgacaacgacgcaggagcagcccacaaccttccttgccttgccctcagagtcaatcttgcaaagccctgcccactcgccaagagtcttagcactaggcacggtaacaaggtgaacgttgtgctcagcacacagagccttaaccaacttgacataatcaggttggtcgcagtcctcagcaagcacacaaagctgagcagcatgcttctcgatggccttggcagcctcacggagacccttcacaagcccatcatgagcacttgacttcttcatcacaagctgcagagcagtcatcagatccatgggctccccaagaaccggggcagctggagtctcaactggggtctcctccgccatctccgcgctcaaaagaccggaacaccgactgcgacgaaacgatcttgtggcgaagagcggcggcggcggcggggttagggttttcgcgaggagggtgagcccggccggccgggggcccgtcgatcgaccttcctcgccttgccctcagaatcaatcttgcaaagccctgcccactcgccaagagttttagcactaggcacggtaacgaggtgaacattgtgctcagcgcagagtgccttgaccaacttgacataatcaggctggtcacagtcctcagcaagcacgcaaagctgagcggcatgcttctcaatggccttggccgcctcacggagccccttcacgagcccatcatgagcgcttgacttcttcatcacaagctgcagagcagtcatcaggtccatcggctctccaagaaccggggcaggtggggcctcaactggagtctcttccgccatgtctcctgcgctagaaagacccgaggggccgacagcgacgacgacgggagggatcgctggagaaccgagcggccagccgggatgacggcgcgtgaggccaaatctcggtggcacccccgtctctgcacgtggaaggcgggctggcgcacagagcagaggttgacgacgcagcgtggaggcgtcgtatccgacgccaccgcggccagatccggtccccccgtgggtggatctggtacctctgcgcgcggatctgaccggtgcaagccgctcaagcagcgacgacgggaggcggaggcagcgacttttggcggtggacgacggccggtaaaggaggccgacgagcgtagaagccgcggtggctcgtgcgcaaggctcagccgatgacggcagatgactgcacgacacaaggtggagcggccgggggcggtggtggtgcctgatagcggtggtgacgctcccgatggtcggcggcggtcggcgaggtgatggctgcggtgaggaggacggaggcttgccctcctccaattgggcggaaggggccat

SEQ ID NO: 5115 - DNA, 318 bp, Oryza sativa
  Clone ID: PAT_MRT4530_11935C.1
tgttcacttatgaggcggaggcggacctccttcccgacgaacaccgacggcaggcgctattatcacggtgcggcacgccttggtgggccgtgcgacctcgaactgcgaccggaagttgacttccgtcgaggatgctcttgcgctcggtacttttggaggccggaggtatgacgacgtttaggtaggcgtgatcaccttttgggtggtaggaggacttgtcccagcgttagatgcataccgagttgttttgccccgccgcgcggagtgagtcctttaggaagccgatgaggtcgcgcttgcgcgcccccgtggcgcggc

SEQ ID NO: 5116 - DNA, 152 bp, Oryza sativa
  Clone ID: PAT_MRT4530_11936C.1
atggcttctggcgccacgctcctcagttgctgctatggtgatggaagagctggtttggatccggtgagggctagagcattaaagctaaagttcgctgagggaggggtggtagtggctgccattggaggggatcttttctcccctctatacag

SEQ ID NO: 5117 - DNA, 1527 bp, Oryza sativa
  Clone ID: PAT_MRT4530_11937C.1
atggcgccggctttccaccctgcgatattcggtgacttcttcatcaacaacgtccaaccatcacccaaagagtcagatgaatggatggaagagagagtagatcagttggttgaggaggtaggtagaatgcttgaggtttgcaaggatgatgtggtaaagcaaatgaacctggtggatgtgctccaacgtttgggaatagatcatcattttgaggagcagatcgacaccattctaaaaaatattcatagagctgagttcaatagctctgacctttacgaggttgcccttcggtttcgcttacttaggaaacaagggtattgggtctcgccagatgaattcaacaaattcaaagctgaagatgggagctttagtagtgatgacataactaatgatccgaagggcttgttaagtttatacaacgcagctcaccttctaactcacaacgagaaagcacttgaagaagctatattgtttgcaaggcatcacctacaattattgagaggcaacctcgcgtacccattggatgaacaagtaacacgtgcccttgagataccgttaccaaggaccatgaagagagtagaggtgctaaattatatcttcgagtatagcgctgaagagaaaatgttcaatccctctattttggagctagccgtgcttgatttcaatattctacaaaaagttcaccaaaatgaactcaaggaaatttgtcagtggtgggagaatctttcaagtgacattagactcgactacgtccgtgaacgtgtggttgagtgctatttttgtgcatacgctgcctactatgaaaaagagcacgcacgggcccgtatgatattcgccaagaggtgtatgctattttcactgctcgatgatacatacgatgtgcgtgcaactttagaggaggctcgcaagtttaacgatgctctgcaaagatgggacaagagtgacgtttcacttctaccagaggacctgaagagattttttctgagcataataagtaactttagggagtttgaggatgaattggaaccacatgagaaatatcgtaattcttacaacattaaagcgaccggaggtgcaatagagttacctgttagtttaattgttggcatgggtgatatagcaactaaggaggtgttggattgggccttggctaaccctgatgctggtagggcctttgcagaggtggcacgattcatggatgacttagctgcatcacacagtgggagggacaagatggatgtggcgagcactgtggagtgttacatgaacgagcacggggtgacgagagaggtcgccgaggcgaagatcgctggaatggctgaggacgggtggaaaagcatgaaccagatacgcttcaagcaccgcgcgttcctcccgttcgtgcagcggatcgccaacctgtgcatgtccgccaccctcctataccatggcaagaagaatggcttcagcaatagcctggagctaaaggatatgttcgagagccattttgttaacccaatcccgcttaatcatatagattacgattaa

SEQ ID NO: 5118 - DNA, 177 bp, Oryza sativa
  Clone ID: PAT_MRT4530_11938C.1
atgtggatggattcagatcatatcggaggtcacaatttcctgcttgatggttggccggtggtgaggtgctggcgcggtggctgcgcgtcgaaggtgaaaaccatggcatggattccctggacgggctgcggtggcactttcagtgtcgtatccttcctgaaggagcatttcctttag

SEQ ID NO: 5119 - DNA, 864 bp, Oryza sativa
  Clone ID: PAT_MRT4530_11939C.1
atgggggatttgatcttggatccctacatggaggacgcgatcatggatcatccctgcctcgccgaacttcttgctgatcaaacagctctcccagtgttccatccttactccggcggcgccactccgcagatggtggataccgacaccttcctccgcgccatcggcgcactgcctccgcttgcaccgccaccggcagctccgctcgcaccggcgccaccggactcgccccgtacccctcacacctacggcagcctcctccctgtctacgaaggcagcgatcacccggtgtcacccaagaagacgatcgaggtcgcatcgctgctgcaagagcgcgccgatcagccggtggtcaccagcaactcagcgacgacgacacgtccgcagctgtgcgcgccctacgacgacgacatcgaggccaccctccgtgccatggagacgaaccccgtggagcggccctccccgtacttcttggagacgacacaaggtgggcggatgaccgcactgctccgcctcgtcgcagcaacgaccgtgttcctggcggccaagtacgaggaccagtacaccctgaggaagatcgacgccagcatggtcgccgctcgctgcggctacactagcgagaccaggcacaagatggtgtcgtgcatggagaccgagatcctcgccgcgctcgactacaacctcagcggcccgacggcgtccacgttcgtgcagcacttcacaaggtactacggcgacggaaaagaagaggagctgttgaaggaggcggcgcatcggttcaccgacgggtcgctgctgacgtacgggttccaccgctacctgccgtccgtggtggcggcgtcggcgatcttcctggcgaggctgcac

SEQ ID NO: 5120 - DNA, 682 bp, Oryza sativa
  Clone ID: PAT_MRT4530_1193C.1
gcgcgacagcgacgcgacgcaggcgtgggagattacacacttcatgtattattattctaccatgcgtggaataatggcgtggcactcacagaaggtgtcgaggacaccataacttggcggtggacggcaaatgaaaagtacagcgcaaagtcattctacatagcgcagtttaatggtagaataagctctgcagctgtaaaactgatttggaagcaatgggcaccttccaaatgcaaacactttacatggcttctattgcaaaatagagtttggacaatagataggctacaaatcagacaatggccaaacaactatttctgccaactatgctataggaaccttgaaaccgcccaacatctttttaaagattgcgcttttgtgtgccatatctgggagagggtcctgagtatactgaactgcaacgatatagaacaccaatacgatgaaaacgaagtactgttggaatggtggatcagaaggaggcaaaagcaaggccaaagcactcaaatcaatccacatgttggtggtatgggaagtatggtgtgaacggaacaggagggtttttcaaaatcaagagaaaaccatgccgcaactactcgccaaaatacaagacgaaatcaaactttggagtatgtgtggggcaaaaaaaacatcacgagaatatccacttaggtctcccttt

SEQ ID NO: 5121 - DNA, 1299 bp, Oryza sativa
  Clone ID: PAT_MRT4530_11940C.1
atgggggatttgatcttggatccctacatggaggacgcgatcttggatcattcctgcctcgccgaacttcttgctgatcaaacagctctcccattgttccatccttactccggcggcgccactccgcagatggtggataccgacaccttcctccgcgccatcggcgcactgcctccgcttgcaccgccaccggcagctccgctcgcaccggcgccaccggactcgccccgtacccctcacacctacggcagcctcctccctgtctacggtgatcttccaccgctctctggcgccgtcctccaggagcccttgccgctgccagaaggcagcgatcacccggtgtcacccaagaagacgatcgaggtcgcatcgctgctgcaagagcgcgccgatcagccggtggtcaccagcaactcagcgacgacgacacgtccgcagctgtgcgcgccctacgacgacgacatcgaggccaccctccgtgccatggagacgaaccccgtggagcggccctccccgtacttcttggagacgacacaaggtgggcggatgaccgcactgctccgcctcgtcgcagcaacgaccgtgttcctggcggccaagtacgaggaccagtacaccctgaggaagatcgacgccagcatggtcgccgctcgctgcggctacaccagcgagaccaggcacaagatggtgtcgtgcatggagaccgagatcctcgccgcgctcgactacaacctcggcggcccgacggcgtacacgttcgtggagcacttcacaaggtactacggcaaggggaaagaagagaagctgatgagggaggcggcgcattggttcgccgacgggtcgttgctgacgtacgggttccaccgctacctgccgtccatggtggcggcgtcagcgatcttcctggcgaggctgcacgtgcgggggcatgagccatggagaaaggatctcgcggagctcacgggcttttggtactctgatgtctctacatatggcccaaccgcggacacgttcgtggagcacttcacccggtacaagtgtacaacagccggggagaggaaaagctacgggtgcatgcagcggctggagcgcgacgttgccgaccagtcgctaatgaactacgtacggctgcccggggctactatacctgccgtccatggaggcggcggccggcgggcgtcgatctccgtcgcgaggtgttcgctgaaccggcacgacgcgctggtctggagcacggagttgcaggagctgacggggtacagcttcgaggacctcgtcagctgcatcttcgccatgtag

SEQ ID NO: 5122 - DNA, 449 bp, Oryza sativa
  unsure (1)..(449): unsure at all n locations
  Clone ID: PAT_MRT4530_11941C.1
tgttatttgctcattgctatgtagacatgtactaccagatttttcattttggtaagcattttttgtcnctgtatatgttacatttacatttatattacatgcataaatgaagtgtgcactcgggtcctccgtgctctagattcgcccctgcttccaattgtctagactttggcagaaaaggtggtcatggtcttgagaaaggccaggctttgttctgaacttagagatgagtgagctgcaaaccagttttttttcctgagatagtgttacatgcttgtatcaatatttgaagtgtagagattgagccagagtcagaattctatatagctagtttaggttttctgaactttgatgcttgaaacgtgctgtatattgctccattgacaatgtatggctgtgaattaattnaagctctcctgggaattgttgcaaaaaaaaaaaaaaaaaaa

SEQ ID NO: 5123 - DNA, 1203 bp, Oryza sativa
  Clone ID: PAT_MRT4530_11942C.1
atgggggatttgatcttggatccctacatggaggacgcgatcatggatcatccctgcctcgccgaacttcttgctgatcaaacatcgctcccaatgttccatcctttctccggcggcggcactccgcagatggtggataccgacaccttcctccgcgccatcggcgcactgcctccgcttgcaccgccaccggcagctccgctcgcaccggcgccgccaccggactccccccgtacccctcacacctacggcagcttcctcccaatctacggtgatcttccaccgctctccgtcaccgtcgtccaggagaccttgccgctgccagaaggcggcgatcacccggtgccacccaagaagacgatcgatgtcgcaccactgctgccagagcacgctgatcagccggtggtcaccaacaactcagcgacgacacgaccgcagctgtgcgcgccctacgacgacgacatcgaggccaccctccgtgccatggagacgaaccccgcggagaggccctccccgtacttcttggagacgacacaaggtgggcggatgaccgcactggtgcgcgcctcgatgatcgccttcatggacgagttcagccggttctacgagctcgccgatggcacgctccagcgcgccgcctacttcctggaccgctacctgtcggtgacacccgagtcggacgacgtgctgcagctccgcctcgtcggggccacggccgtgttcctcgccgccaagtacgaggaccagtacaccctgaggaagatcgacgccagcatggtcgccgcccggtgcggctacactagcgagaccaggcacaagatggtgtcgtgcatggagaccgagatcctcgccgcgctcgactacaacctaagcggcccgacggcgtccacgttcgtgcagcacttcacgaggtactacggcgacggaaaagaagaggagctgttgaaggaggcggcgcatcggttcaccgacgggtcgctgctgacgtacgggttccaccgctacctgccgtccgtggtggcggcgtcggcgatcttcctggcgaggctgcacgtgctggggcatgagccgtggagcagggatctcgccgagctcaccgggtacgaggccatcgacttgatgggctgcgtctgcgacatgtacagtcaaatcgcatgtcctcgctttgctccctttcaagagtacttcttccaggatccatag

SEQ ID NO: 5124 - DNA, 1203 bp, Oryza sativa
  Clone ID: PAT_MRT4530_11943C.1
atgggggatttgatcttggatccctacatggaggacgcgatcttggatcatccctgcctcgccgaacttcttgcagatcaaacagctctcccattgttccatcctttctccggcggagccactccgcagatggtggataccgacaccttcctccgcgccatcggcgcgcttcctccgcttgcaccgccaccggcagctccgctcgcaccggcgccaccggattccccccgtacccctcacacctacggcagcctcctccccgtctacggtgatcatccactgctcaccggcgccgtcgtccaggagcccttgccgctgccagaaggcggcgatcaccctgtgcctcccaagaagaagatcaaggtcgcaccgctgctgccagagcgcgccgatcagccggtggtcaccagcaactcagcgacgacgacacggccgcagctgtgtgcgccctacgacgacgaaatcgaggccaccctacgtgccatggagacgaaccctgcggagcggccctcgccgtacttcttggagacgacacagggcgggcggatgaccgcgctggtgcgcgcctcgatgatcgctttcatggacgagttcagccagttccacgagctcgccgacggcacgctccagcgcgccgcctacttcctggaccgctacctgtcggtgacgcccgagtcggacgacgcgctgcagctccgcctcgtcggggccacggccgtgttcctggcggccaagtacgaggaccagtacaccctgaggaagatcgacgccagcatggtcgccgcccggtgcggctacaccagcgagacgaggcacaagatggtgtcgatcatggagaccgagatgctcgccgcgctgggcttcaaccttggcggcccgacggcgtacacgttcgtggagcacttcaccaggtactacggcgacggagaagaagaggagctgttgaaggaggcggcgcatcggttcgccgacgggtcgctgctgacgtacgggttccaccgctacctgccgtccattgtggcggcgtcgtcgatcttcctggcgaggctggacgtgctggggcatgagccatggagccaggatctcgcggagctgacagggtacaaggccatcgacttgatgggctgcgtgtgcgacatgtacagtcaaatcgcatgtcctcgctttgctctcttccaagagtacttcttcgagaatccatag

SEQ ID NO: 5125 - DNA, 198 bp, Oryza sativa
  Clone ID: PAT_MRT4530_11944C.1
atggccaagaagattaaggtcgtgttcgggaagagaacacgactattacagaaaacatggcgggttcgtaaaggatcaaaagaggacaagacttctcgtaaagggacgctggccgtgttacaagcaacccaacagtaccaacctatggggatattaagtgtgcgagatgctcagggtccgtgggagatacataactga

SEQ ID NO: 5126 - DNA, 4505 bp, Oryza sativa
  Clone ID: PAT_MRT4530_11945C.1
atggtgatctctgtccccctcttttcttctgtcttgcttgcgcttgttgttgctgttcctgctgatttcgacgttggtggcagattgcttggagttggtctgtgctctgttcgaggagatcctaacgagcactacgacccccatggtgatctgtatttgcgccccttcttgcaactggatagtgttcatcagttctactctttggtctttgctaggaaagcaagttctgccatgggtgcatcgaccagtaccaaacgtccattaacatcgaaggctactaatgaaggagagaatgacagagttaagtatgcctcatcagctatgcaaggattgcgtatgagcatgcaagatgctcttgcagttgaactagatctagatgcgttaaagagcacatcgttctttggtgtgtacgatggccatggagacttgatgatgaattggaagcaccaaatgtatggagggcgtcactttatccccatcgtagtagcagtttcttacaagctgccgtcatatgaaggaagcacagcatgtgtggtaatcattagaggaaatcagatcactgttggaaatgttggcgattcccgttgcgtgctttcaaagaatggtcagacaattgatttatccactgatcacaaaccaaacgttccacttgaacgtcagagaattctaagagtaggaggacaagtatggagggaaaaatttcctgcaaaagactcaggaggggaaatcagggaacagtggggtccatattgtattgaaggaaagctatccacgtccagagcacttgctggcattttcctcactaccatttcaggtgattttgcatataagaacatagtttatcgtcctcaatatcaaatggtgacacattttcctgacattcgtgttgcgaaaataactggtgatactgaatttcttgtcatagcaagtgacggcatctgttccattcaaattctcatattagacttaaacacatttttccctttcagggatcacatgtcaagtcaggatgtggttgatttcgtacatgagaaattaaactcgcgaaggcaggagctctgccaaaatttgataaatcagggaaagaaaagagaatgctttacagaggatagccaattagccacaaacaagaacatagctccaaatacaacaacactgggggaggaaactctacacaccacttgcgagaagctcgtcgagaattgcctggaatcgaggaacaacgcgacggccatactggtccagttcaagccaggcgccgaccagccgatccctgccctgcccaacatccaggagggctccgacgaagtcgccggcggcgccgaccagccgatccctgtcctgcccaacatccagcaggtctccgacgaagtcgccggcggcaccggccagccgatccctgttctgcccgacatccaggagggctccgacgaagtcgccggcggcgccgccgtggctgagcaacatcagcacaacccagagggcggtggcgagcagcaactcgacctcgatgacgcgcttgacggagaagcactggcggtgagagcccattttcttcgcccattccaaccgccgccgccatggccgcggctcggcttccttctcctgcgccggtggctcatcctcctgctctccgcgcgcgccctctagctccgcatctatacgccgccctgccgcgcgctccctatccggcatggcagtggcgcggtgctcgggcggcaagcccggcgaggagggaggctgtggtcaggggggcagccgtagcagaggacgaaggagtggagctagccgacgacgacgacggcgagcgcggggtggggggcggcgacggcggttcagagtcctttcgaaccccggctaggcatcctcccgcagttgctttcgctattggcgtgggatctcatggtatcatggtaatctgttggattggaggaggggctaacgagcacccgcaaccccatggtgatctccgttttgtctccctctcgatatttccatttatagatgtaacttatttgtacaacgttgtgttcactttagtctttttcaggaaagcaagtcttgcgatgggtgcatctgccagcagttcagtaacgtcgaagcttactaacgatggagagaatcagagagttaagtatgcctcatcaactatgcaaggatactgtccgacaatgcaagatgctcttgcagttgaactagatctagatgcattaaggaacacatcattctttggtgtttatgatggcgatggaggagctgaagtagcaatgtactgtgcaaaacgatttcatgctatgctttgcgaggatgaaaactatctcaacaatctgcccaatgcaattacatctgtgtgctccagacttgatgatgatttgcaacgatcaaatgaatggaaggagtcactttatccccgtggtaatggtgaatgtttccagttccttaagactggcgtttgtgctaacctctggcattccgaagagttgggatttatgctccctcagcaggcttacagggcgccgttatacgaaggaagcacagcatgtgtggtaatcattagaggaaatcagatcactgttggaaatgttggtgattctcgttgcgtagtttcacataatggccaggcaattgatttgtccattgatcacaaaccaaccgtcggaagtgaacgtgagagaattctaagagcaggaggacgagtattggtaaaaagaattcctgtcatgggctcagatggaagactcatgcgaggatggggttattttgaattaaagaagaaccaaaatattcctgcttcacagcagatggtgacatgtgatcctgagtttaccattgtggacataactgctgatactgaatttcttgtcatagcaactgacggcatctggggtcacatgtcaagtcaggacgtggttgatttcatacgcaaggaattacactcgggggaggaaaatctgcgcgccatttgtgagaagcttcttgatcattgcttgacctcgagggacaacgtgacggtcatactggttcggttcaagcccggcgccgcggttatccctatcctgtccgacatcgatgaggagcctgtcctctccgacgttgaggaggagccccatgaacctcaacacaatcccggggatggcggcggcggcggcggcggccagcaagacatcggtggcgaatcagaggagctcccattggcccattttcctcaggaatacctcctccccgtctacggtgatcatccactgctcaccggcgccgtcgtccaggagcccttgccgctgccagaaggcggcgatcaccctgtgcctcccaagaagaagatcaaggtcgcaccgctgctgccagagcgcgccgatcagccggtggtcaccagcaactcagcgacgacgacacggccgcagctgtgcgcgccctacgacgacgaaatcgaggccaccctacgtgccatggagacgaaccccgccgagcggccctccccgtacttcttggagacgacacagggtgggcggatgaccgcactggtgcgcgcctcgatgatcgccttcatggacgagttcagccggttccacgagctcgccgacggcacgctccagcgcgccgcctacttcctggaccgctacctgtcggtgacgcccgagtcggacgacgcgctgcagctccgcctcgtcggggccacggccgtgttcctggcggccaagtacgaggaccagtacaccctgaggaagatcgacgccagcatggtcgccgcccggcgcggctacaccagcgagacgaggcacaagatggtgtcgatcatggagaccgagatgctcgccgcgctgggcttcaaccttggcggcccgacggcgtacacgttcgtggagcacttcaccaggtactacggcgacggagaagaagaggagctgttgaaggaggcggcgcatcggttcgccgacgggtcgctgctgacgtacgggttccaccgctacctgccgtccattgtggcggcgtcgtcgatcttcctggcgaggctggacgtgctggggcatgagccatggagccaggatctcgcggagctgacagggtacaaggccatcgacttgatgggctgcgggtattatcgtagtttatcagtatctaactcaccctctccctgcgccaacccgggcaactacatcgcgctcgtcaccctccgcgtcgccgaggagatgcggccgccgctgccaccgccggcgcgggccgagcggcacggcacgggcacggtgcgggtgacgcgggtgaagctgctcaagccacgggacacgctgcttcttggccaggcgtaccgcctcatcaccgtcgacgaggtcaccagggtgctgcaggcgaagaaggaggagaagtcgaggagggcggcggcgcagcatcacctggaatccaagcccgccggcgccgctggagttgggatcaattccagcggcgacgaccacacgcggcctattaggcctgcacatttgtatattgtttcctgcagatgcagttggtag

SEQ ID NO: 5127 - DNA, 951 bp, Oryza sativa
  Clone ID: PAT_MRT4530_11946C.1
tcagcttgtcaatttgttatcatcaaaatctttggctgtactcctgctgctaacagaagtttgcagtaattccttgctcatcaagtgcttgcgtttttggaggctcagccaaaccaaaatactgtcagtctggacaatgttatatcctgctttcctgtacatattgaatggaacttggtcgattatcctacagtgcagatatacgtgccttttggcatccatcttgataatcagatccccgcgtgcctttggccctggtggtccaatccctctcctcctcaacgacgtcttgacagtcatgttgcaaatgtacgggaagtcaagcggcggcgtgggcgtgggcggggcaccgggcgcgcccaccgcgtccagcgacacctccgccgtgcacgccatctccccgtagtcgtcgtcgtcctcgttgccctcgccctcctcctcatccccgtctcccgtggcggcggggcggtagtaccccacgagcacggcggcgtgcggggcgaggccgcggcgctcgaagaggtagcggcggatgacgaacgcgaggagctgctcgtaccgctgcgcgggtgcccacctgacgttctcggcgaaggacgacgcgaggaggcggacgagcgcgtcggactcgtcgtcgtcgcccgccggggtgagcgcccgcacggtgaggcggccgtgcgggaaggagtgcgcgtagcggaaggcggcgagctcgtcgcgctgcgacagcgcgcgcggcgagaggaagacgcctccccctccccccgctggccccgtgacgatgccgccgtcgccctcgccatcggacgacgaccgagaggccgcgaggcgtgcccggtggcgaggccgcgagcggtagggggggcaggagaagaggaggcgcgggtgggtcggggcggctggggagacggccgggaggaggaggaggaaggccgcggacgcggcggccat

SEQ ID NO: 5128 - DNA, 405 bp, Oryza sativa
  Clone ID: PAT_MRT4530_11947C.1
tgtaaaatcaaagatgtttttgattattattctgtgatgaacaattggcatctgacattattggttttgatatttggagattattggcgaagtggtttttggagataattggatttgcaagtgaacaagagctgctgctgagttttggtccggtcagactgggctgtggttgctggctagagttcaatgcacatggttggtgcagattccatatggcatacgatggaggtattatgtgcgtatgggatgtggagtcgaatttgaaaggagtccaaatttgttatgattggagtttgtaaagtttgtttcttgtacgagaaggtttcctaggtggattaggacttctagtatgagtttgattcatggctttaggctgcctacctcatgtataactagagagggagc

SEQ ID NO: 5129 - DNA, 297 bp, Oryza sativa
  Clone ID: PAT_MRT4530_11948C.1
atggtctcccagatccgcacggccttcgggcttgtccacatgctattcaaccgcgcgtcatctcggcaccaggtgtcccccttccatcacacaaagctacgcctacgcaatgtcccctcgctggtatgggagcgtccgatgccttcaaactacccgagtgctcgagcgctgagtgttgtacacccctacaccaacacggtagagcaccccaatgtgtcaggtaggccggatccaccgcccacacaccttcggattcgccgccgagcttcgtcacctactgggtgcaccgcagcctag

SEQ ID NO: 5130 - DNA, 272 bp, Oryza sativa
  Clone ID: PAT_MRT4530_11949C.1
aaaatataatagcgtcacatcctttaaaatccagaggaatgaacaactcgtgaaaactttacaaggcatttgtaggaaacaaagtctagaaatataagattacaaaaacaaagaaatgaaaacatgacatatgacctcacaaaatttaaatccaaaatccctatggaagagcctattctatctgaattccaaagaaacccatgtaagggttgtgatcctctaaatgaggctttataatcaagggacttggtcatttacattgggatttctac

SEQ ID NO: 5131 - DNA, 651 bp, Oryza sativa
  Clone ID: PAT_MRT4530_1194C.1
atgaggaagccaaccaaggcagaaatccaaccaatcctggacagattggcgaagaagattgctggctggaaaccccggttgctatcacccgacggctggctttgcctcatcaaatctactctaatggccctccctgtgcatctcatgtcagtgttacagctacctaaatgggcgatcaaagatattgagcacgagtgtagaggttttctctggaaagggcaagaagatgtaagtggaggccattgtctagttgcttggaaaaatgtatgtatgccggtgcaaaatggtggtcttgggataaaaaatctggattactttggccaggcccttcggctgaagtggcatgctattaaacttgaacagaaaaacaggccgtggacaatggttgattaccaactaggaaaggaggtggatactctgtttcaatctgcagcagaattcattgttggtaatgggaagaacaccaggttctggacagcaaattggctgggtggggggagcatcgcctggagatggcctattctagcaacttatgtaggcagatcacatctcacagttgctcaagctctatcaaatcacagatggggtcagagatttgcaaggctccctttccaacgaagctatggcccaatatttccagctctgggatga

SEQ ID NO: 5132 - DNA, 450 bp, Oryza sativa
  Clone ID: PAT_MRT4530_11950C.1
tcttgatcgcgaccttttttttttttttttttttcataatcattttgcttcttaatctgtgggattaatcttgtacatttcttttctgcgagacacaaatgcgcaaaccaaaagaaagaagaacccaaaaaaaaaaaatctgatggattttacaatggcgctacgccgatcttggccaaaccgaatcacccgatcgcccccacacaccgagctcgctggccccacaccgtgcacgacaccggcaaacacaccactcgagcgcacggccacccgctgccgccggcgccgcggcggcagcagcagaagcgaccgaagcgcacaccgattcggcgttcgcgcgctcttggaggtaatgatgtgttggtggactggtggcggcccgtgcaattgggcgacgtcccccgtgatcccctgcccttttgacccaaaaatttcgggtggttttcgctc

SEQ ID NO: 5133 - DNA, 297 bp, Oryza sativa
  Clone ID: PAT_MRT4530_11951C.1
atggccggcgacgagatcgggagtggcgatggggtactgatcaacgacggcgacggcgttctccttacagatgcaaatccaatggaggcaacggcgaccgaaggcgacgacggacgacgacgaacagcgcgactggagatcaaaccatggcaacaacccacaggttcacggcgacggcaaccttccggcgggattcggcctcgggagacggcggctctcgggaagaacacggcctctagacggctggctggagctttaagacgcactgtatcgcgggggaggccaaacagactttag

SEQ ID NO: 5134 - DNA, 783 bp, Oryza sativa
  Clone ID: PAT_MRT4530_11952C.1
atggcgccgtcgttcttggcgaggcggcacgcgaagttgccgacgaaggagacagtgacgagcagcagcactagccatcgaccttgtcgccggcaacaacctcaccgtcccgcgccgctgcgccagcccctcgctgcctcaggtcactgtggtggtggccgcggcgctcgacgcgtgtcacgatcaagatcaagtgctgcgcacccgcgcggccgactacacgctgcgtgtaggccacggcgagcgggcattcgcgtacgctcgacttccagtcttccacaagttgcaacttgcaagaataactggttggcagtgaccagtgagaagtggttagctaacgttggtgatattgatagtgttcataaccaagcaatgagggattgtgatgctttattgaaaaaagagcagcacattgatgtttctttgaacagccaaagtaatgctgagaaaattgcttattatactcgattaaatggctcaattgatgttactagactcttactgaagcaaggaacaaatgccctcgtggttgggctaaccatgcatccgtcgagattcatgactgcctctagagttggtgtaacgattgcaaagctacacaactcacggtcaccgcacaaatatcacggttaccgcatcaaaccgtgcggtaaccgcgaccaaaccatgaaactgcaaaatttggaattcaagtatttgctgatgaaattcacacggttttcggcggttaccttgtgcgataacccccctccaaatggtaagggaaaccctgctcatcactag

SEQ ID NO: 5135 - DNA, 1304 bp, Oryza sativa
  Clone ID: PAT_MRT4530_11953C.1
atgatgaggggcttcacagcctcttacctcggtcagagctagtacaaccactctgaactgacccgggttcccgttttctagtgtgaacgagaacccgaaagttctcatccattaaatggcctcaaatttcacccgctgcccccggccgaaccaaaaaagggggcctcacagttccctggtggaggagttaaccctccgacatctggcgcgccaggtagggggcgcgttcgtgatttttgaggttctttcgagcgccggcgtggtgagtgccacgccgccagtatgggggaaggcgcaacctcctcaagagtgtcacgccaccctaggcagggggctaggccccccacatcctcaccgggtaaggctggctgccaggcctttgtggcgagtcttcggaatgtttgatggcccccaaagtttcggcccggcctcaccgaaaagtacgacggttgcgtcaacccctccgagtccctccagatctacacaacgatcatagaggcggcggggggtgatgaccaggtcatggcgagcttcttccccatggccctcaggggccaagcacgggattggctcatgaacctgttgcccgcctcgtatcctagacttaagttgagcctcgggtgccgtcgaagcccgggacccccctgtgctggctcttccgtagcggctggctttggtcccgtcggctggctacggtgcccggcccagctcaactgtggacggggagtgctggctctagagtttttcggctctcacactcgtgcgaaagtaatcgtccatgtagaaggaaaagagattagaacaaggccaccgaaaggaaagagcgaacataatgtgtagcgtgggggcgcaggctcaaaataagttcacaacctaaggtacgggccggcgagtcgccctcaagttggggcgaaaaaggcgcatgggccctaatgctagcaaagaatggagaagagaccgggcccacattgttagactaggagagtggcgtcaaccctggccactaggggaaggttttggtcagggctaacactgggggctactgtcggcgatatgggcccagggatatcacgcgcatctgaccggtctgtgaccggttgaatgaccgatgggacggcgactgtccggaacaccgtcgccgtcgtcaagccgaagagtgccgccgccttttcctcgtcgccgacgtcgtccggtcatctcatcgcgccgtggttcgccggcgagcatgcgcgcccgagccgccgccggtggtgacgtcgtcgctggcgtcatcaacttcatggggtgacaaacctacccccctt

SEQ ID NO: 5136 - DNA, 438 bp, Oryza sativa
  Clone ID: PAT_MRT4530_11954C.1
atggcgctcgtccccgccgccgccgccaccaccggcgtcggggagggcgacttctggaacgtcggcgacggcgtcgtctacgtcctcgatcagtccggcccgctgctccgaatggacctgctgctcggcgtcctgcggcgactccggggcggcgccgctgtggcgcgcgcccgcgacgcgtgccggtcgtggcgcgccgtgctctccgacgatctctccgacccgatcgtcgacgccgcgcgccgcctccagcggcggcaggaggagccgcgccccccgcgcacgcgcaagcgcagcggcaggcgtgcgaagggagacgggatcccgccgccgcgacacggccggcgacctcgccggaagcccgcggagtttaggatgggtggtcgtgcaagttctacattgactagtctttcaattttggcagtggccgtctactag

SEQ ID NO: 5137 - DNA, 830 bp, Oryza sativa
  unsure (1)..(830): unsure at all n locations
  Clone ID: PAT_MRT4530_11955C.1
gcacgagggggcaatgcgtcaccgacaccgccgaatccaattccagcccgtcgtctccgggcgaaccggatttctcgcctcacacacactctccccctctcttccctcgccgccggcagcggcggcggcggccgagaagagcggctaccggcgctgctacgcgcggcgcctgcccccgtttcgtcttgctgggtttgccggtgtgatgttggtgctatcgatttagagcggtatctgagttcctttggaggagaccactgaagtcctatgctaccttgccgagaatttggtacataagaccttggtaggatgaaaggtggttgtctacagagacctcttgtcagtaaactatgcctcggcttcgcggctctcctcactgccctgattgttatcatgtcactggaagaagctccagtcctcacaatcttcagctcaacgccagaaaaattgaaagttttatctcaaggtttcctacagcagcaggagcaggaacatcttgaagatagtacagccagacagaacgaaaattgcaattatgcaaagggaccctggggtggcagacaagaagcggccactctattctggcaatgagtgcaaacagtggctatcgaaaatgtgggcttgtcgaatgatgcaacgcgcagatttctcttacgagaattttncggtggcagccgcattggattgtcagatgccctgagtttacgggggcctaacattttggaaaagggtgaggcatanaactcttgctttttggtggnggattctctttggtagacagcaattttcagtccatgaatgngtatagctacaggngggtaaatacagcc

SEQ ID NO: 5138 - DNA, 271 bp, Oryza sativa
  unsure (1)..(271): unsure at all n locations
  Clone ID: PAT_MRT4530_11956C.1
ccgtcgccccgcgtcgggncgacgacccccgccgcgcagcagccaggccgcggccgagccgcccacgcctcgcgcgcgcgaccacgcggcgtccgccgcccgacactgcccgggggagagtccttacttttcaggctgttcagacctgagacggggggtgccgcggtggggccgttctccgccaatgctttggtttcttgggtctgttgtttgcgtatggtatctccctgttgtntctgtgctttgcggttttggggccgttggtcttgct

SEQ ID NO: 5139 - DNA, 123 bp, Oryza sativa
  Clone ID: PAT_MRT4530_11957C.1
atgacgaaggtcaaatctagtggtgccaatagggagaaaggaagtgccacggcaaacaaccggaatggagtgaccattactaacgacggtggcgaggagtatggcccggcgaaggtagtgtga

SEQ ID NO: 5140 - DNA, 937 bp, Oryza sativa
  Clone ID: PAT_MRT4530_11958C.1
ttttttttttttttttttttttacaagaagtaccagatcacctctcaagatttattcaaacaaatgtaatgtacagtatatccttttcttgcaaaactctgtgacaaataattcaacttcacacaagaagccgttcaatggttgtaggtacaggagaaaaggtgcccctcgagatctcctaaatttgtgtagccaacccagtatctttgctatctttgtttggatgcaaccaggcaacatctccatgtcgtagtaattaccagtgtagcatatgtacagaagatgttttctgcgaagaccataagaaagcctgagagaactaatgagtttcggcggaagggttcgtcagaagatccagcgcgcgcttcaggtgatcaacagcgaccgacacgtcgtcaaatgcgagggcaccaactgcaaatcttgctgccttgtgagcctcggcaatcttttcaacttctggctggtaactgctatcatacttgtattggctagccggtggtgcgatagcagggggagtaacttgatgcgtagtagtatcagcactcgggtggtattgtgttggtgcaggatggttcgatccagaaggagagtatgatacagcgcttgtaccatcactaacaggatagaacgaagactgatgagttgggacagaaggtaccgagctgtcctgaaagcttggataggactgaaaattagagtagttatacggagcagctggggtttctgtagagtagtagttttgagatgtgtgctgcggttcaattgtgtagggtggctggtggtatgtgtgaggataagtagggatatctggtttatcattgctctggggattgtagctatcactggaagggtagtctgttcttgtgtccgctggtgaggaataattggatgtggtttgtggacctcattggtagggtagtctgtgtcctcgtgc

SEQ ID NO: 5141 - DNA, 349 bp, Oryza sativa
  Clone ID: PAT_MRT4530_11959C.1
agcaggctgagttcaagaagatgtttgaccttattgagcaatacaacttgaatggcacatccgctggatctccgcgcagatgaaccgtgtccgcaacggtgagctctccgttacatctgcgcaccaagggtgcttttgtgcagcccgctttctacgaggattcggtctactgttgttgagtcatgcctgtggctcccgcattcgaaccgctatggtggtcagctgaagatcatcgtgacgagtgctggttcacattgaccataccagggtgacaaggctcggcgctgctcgttgagttctttgagagtgcaggagcccagcactggccaagtctcgagggcggtcttag

SEQ ID NO: 5142 - DNA, 461 bp, Oryza sativa
  Clone ID: PAT_MRT4530_1195C.1
gagtctgcgggaagaactgatgaactgccatccctctgcggagtttgtatatgagcgagagtaacgttcggatctgtttaattccgtaaccaacgcgctcatgttaacagtgaaatttacctgctttctgacagccaataagggtttcatcggggtttcagctaatgaggtatctagacgttgcattggcttacaaggattgcatccgattggtttctacttgattatattgctattttattacatcagtatcagccgagcgattgcctctatattgttatttacatcatgtcagaatctacattggatgtatagccgatagctcaaaaccctatcgatatcggctggatcaaactgactggcacgcccgcacctcaccaagatttggacctgcactggagctaagcagatctcccaggccagtgtgtatttttcgcatcaacagctcgttaacacgaaat

SEQ ID NO: 5143 - DNA, 492 bp, Oryza sativa
  unsure (1)..(492): unsure at all n locations
  Clone ID: PAT_MRT4530_11960C.1
ggagnggcggggcaaaaaacggcgccagcgcaaacccggggacccgggnccaccgacccggaaggccggcgcaacggaccngcagcggggaacgggcaagcgaacccacgggcggtccaccccggaggactgaacgacgaaggggcgcgaggcaaccggcccgagggcccgcgcggcgacatccagcagccggcaccaccgccggcgcaggcggccggcgccgcccgcgcccgcccacccggcggcaaaggcgaccaaccgggggcggcacaggccgccggagcggctgcccgtgggaaagggggggcggctcaagggagggcgccagtccagagcggaaagcgaggcgcgcgaacagcagacgcagggggcccncgggccccgaggcccggcaccccggcgagacagggcggcgtcggcccgggcatctgccatagccaggcgcggagtacgagggaggccgacagagaccgcccggccgagaacgtgtaa

SEQ ID NO: 5144 - DNA, 1461 bp, Oryza sativa
  Clone ID: PAT_MRT4530_11961C.1
taacgcaaaagcctagtcgtctcatactcttcttgttcagttcttctcctcccaaatctttctgctataaaaggcattcgggtctctctctccgaatcccagctgcacacttgcatcttctctctctctctcttcttcttcttcttcttctccatatctcctactcctcgtgaagatcgatcgaccatcggcaatttcattcggtaatagttaagctaagatcaaatcaagatcggcgaaacgatggagatggtgctgcagaggacgagccaccacccggtgcccggggagcagcaggaggcggcggcggagctgtcgtcggctgagctccggcgagggccgtggaccgtcgacgaggacctcaccctcatcaattacatctctgatcacggcgagggccgctggaacgcactcgcacgcgccgccggtctgaagaggactgggaagagctgccggctccggtggctgaactatctccggccggatgtgaagcgcggcaacttcaccgcagaggagcagctgctcatcctcgacctccactcccgatggggcaaccggtggtccaagatagcacagcatttgcctgggaggaccgacaacgagatcaagaactactggaggaccagagtgcaaaagcatgccaagcaactcaattgtgatgtcaacagcaagaggttcaaggatgccatgaagtacctatggatgcctcgccttgccgagcgcatccatgccagggctggcgctgttgatgatagcggagactacagcaacaacgacttatcatgtgtatctggtgtaacaatggccactgttgctaattgttttgatggctctccgagcatggtgactagctcatcttccgattcgttcacgtcggagtcacaagatttgaagaagattaacttacatgtgcatggtgatgatgagaagatgaactctgaagactggatgcaggaggtggaccatgagttttggtctacagagattcagcctaataatgaacagtttcaggaccaacagcttaacggttgggtgcaaggtttttctgagggtttgtccgaaactctatggagtctagaggacatatggaagatgcaataaattttacatttacaaaggacatatttgtaaaatagaatagagagacatcaaggaaggcaaagagaaaaagttctttagttcatatactgtacgttgagacacttaagttctttgccaacttcaatgttttttttcttttatttttgctgcctctttcgatccctgaaggggtttttgccttctagatgtctaggggttcaaagaggaccagaggagatatatatgtgtttggatatgttgatatatgagctgatatatgccttactatatatatactccagaattgcactgaggattacatatccaattcagacatgcaaaccttaccagttgcaatattgtaaaaaaaaaaaaaaaaaa

SEQ ID NO: 5145 - DNA, 1981 bp, Oryza sativa
  Clone ID: PAT_MRT4530_11962C.1
atattcatattgcttttagaaaatatcatattcaatttgtgaaaaatcatccctcgatccaaacaccaccaaagttagatgatcaattgcctatcatgattatagaaaattatggaattgagacaaggaatattgttacagtctatcaaaagccttaccctgattatttttatacaatcccatatcctcctagttttcctgaatttgtgaaatttaatgatgaggataatagaaacgtataggaatatatagaccaatttctagcacaatgcggtgaagcgagcaatgccgatgttttcaagttatgcttgtttttctctttctttatccgacaatgcctttatttggtttatttctttacctgcaaattctatttatacttggacccagttagaacaaattaaatttctatgattatttctatactggggaaattgagcttacattatctgatttaacaatgattaggcaaaggtacaatgaatttgtgattgttttattcaagggatttagagatactaaaaaccgatgttttaacttgtctattactaaaagagatttggccgatcttgcattcaatggtttaattgctccggtcaaaacttcttgatggccacaacttcttgatgttggtcaagttttgcaaatggctctatcttaagaaagttgcgctagagaaataagaaatttattatatctattgacaaataacctagtgtgaatatatttgaacattttgatgatgaattcggatgaagaagaacctgacgtgtataaggccaaatggtcctggactaacaagaacaaaccatttgtttgctcaaattaaaatcggacacactacaaggatcaacaaactaaaatcaagtgtacttttgatgtgtccatgtgaaataaaatctttgattatatcttgcaagaaatattattttgcctaaaggccacataccattgcctaggagttaattaaaacactgtgcacactgtaaatggtatggttcttattcacatgctattaatgattgcaatgtttttcatcaataatttcaatcatccattgataaaggacaattgtagttcatagatggtccaaagatgaagtttgatcatgaattatgatcccttcttggtaaacaccatagagtttgttaatgcgaaagtgttgatttggtctagttatgttgaattcacaaatgggaagagtatgattgttggtgaaccttagccaaagatgatcaaaccaaaaggccgtgagattatgaaaagtcggacaatgatcgagtggtcggcctaccgatgcaaagagactaagatcacctcctagggggtgatttgtccaagcacctaaacaattggagcaacggtttccatatgggcctcaaatcatggcatggaatccatgtccaacacttctgcctagttgtcactttccatacttcatgctatggggatgccagcaccggtgcatattccttatctaccatccctgccaatacaatttcatcaaggagtggaaaccaacgaattcagttcatgattgcttctccgctacaaccaaaagccagtttcaaacaaaagaatcggttgacgagttggaaggagagaagaagggcgaaaaacgctcaaaggtggagaccaagacaatggaggtgatcatcatcaaagtagggttcaatgatgtcccaatacccattggaggtatgatgaaggcaacctaaaccaaggagatcaaagcaggttttagagactctcttgactatacccgcaagtcactagcaagaagtggatcgccatggtcgccggcgaggcggagcgcgagcaccagcgggtggcctgggcccgttcggccacctgggcgctcctccagttcgtcgccgcctacgccatcgccggcaacctggaggtgaaggagatgatggtgttcaaaaccgtcggcgacagggacggcggcgccgagctgatcaagagccttggcctgcct

SEQ ID NO: 5146 - DNA, 710 bp, Oryza sativa
  Clone ID: PAT_MRT4530_11963C.1
tctcttgtcatcttatccgtataagctgtagcttagctctgtttctagaattagctccagcaatggcggatccaagcttcttcgtcggaatcgtagggaacgtaatctcaatactggtcttcgcgtctccaattgcgactttccggaggatcgtgaggagcaagagcacggaggaattcaggtggctgccgtacgtgaccacgctgctgagcacctcgctgtggacgttctacggcctccacaagcccggcggtctcctcatcgtcaccgtcaacggctccggcgccgccctcgaggccatctacgtcacgctctacctcgcctacgcccccagggagaccaagaggacggtggtgaagacgaggagcgtggagtacatgcccttctccctctccttcttcctcttcctcaacggcggcgtctggagcgtctactccttgctcgtcaaggactacttcatcggaattccgaatgcaatcgggttcgcgctggggacggcgcagctggcgctgtacatggcgtaccggaggacgaagaagccggcggggaaaggcggcgacgacgacgaggacgacgaggaggcgcagggggtggcgcggctgatggggcatcaggtgggagatggcgcagcagcggagggaccagcagctgcgcaaggggctgagcctgagcctgcccaagccggcggcgccgcttcacggggggctcga

SEQ ID NO: 5147 - DNA, 1195 bp, Oryza sativa
  Clone ID: PAT_MRT4530_11964C.1
ttgttatcttatccgcgtccgctgtagcttagctctgtttctagaattagctccagcaatggcggatccaagcttcttcgtcggaatcgtagggaacgtaatctcaatactggtcttcgcgtctccaattgcgactttccggaggatcgtgaggagcaagagcacggaggaattcaggtggctgccgtacgtgaccacgctgctgagcacctcgctgtggacgttctacggcctccacaagcccggcggtctcctcatcgtcaccgtcaacggctccggcgccgccctcgaggccatctacgtcacgctctacctcgcctacgcccccagggagaccaaggcgaagatggtgaaggtggtgctggccgtgaacgtgggcgcgctggcggcggtggtggcggtggcgctggtggcgctgcacggcggcgtgcggctgttcgtggtcggcgtgctgtgcgcggcgctcaccatcggcatgtacgctgcgccgatggccgcgatgaggacggtggtgaagacgaggagcgtggagtacatgcccttctccctctccttcttcctcttcctcaacggcggcgtctggagcgtctactccttgctcgtcaaggactacttcatcggaattccgaatgcaatcgggttcgcgctggggacggcgcagctggcgctgtacatggcgtaccggaggacgaagaagccggcggggaaaggcggcgacgacgacgaggacgacgaggaggcgcagggggtggcgcggctgatggggcatcaggtggagatggcgcagcagcggagggaccagcagctgcgcaaggggctgagcctgagcctgcccaagccggcggcgccgcttcacggggggctcgaccgcatcatcaagtccttctccaccacccccatcgagctccactccatcctccaccagcaccacggcggccaccaccaccaccaccgcttcgacaccgtccccgacgacgacgacgaggcggtggccgccgggggcaccacgccggctacgacagccggtccaggagatagacattagaaaaagtatttttctcgatgtgggggtttattttcgtagtcggatatgacctttagagccaaatgatcacatacgaaaatataaatcggggtgaattttgatgaagctgatggaccccttaagcagcgcctgcgaaaattcgctttagtg

SEQ ID NO: 5148 - DNA, 407 bp, Oryza sativa
  Clone ID: PAT_MRT4530_11965C.1
ggggcataacttttttaggaccaaaaaaattgacataaaattgttaaacaggcttttggcccacaaaacaagataaaacagagtgttgttcttttggaaacgaaaatttatttcaagaccatttcaaagtaacagacatggggatgccttcaacagcaaaacaactgcatttttggatcccaaaaggcagttagatatacaaggggtttgcccaaagaacatttcccatttgctttgccctaatcttgatcgacatataaaacaccttttgcccaaattgaataactagcccttccatgatgctgaaataaattttcggttcaataaaaatagttttgttcttcccaaaaatatcttgcaagggctccttaaggtcttttccttttttttggggagtggaattaact

SEQ ID NO: 5149 - DNA, 5100 bp, Oryza sativa
  Clone ID: PAT_MRT4530_11966C.1
atgtcatggcacagggccggtgtcctgctgctaggggctcagtcttgcctacctgtcccgggggttccggccgtaggtgggattgggtcggtactcttgtctatggctaggatgggttggagactatgtcacgtcttctgtccgtataccgtggtgatggccggcagcatcaaccgtggtggtctggacctgactggcttcgttttggagctgcggggcatgtgcgttgtcctggggtatccgcatggagtggactaccagggcaagcagctctcggagcaggagggtgacgatgcagagccccacgctgcttgggaggttactgcagtgatcctcactggctcacccgagaggacttcgttggcagtcaccgcgggtggagattccttctccgccgcttgccagaacgccgcactcctcaccatcggtactcttcaccagcgctacccggacgagttgcagcactcgccctaccgttaccaccctcgtcgcggaggagcccgcgactacgccaccttccgggatgctagctcggaggatgacgctaccatcatgcatctagcgcgcatggtggaggcgtacgacgcggctcgtatcgacttccatcagatggtgcgtcgcgggttggtcgagaacaacatgaagatcctggagctgcgtcaggagaatctgcagctgaagaaggacctagacgcagtggaggcgcagctgcgtcagctcaagatcgcccagggagaggtctgtcgccccaagcgtcgccgcgtctgccgcagccagaagatcaccgctcacaagagtacctccaggcccgagcttgttcgtcagtccctggcgtggacctgtttcgtcgagacccctcgtgccgagcccgcgcccgtggttcctcaggaggatggagcctccggcgttggcagcactgatgctcaccttccgtcctggcctatcgcagctgtagacaagcagttagtaggcttgcgcatggtgacgaccaggaaaaatgctgctaccggtgatggcagtcaccccgaaggcagcaaccacaaccaccagggcaacccaccttcacctcctccaccgcctccaccaccaccaccagacaccaacgccattctcacccaaatcctcgcccagcaggccaacatgatggctgctttcctccaccacatccaaaatccgccacaacataatgctccaccaccacccccacaacactctaaactcgccgagttcctccgcatccgtccacctaccttctctagctccaataaccccgtggatgcgttggattggttgcatgccgtggggaaaaagttagacaccgtgcagtgcagcgatgaggagaaagtcatcttcgccgcccaccaactgcaggggcccgcatctctatggtgggaccatttcaaggctacgcagccagaggggcaacctattacttgggcccgcttcaccgccgctttccgaagaacccatgtgcccgccggagtcatggcccttaagaaaagggaattccgagagttgaagcaaagcaaccgctccgtgatggagtatttgcatgagtttaacaacctggcccggtacgccccggaggatgttcgtgaagatgaggagaagcaagagaagttcttggcaggaatggaccctgagctgtccgtccgtctagtctccggggactatccggatttccaacgtctggtggacaagagcatccgcttggaagccaagcacaaggaactagagtcgcacaagcgtcgcttggcgagtttccgcaaccaacagggggctaaccaaagggtccgctacaccaatccctatccagggggatcctcctcacagcagcagcaacagcagcagcaacctcgctccgcgccccgacctcaattcgtggtgcgcgtcccacagccgcaacaacagcagagtcagcaagggacccgtgcgccccgtcctcctacgccagccgtgcagcctggtcaaggccgcagggacgttcaaggtccgcagtgtctgtgcttcaactgcttcgagcctgggcactttgcggataaatgcccaaagccgaggcgccagcaaggccaagcgcctccccgctccaacaacggtggtaaggatgtcattcggggtcgtgtgaaccacgtgacggccgaggacgtgctgacaactccagacgtcatcgttggtacgttcctcattcattccatccctgctaccattttgttcgactctggagcttcccactcgtttatatctatgccattcgtggggagaaatcaattgggggtagaaaggcttaggaaccctctgctcatcaccacccctggaggggttatgacagcaaagtattatagccctgccgtccctatagaaattcagggaattccttttccctcggatctgattctgctagacaccaagaacttggatgtgattcttggaatgaattggttggctcaattccaaggagtagtggattgcgcgagacgcactgtcactctgtaccgagggccagaacaaccggttgttttctttgcacccccaacctctgtcagaagttcagaacttcatcagataggattgtcagaaattcccatcgtcagggagttcggagatgtgtttccggaagaactacctggtatgccgcccaagcgagagattgagttccgaatagatcttgctccaggaaccactcctctgtacaagcgaccctaccgtatggcagcaaatgaactggccgaagtaaagaaacagctggaagagttgaaagaaaaggggtacatacgtccgagtacttccccatggggtgctcctgtgatttttgtagagaagaaagacaagacgaagaggatgtgcgtcgactacagagctctcaatgaagtcaccataaaaaacaagtaccctcttccccggatcgatgatctgttcgatcagctcaaaggtgccactgtattctccaagattgatctccgttccggatatcaccaattacgcatccgtgaagaagatattccgaagaccgcattcaccacgcgatacggactgtatgaattcacggaagaccatcagcaccatctccgtctggtgttggggaagttgcgggaacatcaattgtatgccaaacttagcaagtgtgagttctggttgtccgaagtcaaaatcttagggcacgtgatatctgctaaaggagttgctgtggaccccgaaacagtgactgccgtcaccgattggaagcaacccaagacagtcactcaaattcgcagtttcttaggtttggcaggatactactggaggttcatcgagaacttctccaaaatcgctcgacccatgacacagttgttgaagaaagaagagaaatttgatggtcatgtggtagcctatgcctcccgtcagcttcgaccgcatgaaggcaactaccctacccatgacttggaattagccgcagtggttcatgctctaaaaatctggcggcactatctcattgggaatcgctgtgaaatatataccgaccataagagtttgaaatacatcttcacccagtcggatctgaatcttcggcaaaggagatggttagaactcatcaaagactatgatgtgggaattcactatcatcctggtaaggccaacgtggttgccgacgctctaagtcgaaagagccattgcaacactcttaacgtccgtggcattccacccgaacttagtcaacagatggaagccttgaacctaagcatagttggtcgtggattcttggctgcgttggaagccaagcctaccttgctcgatcaaatccgcgaggctcagaagaatgatccggacatgcatggactcctcaagaatatgaaacaggataaagctgctggtttcacagaggatgaacacggaaccctatggaacggaaagcgggtatgcgttccagataacagagaacttaaacagctgatacttcagcgtgtcaaggcagagcaccaacgaccggccggacttctccaacctctccaagtaccagaatggaaatgggatgaaattgggatggacttcatcaccggacttccaaaaacccaaggtggatatgattctatatgggtagttgtggatcgattaaccaaggtagctcgatttattcctgtgaagaccacctatggagggaacaaactagccgagctctacttcgctaggatcgtgagtctccatggcgttcccaagaaaattgtatctgataggggaagccaattcacctctcacttttggaagaagctccaagaagagctgggtacccgattaaatttcagcaccacgtatcacctgcagacagatggacagaccgagagtctaaatcagatcctaaaagatatgcttcgcgcatgtgtcctagatttcgggaagacctgggataagagtctcccctatgccgagttctcctacaataacagctaccaagccagcatacaaatggcaccttatgaagcgttgtatgggcgcaaatgccggacaccgctattgtgggaccaagttggggaaagccaagtgttcgggactgatatcctgagagaagctgaagctaaagtcagaatcattcgggataatctaaaggtggcacagtcccggcagaaaagttatgcagataaccaacgccgtaatcaggaattcgcagtggacgattttgtgtaccttcgggtcatgccattgcggggtgtacacaggtttcagacgaaagggaagctcgcacctcggttcgtgggtcctttccgtatcattgctcggcgcggagaagtcgcttaccagttggagctggccgcctccttgggcaacgtgcatgatgtgttccatgtgtcgcaactcaagaaatgccttcgagtgccgtccgagcaggccgactcagagcagattgaagttcgcgaagacttgacctacgtggagaggccagtgaaaatcctggacaccatggagcgcaggaccaggaaccggataatccgtttttgcaaggtccaatggagcaaccacgccgaggaagaagctacttgggagcgtgaagacgagctgaaggcagcccatcccaatctcttcgccagttcttccgaatctcggggtcgagattccgtttatggggggtag

SEQ ID NO: 5150 - DNA, 6794 bp, Oryza sativa
  Clone ID: PAT_MRT4530_11967C.1
ctaggcaacatccgcctgtagtacgaagcctacgccaagcacctggcgaaaagggctgaggatgcccgcggggtcctcgacgctgccgcggcccaagagcggcgggcataggaggttgacacctcgctgcgggcccgggaggtggcgcttgaggccgagcgcacccgctccgcgcaggagttctacgggccggaacccccgggacaggcaggcaggactgagcccctagcagcaggacaccggccctgtgccatgacatctcgactaccgggccgcagctcgtgtagccttcatttgccctggagaatgtccatcgacccccgacttcatccacctccatccgtgtacttttgtttataactagatgggattcaatatgttcaaagatgatgtgacttgccttgctcgctttcccaaacaccggcttcaacttccacgaagagcggatcttccgaagctgcagcgtcgggttccacgggagtggggcccacgcggcagcctcacggttccacggtggaccgggcgcacgcggcttgcgctggccggcgccgtgggtcccacgcgtcagccgcaccgagggcgcgggcggctgacggccgggccccacctggcagccgcggggcgcgcccgaaggcggcctcgccggcacggccgacgggaggcggcgcgcccgcgcccctatggtcgccggcggcggccataggcacggcggagcggcggccgagagaggggagggaagggggaaacgaaatgggcggtccatggctcaccccggatcgatggcgacgacgggaacggcgaccggagcggagagaggcggcggcgcggctcgggtcgacggggacggcggcgttccggcggtcggcgaccgaaacggagaggtggacgaggtcggcgaggatgcggcgaagccgaaggaggcggtgccgaagcgggagatggtccggggcaacgacggcggcgaaccggagctcggcggcgacggcggagagagaggacgacggcgcgagctcgattccgacggggaaagagagcggcgagtggcggaaacggtggagagaggcacggggagtgtttatatagagccgggggcgagagggatgaatttatcaggacgtgacacacatggagtggactaccagggcaagccggtcccagagcaggagggtgacgatgcagagcccgtcgctgcttgggaggtcactgcagtgatcctctctggctcacctgagaggacttcgctggcagtcaccgcgggtggagattccttctccgccgcttgccagaacgccgctctcctcgccatcggcactctgcaccagcgctacccggacgagttgcagcactcgccctaccgctaccaccctcgccgcggaggagcccgcgactacgccaccttccgggatgctagctcggaggatgacgctaccatcatgcacctggcgcgcatggtggaggcgtacgacgcggcccgtatcgacttccaccagatggtgcgccgcgggatggtcgataacaacatgaagatcctggagctgcgtcaggagaatctgcagctgaagaaggatctggacgtgctggaggcgcagctctgtcagctcaaggtcgcccagggagaggtctgtcgtcccaagcgccgccgcgtctgccgcagccagaagatcaccgctcgcaagagtacctccaggcccgagcttgtttgtcagtccctggcgtggacctgcttcgtggagacccctcgtgccgagcccgcgcccgtggttcctcaggagggggaagcctccggcgtagggagcacggaggatgcgctgctgctcaccttccgtcctggcccgtcgcagcggagaagtgctaataccggtgatggccaccaacccgaaggcagcaacctcaacaaccatggcagcccacctccacctcctcctccgcctccaccaccaccaccagacaccaacgccatcctcacccaaatcctcgcccagcaagccaacatgatggctgctttcctccaccacatccaaaatccaccacagcataatgctccacctccaccaccacccccgcaacactctaagctcgccgagttccttcgcattcgcccgcctaccttctccagctccaataaccccgtggatgccttggattggttgcatgcagtggggaagaagttagacactgtgcagtgcaacgatgaggagaaagtcatctttgccacccaccagctgcaggggcccgcatctctatggtgggaccacttctaggctacgcagcccgaggggcagcctatcacctgggcccgtttcaccgccgctttccggagaacccatgtgcctgccggagtcatggcccttaagaaaagggcattccgggagttgaagcaaggcaaccgctctgtgatggagtatttgcatgagtttaacaacctggcccggtacgccccggaggacgttcgggaagatgaggaaaagcaagagaagttcttggcgggaatggaccctgagctgtccgtacgtctgatctccggggattatccggatttccaacgtctggtggacaagagcatccgcttggaagccaagcacaaagaattggagtcgcacaagcgtcgcttggcgaatttccgcaaccaacagggggctaaccaaagggtccgctacaccaatccctatccagggggatcctcctcgcagcagcaacagcagcaacctccctccgcgccccgacctcaatttgtggtgcgcgtcccacagccgcagcaaccgcagggtcagcaagggacccgtgcaccccgtccccctgcgccagctgtgcagcctggtcaaggccacagagacgttcaaggtcagcagagtctgtgcttcaactgcttcgagcctgggcactttgcggataaatgcccaaagccgaggcgccagcaaggccaagcgccgccccgctccaacaacggtggtaaggacgtcattcggggtcgtgtgaaccacgtgactgccgaggatgtgctgacaactccagacgtcatcgttggtacgttcctcatccattccacccctgctaccattttgttcgactctggagcttcccactcgtttatatctgtgccattcgtggggagaaatcagttgggggtagaaaggcttaggaaccctatgctcatcaccacccctggaggggttatgacagcgaagtactatagccctgccgttcccatagaaattcagggaattccgtttccctcggatctgattcttctagacaccaagaacttggatgtgatccttgggatgaattggttggctcaattccaaggagtagtggattgtgcaagacgcactgtcactctgcaccgagggccggaacaaccggttgttttatttgcacccccaacctctgtcagtagttcagaacttcatcagataggactgttagaaatccccatcgtcagagagttcggagacgtgtttccggaagaactacccggtatgccgcccaagcgagagattgagttccggatagatcttgctccaggaacaactcctttgtacaaacggccctaccgtatggcagcaaatgaactggccgaaattaagaaacagttggaagagttgaaagaaaaggggtatatacgtccgagcacttccccctggggtgctcccgtaatttttgtggagaagaaagacaagacaaagaggatgtgtgtcgactacagagctctcaatgaagttactatcaaaaataagtaccctcttccccgaatcgatgatctgttcgatcagcttaaaggtgccacggtattctccaagattgatcttcgttccggatatcaccagttgcgcatccgtgaagaagatatcccgaagactgcattcaccacgcgatatggactgtatgaattcacggtgatgtcgttcggtctgactaatgctcctgctttcttcatgaacttgatgaacaaagtgttcatggaatacttggataagtttgttgtggtcttcatcgacgacattctggtgtactcgcaatcagaggaagaccatcagcaacatctccgtctggtgttgggaaagttgcgggaacatcaattgtatgccaagcttagcaagtgtgagttctggttgtccgaagtcaaattcttagggcacgtgatatctgctaaaggagttgctgtggaccccgaaacagtgaccgccgtcaccgattggaagcaacccaagacagtcactcaaattcgcagtttcttaggtttggcaggatactaccggaggttcatcgagaacttctccaaaatcgctcgacccatgacacagttgttgaagaaagaagagaaatttgtgtggagcccgcaatgcgagaaggcgttcaaaacactcaaagaaaagctggtttcctcgccagtgttaatcttgccggatactcgcaaagacttcctggtgtattgtgacgcttcgcgccaaggattggggtgcgtgctcatgcaggaaggtcatgtggtggcctatgcctcacgccagctacggcctcatgaaggcaactaccctacccatgatttggagttagccgcggtggttcatgctctaaaaatctggcggcactatctcattgggaatcgctgcgaaatatataccgatcataagagtttgaaatacatcttcacccagtcggatctgaatcttcggcagaggagatggttagaactcatcaaggattatgatgtgggaatccactatcaccctggtaaggccaacgtggtcgcagacgcgctgagtcgaaaaagccgttgcaacactcttggcgtccgtggcattccactggagcttaatcaacagttggaagccctgaacctaagcatcgttagccatggattcttagctacactggaagccaagcctaccttactcgatcaaatccgcgaggctcagaagaatgatctagatatgcatgggatcctcaagaatatgaaacagggtaaagccgctggtttcacagaggatgaacacggaactctatggaatggaaaccggcgtgtcaaggcagagcaccaacgaccggccggacttctccaacctctccaagtaccagaatggaaatgggatgaaattgggatggattttatcactggacttccaaaaacccaaggtggatatgattctatatgggtagttgtggaccgactaaccaaagtagctcggtttattcctgtgaagaccacctatggagggaacaaactagctgaactctatttcgctaggatcgtaagtctgcatggcgtccccaagaaaatcgtatctgatcggggaagtcagttcatctctcacttttggaagaagctccaagaagagttgggtacccgattaaatttcagcaccgcgtatcacccgcagacagatggtcaaaccgagcgtctaaaccagatcctcgaggatatgcttcgcgcatgtgtcctagatttcgggaaaacatgggataatagtctcccctatgccgagttctcctacaataacagctaccaagccagcatacaaatggcaccctatgaagcgttgtatggacgcaaatgtcggacaccgctattgtgggaccaagttggggaaagccaagtgttcgggaccgatatcctgagagaagccgaagctaaggtcagaaccatttgggaaaacctaaaggtggcacagtctcggcagaagagttatgcagacaaccgacgccgtgacctggaattcgcagtggatgactttgtgtatctccgggtaacgccattgcgaggggtacacaggtttcagacgaaagggaagctcgcacctcggttcgtgggtcctttccgcatcactgctcgacgcggagaagtagcgtaccaattggagttgcctgcttccttgggcaacgtgcatgatgtgttccatgtgtcgcaactcaagaaatgtcttcgagtgccgtccgagcaggctgactcagagcagattgaagttcgcgaagacttgacctacgtggagagaccagtgaaaatcctagacaccatggagcgcaggaccaggaatcgggtaatccgtttttgcaaggtccaatggagcaaccatgccgaggaagaagctacttgggagcgtgaagacgagcatccccgtgctcccctccaccgtttccgccactcgccgcccttcctccccgtcggaatcgagcccgcgccatcgcactctctctccgccgtcgccgccgagctccggtccgccgccgtcgtcgccccggaccatctcccgccccggcgccgcctccttcggcttcgccgcatcctcgccgacctcgtccacccctccgcttcgctcgccgaccgccggaacgccgtcgaccccgtcgacccgagccgcgccgccaccttcctccgctccggctgccgttttcgtcgtcgccgtcgactcagggtgagccgtggaccgccgtttcgtttccccctttccctcccctctctcggccgctgctccgccatgccggtggtcgccggcggcgaccatcggggcgagggcgctgcctcccgccggccgcgccgccgtggctgccttcgggcgcaccgagcggctgccgcgtggggcccggccgtcagccgcccgcgccctcgggtgcggctgacgcgtggggcccgcggcgccggtcggagtgagccgcgtgcacccggtccaccgtggaccgtgaggctgccgcgtgggccccactcccgtggacccggtccgcgcgcccctcccttcggctcggccatataaggaccggtcttcgggcctctgttgcaaagcactaccgtacttccacat

SEQ ID NO: 5151 - DNA, 4590 bp, Oryza sativa
  Clone ID: PAT_MRT4530_11968C.1
atggcacagggccggtgtcctgctgctaggggctcagtcctgcctacctgtcccgggggtccggccgtaggtgggattgggtcggtactcttgtctatggctaggatgggttggaaactatgtcacgtcttccgtctgtttaccgtggtgatggccggcagcatcaaccgccgtggtctggacctgactggcttcgttttggagctgcggggcatgtgcgttgtcctggggtatccgcatggagtggactaccagtgcaggcagctcccggagcaggagggtgacgatgcagagcgccacgctgcttgggaggttactgcagtgatcctcactggctcacccgagaggacttcgttggcagtcaccgcaggtggagattctttctccgccgcttgccagaacgccgcactcctcgccatcggcacacttcaccagcgctacccggacgagttgcagcactcgccctaccgctaccaccctcgccgcggaggagcccgcgattacgccatcttccgggatgctagctcggaggatgacgctaccatcatgcacctggcgcgcatggtggaggcgtacgacgcggcccgtatcgacttccatcagatggtgcgccgtgggatggtcaagaacaacatgaagatcctggagctgcgtcaggagaatctgcagctgaagaaagacctagatgcagtggaggcgcagctgcatcagctcaagatcgcccagggagagatggtgacgaccaggagaagtgctaataccggtgatggcaatcaacccaaaggcagcaaccacaacaaccatggcagcccacctccacctcctcccccgcctcctccaccaccaccagacaccaacgccatcctcacccaaatcctagcccagcaggccaacatgatggctgctttcctccaccacatccaaaatccgccacaacataatgctccaccaccacccccacaacactctaaactcgccgagttcctccgcatccgtccaccaaccttctctagctccaataaccccgtggatgcgttggattggttgcatgccgtggggaaaaagttagacaccgtgcagtgcagcgatgaggagaaagtcatcttcgccgcccaccaactgcaggggcccgcgtctctatggtgggaccatttccaggctacgcagccagaggggcagcctattacttgggcccgcttcaccgccgctttccggaggacccatgtgcccgccggagtcatggcccttaagaaaagggaattccgagagttgaagcaaggcaaccgcttcgtgatggagtatttgcatgagtttaacaacttggcccagtacgccccggaggatgttcgtgaagatgaggagaagcaagagaagttcttggcaggtatggaccctgagctgtccgtgcgtctagtctccggggactatcaggatttccaacgtctggtggacaagagcatccgcttggaagccaagcacaaggaactagagtcgcacaagcgtcgcttggcgagtttccgcaaccaacagggggctaaccaaagggtccgctacaccaatccctatccagggggatcctcctcacagcagcagcaacagcagcagcaaccccgctccgcgccccgacctcaattcgtggtgcgcgtcccacagccgcagcaacagcagagtcagcaagggactcgtgcgccccgtcctcctacgccagctgtgcagcctggtcaaggccgcagggacgctccaggtccgcagcgtctgtgcttcaactacttcgagcctgggcactttgcggataaatgcccaaagccgaggcgccagcaaggccaagcgcctccccgccccaacaacggtggtaaggatgtcaatcggggtcgtgtgaaccacgtgacggccgaggacgtgctgacaactccagacgtcatcgttggtacgttcctcattcattccatccctgctaccattttgttcgactctggagcttcccactcgtttatttctgtgccattcgtggggagaaatcagttgggggtagaaaggcttaggaaccctctgatcatcaccacccctggaggggttatgacagcaaagtattatagccctgctgttcctatagaaattcagggaattccttttccctcggatctgatccttctagacaccaagaacttggatgtgatccttgggatgaattggttggctcaattccaaggagtagtggattgtgcaagacgcactgtcactctgtaccgagggccggaacaaccggttgttttctttgcacccccaacctctgtaggcagttcagaacttcatcagataggactgtcagaaatccccatcgtcagagagttcggagacgtgtttccggaagaactacccggtatgccgccgaagcgagagattgagttccggatagatcttgctccaggaaccacccctcagtacaagcgaccctaccgtatggcagcaaatgaactggccgaagttaagaaacagttggaagagttgaaagaaaaggggtatatacggccgagtacctccccctggggtgctcctgtgattttcgtggagaagaaagacaagacgaagaggatgtgcgttgactacagagctctcaatgaagtcactatcaaaaacaagtaccctcttccccggatcgatgatatgttcgatcagcttaaagctgccactgtattctccaagattgatcttcgttccggatatcaccaattacgtattcgtgaagaagatatccctaagaccgcattcaccacgcgatacggactgtatgaattcacggtgatgtcattcggtttaaccaatgctcctgccttcttcatgaacttaatgaacaaagtgttcatggaatacttggataagtttgttgtggttttcattgatgacattctggtgtactcacaatcagaggaagaacatcagcaccatctcagtctggtgttgggaaagttgcgggaacatcaattgtatgccaaacttagcaagtgtgagttctggttgtccgaagtcaaattcttagggcacgtgatatctgctaaaggagtcgctgtggaccccgaaacagtgaccgccgtcactgattggaagcaacccaagacagtcactcaaattcgcagtttcttaggtttggtaggatactaccggaggttcatcgagaacttctccaaaatcgctcgacccatgacacagttgttgaagaaagaagagaaatttgtgtggagcccgcaatgcgagaaggcgttccaaactctcaaagaaaagctggtttcctcgcaagttttaatcttaccagatactcgcaaggacttcatggtgtattgtgatgcttcgcgtcaaggattggggtgcgtgcttatgcaggaaggacatgtggtagcctatgcctcacgccagctacggccccatgaaggcaattaccctacccatgatttggagttagccgctgtggttcatgctctaaagatctggcggcactatctcattgggaatcgctgtgaaatatatactgatcataagagtttgaaatacatcttcactcagtcggacctgaatcttcggcagaggagatggttagaactcatcaaggattatgatgtgggaattcactataatcctggtaaggccaacgtggtcgccgacgctctaagccgaaaaagccattgcaacactcttgacgtccgtggcattccacctgaacttaatcaacagatggaagccctgatcctaagcatagttggtcgtggattcttggctacgttggaagccaagcctaccttgctcgatcaaatccgcgaggctcagaagaatgatccggatatgcgtggactcctcaagaatatgaaacagggtaaagccgctggtttcacagaggatgaacacggaaccctatggaacggaaatcgggtatgcgttccagacgacaaggaacttaaacagctaatacttcaggaagctcacgaaagtccttattccatccaccctggcagtacgaagatgtacttagacttgaaagagaaatactggtgggttagtatgaagcgggaaattgcagagttagtggccctttgtgatgtgtgccagcgtgtcaaggcagagcaccaacgaccggccggacttctccaacctctccaagtaccagaatggaaatgggatgaaattgggatggatttcatcaccggacttccaaaaacccagggcggttatgattctatatgggtagtcgtggatcgactaaccaaggtggctcggtttattcatgtgaagaccacctatggagggaacaaactagccgagctctacttcgctaggatcaaatgccttcgagtgccgcccgagcaggccgactcagagcagattgaagttcgcgaagacttgacctacgtggagagaccagtgagaatcttggacaccatggagcgcaggaccaggaaccgggtaatccgtttttgcaaggtccaatggagcaaccacgccgaggaagaagctacttgggagcgtgaagacgagctgaaggcagcccatcccaatctcttcggcagttcttccgaatctcggggtcgagattccgtttaa

SEQ ID NO: 5152 - DNA, 531 bp, Oryza sativa
  Clone ID: PAT_MRT4530_11969C.1
atggaggagcagcagcatctgcatcccggcggcggcggcggcaagaagtcgaacaagatcaccgagatcgtgcggcttcagcagatgctcaagaagtggcgcaagctctccgtcgcgccgaaagacgcggccgccaccgccggcaatggcggcggcggcgagagcaaggcgaagaagttcctgaagaggacgctgtcgttcacggacggcggcgcgtcgccgggggggacgccgccgccgagggggcaccggccgcggcgccgggggccggccgcgcagcggttcgtgatcccgacggactacctgaagcaccgggcgttcgcggcgctgctccgggaggcggaggaggagttcgggttccagcaggagggcgtgctccgcatcccctgcgaggtgcccgccttcgaggccatcctcaaggccgtcgagaagaacaagaaggacaacgccgccgccttctgctactgcagctacgagtacgccgccgacgaggtcgccctcggcgcccccaacaacccattgtgcagatga

SEQ ID NO: 5153 - DNA, 657 bp, Oryza sativa
  Clone ID: PAT_MRT4530_1196C.1
atgaattcacatattagaggatggggatggttgatatctaccacccatggtgaatctaatggtccaaaactcatcaccatcggggatggtgggggtggggacggtgcaccattcaccatccccgtcccccgcggtgacccgcatccgtcgatgcacgcgtgccgccgccggccgtcgttgcgccgcccattgcctcctgccatcgtcacgccgaccggcgcctccggccgtcgtcgacacatactcgccgcctccgaccgtcgtcgatgcgcgctcgccgcgtccggacgtcatcgcgccgaccggcgcctccggccgtcgtcgccgcgcgctcgccgcctcagaccatggtcgcggcaccctccgcctccggccagcacgccatccgccgccatggattcctccgccgttcgtcgccgtcgatatgaccagcagtttgttgagcgtgcagtccacggcgcaatcagcacgcgcacctcgtgggacctgtcgaacaacccccgttcgacaggcagggctgtcgaactgcccccgttcgacaggcagggctgtcgaactgcccccgttcgacaggcagctgtcgaactgcccctgttcgacaggatatccgtcgaactggcgcagttcgacagggtcgtgttctccatttatttgtaa

SEQ ID NO: 5154 - DNA, 5418 bp, Oryza sativa
  Clone ID: PAT_MRT4530_11970C.1
atgtcatggcacagggccggtgtcctgctgctaggggctcagtcctgcctgcctgtcccgggggttacggccgtaggtgggattgggtcggtactcttgtctatagctagaatgggttggaaactatgtcacgtcttccgtctgtataccgtggtgatggccggcagcgtcagccgtcgtggtttggacatgactggcttcgtcttggagctgcggggcatgtgcgttgtcctggggtatccgcatggagtggactaccaggccaggccgcttccggagcaggagggtgacgatgcagagccccacgctgcttgggaggttactgcagtgatcctcactggctctcccgagcggacttcgttggcagtcaccgcgggtggagattccttccccgccgcttgccagagcgccgctctcctcgccatcggcactcttcaccagcgctacccggacgagttgcagcactcgccctaccgctaccaccctcgtcgcggaggagcccgcgactacgccaccttccgggatgctagctcggaggatgacgctaccatcgtgcacctagcgtgcatggtggaggcgtacgacgcggctcgtatcgacttccatcagatggtgcgccgtgggatggtcgagaacaacatgaagatcctggagctgcgtcaggagaatctgcagctgaagaaggacctagacgcggtggaggcgcagctgcatcagctcaagatcgcccagggagaggtctgtcgccccaagcgccgccgcgtctgccgcagccagaagatcaccgcccgcaagagcacctccaggcccgagcttgttcgtcagtccctggcgtggacctgcttcatggagacccctcgtgccgagcccgcgcccatggttccccaggagggggaagcctccggcgttggtagcacggaggatgcgctgttgctcaccttccgccctggcccgtcgcagcggagaagtgttaataccggtgatggcaaccaacccgagggcagcaaccacaacaaccatggcagcccacctccacctcctcctccgcctccaccaccaccaccagataccaacgccattctcacccaaatcctcgcccagcaggccaacatgatgactgctttcctccaccacctccaaaatccgctacaacagaatgctccaccaccacccccacaacactctaagctcgccgagttcctccgcatccgtccacccaccttctctagctccaacaaccccgtggatgcgttggattggttgcatgccgtggggaaaaagctagacactgtgcagtgcagcgatgaggagaaagtcatcttcgccgcccaccagctgcaggggcccgcatctctatggtggtaccatttccaggctacgcagccagaggggcagcctattacttgggctcgcttcaccgccgctttccggagaacccatgtgcccgctggagtcgtggcccttaagaaaagggaattccgagagttgaagcaaggcaacctctccgtgatggagatgtgcgggaagatgaggagaagcaagagaagttcaggaatggaccctgagctgtccgtccgtctagtctccggggactatccggatttccaacgtctggtggacaagagcatccgcttggaagccaagcacaaggaactggagtcgcacaagcgccgcttggcgaatttccgcaatcaacagggtgctaaccaaagggtccgctacaccaatccctatccagggggatcgtcctcgcagcagcaacagcagcaacaacctcgctccgcgccccgacctcaattcgtggtgcgcgtcccacagccccagcaacagcagagtcagcaagggactcgtgcgccccgtccttctacgccaactgtgcagcctggtcaaggccgcagggacgctcaaggcccgcagcgtctgtgcttcaactgcttcgagcccgggcactttgcggataaatgcccgaagccgaggcgccagcaaggccaagcgcctccccgctccaacaacggtggtaaggatgtcattcggggtcgtgtgaaccacgtgacggccgaggacgtgctgacaactccagacgtcatcgttggtacgttcctcattcattccatccctgctaccattttgttcgactctggagcttcccactcgtttatatctgtgccattcgtggggagaaatcagttgggggtagaacggcttaggaaccctctcctcatcaccacccctggaggggttatgacagcaaagtattatagtcctgccgtccctatagaaattcaggggattccttttccctcggatctgattctgctagacaccaagaacttggatgtgatccttgggatgaattggttggctcaattccaaggagtagtggattgcgcgagacgcactgtcactctgtaccgagggccggaacaaccggttgtattctttgcacccccaacctctgtcagtagttcagaacttcatcagataggactgtcagaaatccccatcgtcagggagttcggagacgtgtttccggaagaactacccggtatgccacccaaacgagagattgagttccggatagatcttgctccaggaaccactcctctgtacaagcgaccctaccgtatggcagcaaatgaactcgctgaagtcaagaaacagttggaagagttgaaagaaaaggggtatatacgtccgagtacttccccctggggtgctcctgtgatttttgtggagaagaaagacaagacgaagaggatgtgcgttgactacagagctctcaatgaagtcaccatcaaaaacaagtaccctcttcctcggatcgatgatctgtttgatcagcttaaaggtgccacggtattctccaagattgatcttcgttccggatatcaccagttacgtatccgcgaagaagatattccgaagaccgcattcaccacgcgatacggactgtatgaattcacggtgatgtcgttcggtttaaccaatgcacctgccttcttcatgaacttaatgaacaaagtgttcatggaatacttggataagtttgttgtggttttcattgatgacattctggtatactcacaaacagaggaagaccatcagcaccatctccgtctggtgttgggaaagttgcgggaacatcaattgtatgccaaacttagcaagtgtgagttctggttgtccgaagtcaaattcttagggcacgtgatatctgctaaaggagttgctgtggaccccgaaacagtgaccgccgtcactgattggaggcaacccaagaccgtcactcaaattcgcagtttcttaggtttggcaggatactaccggaggttcatcgagaacttctccaaaatcgctcgacccatgacacagttgttgaagaaagaagagaaatttgtgtggagcccgcaatgcgagaaggcgttccaaactctcaaagaaaagctggtttcctcgccagtgttaatcttgccagatactcgcaaggattttatggtgtattgtgatgctgcgcgccaaggattggggtgcgtgctcatgcaggacggtcatgtggtggcctatgcctcacgccagctacggcctcatgaaggcaattaccctacccatgatttggagttagccgctgtggttcatgctctaaaaatctggcggcactatctcattgggaattgctgtgaaatatatactgatcataagagtttgaaatacatcttcacccagtcggatctgaatcttcggcaaaggagatggttagaactcatcaaggattatgatgtgggaattcactatcatcctggtaaggccaacgtggtcgccgacgctctaagtcgaaagagccattgcaacactcttaacgtccgtggcattccactcgaacttaaccaacagatggaagccctgaatctaagcatagtgggtcgtggattcttggctgcgttggaagccaagcctaccttgctcgatcaaatccgcgaggctcagaagaatgatccggacatgcgtggactcctcaagaatatgaaacagggtaaagccactggtttcacagaggatgaacacggaaccctatggaacggaaatcgggtatgcgttccagataacagagaacttaaacagctgatacttcaggaagctcacgaaagtccttattccatccaccctggcagtacgaagatgtacttagacttgaagaagaaatactggtgggttagtatgaagcgggaaattgcagagttcgtggccctgtgtgatgtgtgccagcgtgtcaaggcagaacaccaacggccggccggacttctccaacctctccaagtaccagaatggaaatgggatgaaattgggatggatttcatcaccggacttccaaaaacccaaggtggatatgattctatatgggtagttgtggatcgattaaccaaggtggctcgatttattcctgtgaagaccacctatggagggaacaaactagccgagctctacttcgctaggatcgtgagtctccatggcgttcccaagaaaatcgtatctgataggggaagccaattcacctctcacttttggaagaagctccaagaagagctgggtacccgattaaatttcagcaccgcgtatcacccgcagacagatggacagaccgagcgtctaaatcagatcctagaagatatgcttcgcgcatgcgtcctagatttcgggaagacctgggataagagtctcccctatgccgagttctcctacaataacagctatcaagccagcatacaaatggcaccctatgaagcgttgtttcagacaaaagggaagctcgcacctcggttcgtgggtcctttccgtatcattgctcgacgcggagaagtcgcttaccagttggagctgcccgcctccttgggcaacgtgcatgatgtgttccatgtgtcgcaactcaagaaatgtcttcgagtgccatccgagcaggccgactcagagcaaattgaagttcgcgaagacttgacctacgtggagaggccagtgaaaatcctggacaccatggagcgcaggaccaggaaccgggtaatccgtttttgcaaggtccaatggagcaaccacgccgaagaagaagctacctgggagcgtgaagacgagcgccgagctccggtccgccgccgtcgtcgccccggaccttctcccgcttcggcgtcgcctccttcggcttcgccgcatccccgccgacctcgtccacctctccgtttcggtcgccgaccaccggaacgccgccgtccccgtcgacccgtgccgcaccgccgcctttctccgctccggtcgccgttcccgtcgtcgccgtcgacccggggtgagccgtggaccgccgtttcgtttcccccttccctcccctctctcggccgccgctccgccgtgcctatggccgccgccggcgaccat

SEQ ID NO: 5155 - DNA, 5770 bp, Oryza sativa
  Clone ID: PAT_MRT4530_11971C.1
aatagccgcgccctcggttatgggcaagccgagcaataagaggagctccttggagatgaaggctttggtgtctagctcgtgcctgccgtcaagcgcctgtggtcgtcgccctagtcttccgttgtttcccatggccggcagcgtcacccgtcgtggtttggacatgactggtttcgtcttggagctgcgaggcatgtgcgtggccttggggtatccacatggagtggactaccaggccaggccgcttccggagcaggagggtgacgatgcagagccccacgctggttgggaggtcactgcagtgatcctcgctggctctcccgagcggacttcgctgacagtcaccgcgggtggagattccttccccgccgcttgccagagcgccgctctcctcgccatcggcactcttcaccagcgctacccagacgagttgcagcactcgccctaccgctaccaccctcgccacggaggagcccgcgactacgccaccttccgggatgctagctcggaggatgacgctaccatcgtgcacctggcgcgcatggtggaggcgtacgacgcggctcgtatcgacttccatcagatggtgcgtcgcgggatggttgagaacaacatgaagatcctggagctgcgtcaggagaacctgcagctcaagaaggacctagatgcggtggaggcgcagctgcatcagcttaagatcgcccagggagaggtctgccgccccaagcgtcgccgcgtctgccgcagccagaagatcaccgcccgcaagagcacctccaggcccgagcttgttcgtcagtccctggcgtggacctgcttcgtggagacccctcgtgccgagcccgcgcccgtggttccccaggagggggaagcctccggcgttggtagcacggaggctctttctctgtttgctggttctgtgtggggttttcagatggtgacgaccaggagaaatgctaacaccggtgatggcaaccaacccgaaagcagcaaccacaaccaccagggcaacccacctccacctcctcctccgcctccgccaccaccaccagacaccaacgccattctcacccaaatcctcgcccagcaagccaacatgatgactgctttcctccaccacctccaaaatccgccacaacataatgctccaccaccacccccacaacactctaaactcgccgagttcctccgcatccgcccacctaccttctcaagctccaacaaccccgtggatgcgttggattggttgcatgccgtggggaaaaagctagacacggtgcagtgcagcgatgaggagaaagtcatcttcgccgcccaccaactgcaggggcccgcatctctctggtgggaccacttccaggctacgcagccagagggacagccgattacttgggcccgcttcaccgccgctttccgaagaacccatgtgcccgccggagtcgtggcccttaagaaaagggaattccgagagttgaagcaaggcaaccgctccgtgatggagtatttgcatgagttcaacaacctggcccgttacgctccggaggatgtgcgggaagatgaggagaagcaagagaagttcttggcaggaatggaccctgagctgtccgtccgtctagtctctggggactatccggattttcaacgattggtggacaagagcatccgcttggaagccaagcacaaggagctggagtcgcacaagcgccgcttggcgaatttccgcaatcaacagggtgctaaccaaagggtccgctacaccaatccctatccagggggatcctcctcgcagcagcaacaacagcagcagcaacctcgctccgcgcctcgacctcaattcgtggtgcgcgtcccacagccgcagcaacagcagaatcagcaggggactcgtgcaccccatcctcctacgccaactgtgcagtctggtcaaggccgcagggacgctcaaggtcagcagcgtctgtgcttcaactgcttcgagcccgggcactttgcggataaatgcccgaaaccaaggcgtcagcaaggccaagcgcctccccgctccaagaacggcgggaaggatgtcattcggggtcgtgtgaatcacgtgacggccgaggacgtgctgacaactccagacgtcatcgttggtacgttcctcgttcattccatccctgctacaattttgttcgactctggagcttcccactcgtttatatttgtgccattcgtggggagaaatcagttgggggtagaaaggcttaggaaccctctgctcatcaccacccctggaggggttatgacagcaaagtattatagccctgccgtccctatagaaattcaggggattccttttccctcggatctgattttgctagacaccaagaatttggatgtgatccttgggatgaattggttggctcaattccaaggagtagtggattgcgcgagacgcactgttactctgtaccgagggccggcacaaccagttgttttctttgcaccctcaacctctatcagaagttcagaacttcatcagataggactgtcagaaatccccatcgtcagggagttcggagatgtgtttccggaagaactacccggtatgccgcccaaacgagagattgagttccggatagatcttgctccaggaaccactcctctgcacaagcgaccctaccgtatggcagcaaatgaactggccgaagtaaagaaacagttggaagagttgaaagaaaagggatacatacgtccgagtacttccccatggggtgctcctgtgatttttgtagagaagaaagacaagacgaagaggatgtgcgtcgactacagagctctcaatgaagtcaccatcaaaaacaagtaccctcttccccggatcgatgatctgttcgatcagcttaaaggtgccactgtattctccaagattgatcttcgttccggatatcaccaattacgtattcgtgaagaagatattccgaagaccgcattcaccacgcgatacgggctgtatgaattcacggtgatgtcattcggtctaaccaatgcacctgccttcttcatgaacttaatgaacaaagtgttcatggaatacttggataagtttgttgtggttttcattgatgacattctgatatactcacactcagaggaagaccatcagcaccatctccgtctggtgttgggaaagttgcgggaacatcaattgtatgccaagcttagcaagtgtgagttctggttgtccgaagtcaaattcttggggcacgtgatatctgctaaaggagttgctgtggaccccgaaacagtgaccgccgtcaccgattggaagcaacccaagacagttactcaagtccgcagtttcttaggtttggcaggatactaccggagattcatcgagaacttctccaaaatcgctcgacccatgacacagttgttgaagaaagaagagaaatttgtgtggagcccgcaatgcgagaaggcgtttcaaactctcaaggaaaagctggtttcctcgccggtgttaatcttgccggatactcgcaaggacttcatggtgtattgtgacgcttcgcgccaaggattggggtgcgtgctcatgcaggacggtcatgtagtagcctatgcctcacgtcagctacgacctcatgaaggcaactaccctacacatgacttggagttagccgcggtggttcatgctctaaaaatctggcggcactatctcattggaaatcgctgtgaaatatataccgaccataagagtttgaaatacatcttcacccagtcggatctgaatcttcggcaaaggagatggttagaacttatcaaagactatgatgtgggaattcactatcatcctggtaaggccaacgtggttgccgacgctctaagtcgaaagagccattgcaacactcttaacgtccgtggcattccacccgaacttagtcaacagatggaagccctgaatctaagcatagttagtcgtggattcttggctgcgttggaagccaagcctaccttgctcgatcaaatccgcgaggctcagaagaatgatccggacatgcatggactcctcaagaatatgaaacagggtaaagccgctggtttcacagaggatgaacacggaaccctatggaacggaaagcgggtatgcgttccagataacagagaacttaaacagttgatacttcaggaagctcacgagagcccttattccattcacccgggcagtacaaagatgtacttagacttgaaggagaaatactggtgggttagcatgaagcgggaaattgcagagtttgtggccctatgtgatgtgtgccaacgtgtcaaggcagagcaccaacgaccggccggacttctccaacctctccaagtaccagaatggaaatgggatgaaattgggatggatttcatcaccggacttccaaaaacccaaggtggatatgattctatatgggtagttgtggatcgattaaccaaggtagctcgatttattcctgtgaagaccacctatggagggaacaagctagccgagctctacttcgctaggatcgtgagtctccatggcgttcccaagaaattcgtatctgataggggaagccaattcacctctcacttttggaagaagctccaagaagacctgggtactcgattgaatttcagcaccgcctatcacccgcagacagatggacagaccgagtgtctaaatcagatcctagaagatatgctccgcgcatgtgtactagatttcgggaagacctgggataagagtctcccctatgccgagttctcctacaataacagctatcaagccagcatacaaatggcaccttatgaagcgttgtacgggcgcaaatgccggacaccgctattgtgggaccaagttggagaaagccaagtgttcgggactgatatcctgagagaagctgaagctaaagtcagaaccattcgggataacctaaaggtggcacagtcccggcagaaaagttatgcagataaccgtcgctgtgacctggaattcgcagtggatgattttgtgtaccttcgggtcacgccattgcgaggtgtacacaggtttcagacaaaagggaagctcgcacctcggtatgtgggtcctttccgtatcgttgctcgacgcggagaagtcgcttaccagttggagctgcccgcctccttgggcaacgtgcatgatgtgttccatgtgtcgcaactcaagaaatgccttcgagtgccatccgagcaggccgactcagagcagattgaagttcgcgaagatttgacctacgtggagaggccagtgaaaatcctggacaccatggagcgcaggaccaggaaccgggtaatccgtttttgcaaggtccagtggagcaaccatgccgaagaagaagctacctgggagcgtgaagacgagctcctccgtccgtttccgcctctcgccgcccttcctcctcgccggattcgagctcgcgacgtcgctctctctctccgccgtcgccgccgagctccggtccgccgctgtcgtcgccccggaccacctcccacctcggcgccgcctcattcgggttcgccgcatcctcgccaacctcgtccacctctccgtgtcggtcgccgaccgccggaacgccgtcgaccccgtcgacccgagccgcgccgctgcctccctccgctccggccgcctcctccgtcgccgccgtcgccccggggtgagccgtggaccgtcgcctcctttcccccttccctcccctctctcggccacctttccgccgcgccagtggttgccggcggcgaccat

SEQ ID NO: 5156 - DNA, 611 bp, Oryza sativa
  Clone ID: PAT_MRT4530_11972C.1
ccccccccccaataataaatttttttcgggggggaaccaattttccattaccaaatttttctccaaattacaacccgttgaccaaagcgtaaaaaaaaatttttttttccttccggaaataaaaatttccagggaaaacccccttttctttgaaaaaccccccaaaaaaaaaacccccccttttgcctttttttcggtttggtttgaacctttataaaatccctaacaatttttggcgtggggccccccccccccccaattgaatttccccaatggaaatctaaagcggcccccttgagttttttcgaaatccctgaaaaaaacttcccctgggggaaggggtgctcaaattcattttccgggggccaccttaaccctttgggggaaaaaggtccggccccaaacgggttccccccctaaatttttcccattgaaaaaattttggccccaaagggttccccaaccggaacaaaaaccatgccgggggaaaaaaactaaattttttttttaaacgggttattctccttaccaccccccttggtaccaattttaaaaaaaattcccgggggttttccttaaaagtttttttcactccaaaagcccccggggga

SEQ ID NO: 5157 - DNA, 1956 bp, Oryza sativa
  Clone ID: PAT_MRT4530_11973C.1
atgatgaatgctttcctccaccacctccaaaatccgccacaacagaatgctccaccaccacctccccaacactctaaactcgccgagttcctccgcatccgcccacctaccttctctagctccaacaaccccgtggatgcgttggattggttgcatgccgtggggaagaagttagacacggtgcagtgcagcgatgaggagaaagtcgtcttcgccgcccaccagctgcagggacccgcatctctatggtgggaccatttccaggctacgcagccagaggggcaacctattacttgggctcgcttcaccgccgctttccgaaggacccatgtgcccgctggagtcgtggcacttaagaaaagagaattccgagagttgaagcaaggcaaccgctccgtgatggagtatttgcacgagttcaacaacttggcccgttacgccccagaggatgtgcgggaagatgaggagaagcaagagaagttcttggcaggaatggaccctgagctgtccgtccgtctagtctctggggattatccggattttcaacgactggtggacaagagcatccgcttggaagccaagcacaaggaactggagtcgcacaagcgccgcttggcaaatttccgcaatcagcagggtgctaaccagagggtccgctacaccaatccctatccagggggatcctcctcgcagcagcaacaacagcagcagcaacctcgctccgcgcctcgacctcaattcgtgtctggtcaaggccgcagggacgcttcaggtccgcagcgtctgtgcttcaactgcttcgagcccgggcactttgcggataaatgcccaaagccaaggcgtcagcaaggccaagcgcctccccgctccaacaacggcgggaaggatgtcattcggggtcgtgtgaatcacgtgacggccgaggacgtgctgacaactccggacgtcatcgttggtacgttcctcgtgcattccatccctgctaccattttgttcgactctggagcttcccactcgtttatatctgtgccgttcgtggggagaaatcagttgggggtagaaaggcttagaaaccctctgctcatcaccacccctggaggggttatgacagcaaacaccgcctatcacccgcagacagatgggcagaccgagcgtctaaatcagatcctagaagacatgcttcgtgcatgtgtactagatttcgggaagacctgggataagagtctcccctatgccgagttctcctacaataacagctatcaagccagcatacaaatggcaccttatgaagcgttgtacgggcgcaaatggcggacaccgctattgtgggaccaagttggagaaagccaagtgttcgggactgatatcctgagagaagctgaagctaaagtcagaatcattcgggataatctaaaggtggcacagtcccggcagaaaagttatgcagataaccgtcgccgtgacttggaattcgcagtggatgactttgtgtaccttcgggtcacgccattgcgaggtgtacacaggtttcagacgaaagggaagctcgcacctcggtatgtgggtcctttccgtatcgttgctcgacgcggagaagtcgcttaccagttggagctgcccgcctccttgggcaacgtgcatgatgtgttccatgtgtcgcaactcaagaaatgccttcgagtgccatccgagcaggccgactcagagcaaattgaagttcgtgaagatttgacctacgtggagaggccagtgaaaatcctggacaccatggagcgcaggaccaggaaccgggtaatccgtttttgcaaggtccagtggagcaatcacgccgaagaagaagctacttgggagcgtgaagacgagctgaaggcagcccatcccgtcgtgacagcaaatcagggtcactctgtggctgacgactatgaaatgcttctgggtgagtactggcaaacctga

SEQ ID NO: 5158 - DNA, 3140 bp, Oryza sativa
  Clone ID: PAT_MRT4530_11974C.1
tcaggtccgcagcgtctgtgcttcaactgcttcgagcccggacactttgcggataaatgcccgaagccaaggcgtcagcaaggccaagcgcctccccgctccaacaacggtgggaaggatgtcattcgtggtcgtgtgaatcacgtgacggccgaggacgtgctgacaactccagacgtcatcgttggtacgttcctcgttcattccatcctctgtaccgagggccagaacacccagttgttttctttgcacctccaacctctggtatgccgcccaagcgagagattgagttccggatagatcttgctccaggaaccactcctctgcacaagcgaccctaccgaatggcagcaaatgaactggccgaagtaaagaaacagttggaagagttgaaggaaaaggggtatatacgtctgagtactttcccatggggtgctcctgtgatttttgtggagaagaaagacaagacgaagaggatgtgcgttgactacagagctctcaatgaagtcaccatcaagaacaagtaccctcttccccggatcgatgatctgttcgatcagcttaaaggtgccactgtattctccaagatcgatcttcgttccggatatcaccaattacgtatttgtgaagaagatattccgaagaccgcattcaccacgcgatacgggctgtatgaattcacggtgatgtcgttcggtctaaccaatgcacctgccttcttcatgaacttaatgaacaaagtgttcatggaatacttggacaagtttgttgtggttttcatcgatgacattctgatatactcacaatcagaggaagaccatcagcaccatctccgtctggtgttgggaaagttgcgggaacatcaattgtatgccaagcttagcaagtgtgagttctggttgcccgaagtcaaattcttggggcatgtgatatctgctaagggagttgctgtggaccccgaaacagtgaccgccgtcaccgattggaagcaacccaagacagttactcaagtccgcagtttcttaggtttggcaggatactaccggagattcatcgagaacttctccaaaatcgctcgacccatgacacagttgttgaagaaagaagagaaatttgtgtggagcccgcaatgcgagaaggcgttccagactctcaaagaaaagctggtttcctcgccggtgttaatcttgccggatactcgcaaggatttcatggtgtactgtgatgcttcgcgccaaggattcgggtgcgtgctcatgcaggatggtcatgtggtggcctatgcctcacgccagctacggcctcatgaaggcaactatcctacccatgatttggagttagccgcggtggtgcatgctctaaaaatctggcggcactatctcattgggaatcgctgtgaaatatatactgatcataagagtttgaaatacatcttcactcagtcggacctgaatcttcggcaaaggagatggttagaactcatcaaggattatgatgtgggaattcactatcatcctggtaaggccaacgtggttgccgacgctctaagtcggaaaagccattgcaacactcttaacgtccgtgacatcccacccgaacttaatcaacagatggaagccctgaacctaagcatagttggtcgtggattcttggctgcgttggaagccaagcctaccttgctcgaccaaatccgcgaggctcagaagaatgacccggacatgcatggactcctcaagaatatgaaacagggtaaagccgctggtttcacagaggatgaacacggaaccctatggaacggaaagcgggtatgcgttcccgataacagagaacttaaacagctgatacttcaggaagctcacgagagcccttattccattcacccgggcagtacaaagatgtacctagacttgaaggagaaatactggcagagcactagcgaccggccggacttctccaacctctccaagtaccagaatggaaatgggatgaaattgggatggatttcatcaccggacttccaaaaacccaaggtggatatgattctatatggcaccgcgtatcacccgcaaacagatggacagaccgagcgtctaaatcagatcctagaagatatgcttcgcgcatgtgtactagatttcgggaagacctgggataagagtctcccctatgccgagttctcctacaataacagctatcaagccagcatacaaatggcaccttatgaagcgttgtacgggcgcaaatgccggacaccgctcttgtgggaccaagttggagaaagccaagtgttcgggactgatatcctgagagaagctgaagctaaagtcagaatctttcgggataatctaaaggtggcacagtcccggcagaaaagttatgcagataaccgtcgccgtgacctggaattcgcagtgggtgattttgtataccttcgggtcacgccattgcgaggtgtacacaggtttcagacgaaagggaagcttgcacctcggtatgtgggtcctttccgtatccttgctcggcgcggagaggtcacttaccagctggagctgcccgcctccttgggcaacgtgcatgatgtgttccatgtgtcgcaacttaagaaatgtcttcgagtgccatccgagcaggccgactcagagcaaattgaagttcgcgaagatttgacctacgtggagaggccagtgaaaatcctggacaccatggagcgctggaccaggaaccgggtaatccgtttttgcaaggtccagtggagcaaccacgctgaagaagaagctacctgggagcgtgaagacgagctgaaggcagcccatcccgatctcttcgccaacgctgcagcttcggaggatacgctcttcgtggaagttgaagccgacgtttgggaaagtgagcaaggcaatcttgctcaatttttcccaagcccagaagaggagctccttgaagatgaaggctttggtgtctagctcgtgcctgccgtcaagcgcctgtggtcgtcgccctagtcttccgctgtttctcgtttgtctttgtgtgtgctgggccttgcctcctgggacaaggattaatgcacgcacgtaaggaatgcccgttgggttatttccggtcgtgacaagttctgcccgcctccttgggcaacgtgc

SEQ ID NO: 5159 - DNA, 2085 bp, Oryza sativa
  Clone ID: PAT_MRT4530_11975C.1
atgccgcccaaacgagagattgagttccggatagatcttgctccaggaaccactcctctgtacaagcgaccctaccgtatggcagcaaatgaactggccgaagtcaagaaacagttggaagagttgaaagaaaaggggtatatacgtccgagtacttccccctggggtgctcctgtgatttttgtggagaagaaagacaagacgaagaggatgtgcgttgactacagagctctcaatgaagtcaccatcaaaaacaagtaccctcttccccggatcgatgatctgttcgatcagcttaaaggatactaccggaggttcatcgaggacttctccaaaatcgctcgacccatgacacagttgttgaagaaagaagagaaatttgtgtggagcccgcaatgcgagaaggtgttcaaaactctcaaagaaaagctggttgcctcgccagtgttaatcttgccggatactcgcaaggatttcatggtgtattgtgacgcttcgcgccaaggattggggtgcgtgctcaagcaggatggtcatgtggtggcctatgcctcacgccagctacggcctcatgaaggcaactaccctacccatgatttggagttagctgcggtggttcatgctctaaaaatctggcggcactatctcattgggaatcgctgtgaaatatatactgatcataagagtttgaaatacatcttcactcagtcggacctgaatcttcggcaaaggagatggttagaactcatcaaggattatgatgtgggaattcactatcatcctggtaaggccaacatggtcgccgacgctctaagtcgaaaaagccattgcaacactcttaacgtccgtggcattccacccgaacttagtcaacagatggaagccctgaacctaagcatagttggtcgcggattcttggctgcgttggaagccaagcctaccttgctcgatcaaatctgcgaggctcagaagaacgatccggacatgcatggactcctcaagaatatgaaacagggtaaagccgctggtttcacagaggatgaacacggaaccctatggaacggaaatcgagtatgcgttccagataacagagaacttaaacagctgatacttcaggaagcccacgaaagtccttattccatccaccctggcagtacgaagatgtacttagacttgatggagaaatactggtgggttagtatgaagcgggaaattgcagagttcgtggccctttgtgatgtgtgccagcgtgtcaaggcagagcaccaacgaccggccggacttctccaacctctccaagtacctgaatggaaatgggatgaaattgggatggatttcatcaccggacttccaaagactcaaggtggatatgattctatatgggtagtggtggatcgattaaccaaggtagctcgattcattcctgtgaagaccagctatggagggaacaaactagccgagctctacttcgctaggatcgtgagtctccatggcgttcccaagaaaatcgtatctgataggggaagccaattcacctctcacttttggaagaagctccaagaagagctgggtacccgattaaacttcagcaccgcataccacccgcagactgatgggcagaccgagcgtctaaatcagatcctagaagatatgcttcgcgcatgtgtcctggatttcgggaagacctgggataagagtctcccctatgccgagttctcctacaataacagctatcaagccagcatacaaatggcaccttatgaagcgttgtatgggcgcaaatgccggacaccgctcttgtgggatcaagttggggaaagccaagtgttcgggactgatatcctgagagaagctgaagctaaagccgactcagagcaaattgaagttcgcgaagacttgacctacgtggagaggccagtgaaaatcctggacaccatggagcgcaggaccaggaaccggataatccgtttttgcaaggtccagtggagcaaccacgccgaagaagaagctacctgggagcgtgaagacgagctgaaggcagcccatcctgatctcttcgccagttcttccgaatctcggggttga

SEQ ID NO: 5160 - DNA, 2358 bp, Oryza sativa
  Clone ID: PAT_MRT4530_11976C.1
atggccggcagcgtcacccgtcgtggtttgcacatgactggcttcgtcttggagctgcgaggcatgtgcgtggtcttagggccgctcccggagcaggagggtgaggatgcagagcctcacgctggttgggaggtcacagcagtgatcctctccggctctcccgagcggacttcgctggcagtcaccgcgggtggggattccttccccgccgcttgccagaacgccgctctcctcgccatcggcacccttcacccgcgctacccggacgagttgcagcactcgccctaccgctaccaccctcgtcgcggaggagcccgcgactacgccaccttccgggatgctagctcggaggatgacgctaccgtcgtgcatctggcacgcatggtggaggcgtacgacgcggctcgtatcgacttccatcagatggtgcgtcgtggcatggtggagaacaacctgaagatcctggagctgcgtcaggagaacctgcagctcaagaaggacctcgacgcgttggaggcgcagctgcatcagctcaagatcgcccagggagaggacagccgtcccaagcgtcgccgcgtctgccgcagccagaagatcaccgcccgcaagagcacctccaggcccgagcttgttcgtcagtccctggcgtggacttgcttcgtcgagacccctcgtgccgagcctgcgcccgtggttccccaggagggggaagcctccggcgttggtagctcggaggttgtgtggggcatggttacaccgatggtgacgaccaggagaaatgttaacaccggtgaaggcaaccaacccgagggcagcaaccacaaccaccaaggcaatccacctccacctccacctccgcctccaccaccaccgccagacaccaacgccattctcacccaaatcctcgcccagcaagccaacatgatgaccgctttcctccaccacctccaaaacccgccacaacagaatgctccaccaccacctccccaacactctaaactcgccgagttcctccgcatccgcccacctaccttctccagctccaacaaccccgtggatgcgttggattggttgcatgccgtggggaagaagttagacacggtgcagtgcagcgatgaggagaaagtcgtcttcgccgcccatcagctgcagggacccgcatctctctggtgggaccacttccaggctacgcagccagagggacagccgattacttgggctcgcttcaccgccgccttccgaagaacccatgtgcccgccggagtcgtggccctcaagaaaagagaattccgagagttgaagcaaggcaaccgctccgtgatggagtatttgcacgagttcaacaacttggcccgttacgctccggaggatgtgcgggaagacgaggagaagcaggagaagttcttggcaggattggaccccgagctgtccgtccgtctagtctctggggactatccggattttcaacgactggtggacaagagcatccgcttggaagccaagcacaaggaactggagtcgcacaagcgccgcttggcgaatttccgcaatcaacagggtgctaaccagagggtccgctacaccaatccctacccagggggatcctcctcgcagcagcagcagcagcagcagcagcagcaacctcgctccgcgcctcgacctcaattcgtggtgcgcatcccacagccgcagcagcagcagggtcagcaagggactcgtgcgccccgtcctcctacgccagctgtgcagcccgttcaaggccgcagggacgctcaaggtcagcagcgtctgtgcttcaactgcttcgagcccgggcactttgcggataaatgcccgcagccaaggcgtcagcaaggccaagcgcctccccgctccaacaacggcgggaaggatgtcattcggggtcgtgtgaatcacgtgacggccgaggacgtgctgacaactccagacgtcatcgttgagaagaaagacaagacgaagaggatgtgcgttgactacagagctctcaatgaagtcaccatcaaaaacaagtaccctcttccccggatcgatgatctgttcgaccagcttaaaggtgccactgtattctccaagattgatcttcgttccggatatcaccaattacgtattcgtgaagaagatattccgaagaccgcattcactacgcgatacgggctatatgaattcacgagtttgtggctctatgtgatgtgtgccagcgtgtcaaggcagaacaccaacgaccggccggacttctccaacctctccaagtgccagaatggaagtgggatgaaattgggatggatttcatcaccggccttccaaaaacccaaggtggatatgattctatatgggtaa

SEQ ID NO: 5161 - DNA, 552 bp, Oryza sativa
  Clone ID: PAT_MRT4530_11977C.1
atgaaggcttcctcgttggccgccgtcgccgccgcggtgctcgtcgccgcggcgtgctccgggcgcgcgccggtggcggaggcgacgatcgagagcacgtgcggggcggcggcgaagggcgaccggcgcgtggacgtcggcttctgcgcgcggcagttcgcgtcgtaccacggcgcggcggaggcggacgcgtgggggctcgccaagatcgcggcgctcatcggcgtcaacctcgccgacgacgccgtgttcgacatcggcgccggcaagatccgcccctcccccggcggcggcgccaagggggacaaggccatggacgcgtgcgccaaggcgtacgacgccgtcggggtcgccttcgcggaggctgccgacgagctgggctcgcgccggtacgccgcggcgaggcaggagctggcgcgcgtggcggcgctcgtgcagcggtgcgacggcggcctctcccgggccggcgccaggtcgccgctgcccaggtacagcgccgactgccagcaggtggccatcatgggcatcgccattactaacctcctcaagtga

SEQ ID NO: 5162 - DNA, 4674 bp, Oryza sativa
  Clone ID: PAT_MRT4530_11978C.1
attcttcgcatgattttgaggatgtattttagaggcgatttgggacgcgacagtttattagagtagaagcctttcttttccgttggtcgtgtagacgctgcagcttcggaagatccgctcttcgtggaagttgaagccgacgtttgggaaagcgagcaaggcaagtcacatcatctccccctctattcaaaatcctcaaaatggttttaggctgggctcggggtgcatggttttgatagtagcacctcggccatataaggaccggtcttcgggcctctgttgcaaagcactaccgtacttccacatgtctagtgggtaaggcttagtttgtgactcagtctagttataaacaaaagtacacggatggagatggaagaagtcgggggtcgatggacatctgtcccgggggttccggccgtaggtgggattgggtcggtactcttgtctatggctaggatggattggaaactatgtcacgtcttccgtctgtataccgtggtgatggccggcagcgtcacccgtcgtggtttggacatgactggcttcgtcttggagctgcggggcatgtgcgtggtcttggggtatccacatggagtggactaccaggcccggccgcttccggagcaggagggtgacgatgcagagccccacgctggttgggaggtcactgcagtgatcctctctggctctcccgagcggacttcgctggcagtcaccgcgggtggagattctttccccgccgcttgccagaacgccgctctcctcgccatcggcactcttcaccagcgctacccggacgagttgcagcactcgccctaccgctaccaccctcgtcgcggaggagcccgcgactacgccaccttccgggatgctagctcggaggatgacgctaccatcgtgcacctggcgcgcatggtggaggcatacgacgcggctcgtatcgacttccatcagatggtgcgccgtgggatggtcgagaacaacttgaagatcctggagctgcgtcaggagaacctgcagctcaagaaggacctagacgcggtggaggcgcagctgcatcagctcaagatcgcccagggagaggactgccgccccaagcgtcgctgcgtctgccgcagccagaagatcaccgcccgcaagagcacctccaggcccgagcttgttcgtcagtccctggcgtggacctgcttcgtggagacccctcgtgccgagcccgcgcccgtggttccccaggagggggaagcctccggcgttggtagcacggaggatgcgctgttgctcaccttccgccctggcccgtcgcagcggagaaatgctaataccggtgatggcaaccaacctgaaggcagcaaccacaaccaccaaggcaacccacctccacctcctcctccgcctccacctccaccaccagataccaacgccattctcacccaaatcctcgcccagcaagccaacatgatgactgctttcctccaccacctccaaaatccgccacaacataatgctcccccaccacctccccaacactctaaactcgccgagttcctccgcatccgtccacccaccttctctagctccaacaaccctgtggatgcgttggattggttgcatgccgtggggaagaagctagacacggtgcggtgcagtgatgaggagaaagtcgtcttcgccgcccaccagctgcagggacccgcatctctatggtgggaccacttccaggctacgcagcccgaggggcaaccgattacttgggcccgcttcaccgccgctttccggagaacccatgtgcccgctggagtcgtggctcttaagaaaagagaattccgagagttgaagcaaggcaaccgctccgtgatggagtatttgcacgagttcaacaacttggcccgttatgctccggaggatgtgcgggaagatgaggagaagcaagagaagttcttggcaggaatggaccccgaactgtctgttcgtctagtctctggggactatcctgatttccaacgtctggtggacaagagcatccgcttggaggccaagcacaaggagctggagtcgcacaagcgccgcttggcgaacttccgcaatcagcagggtgctaaccagagggtccgctacaccaatccctacccagggggaacctcctcgcagcagcagcagcagcagcaacctcgcccagcgccccgacctcaattcgtggtgcgcgtcccacagccgcagcagcagcagaatcagcaagggactcgtgcgccccgtcctcctacgccaactgtgcagcccgttcaaggccgcagggacgctcaaggtccgcagcggctgtgcttcaactgcttcgagcccggacactttgcggataaatgtccaaagccaaggcgtcagcaaggccaagcgcctccccgctccaacaacggcgggaaggatgtcattcggggtcgtgtgaatcacgtgacggccgaggacgtgctgacaactccagacgtcatcgttggtacgttcctcgttcattccatccccgctacaattttgttcgactctggagcttcccactcgtttatatctgtgccattcgtggggagaaatcagttgggggtagaaaggcttagaaaccctctgctcatcaccacccctggaggggttatgacagcaaagtattatagccctgccgtccctatagaaattcaggggattccttttccctcggatctgattctgctagacaccaagaacttggatgtgattcttgggatgaattggttggctcaattccaaggagtagtggattgcgcgcggcgcactgtcactctgtaccgagggccagaacaaccggttgttttctttgcacctccaacctctgtcagaagttcagaactgcatcagataggtctgtcagaaatccccatagtcagagagttcggagacgtgtttccggaagaactacccggaatgccgcccaagcgagagattgagttccggatagatcttgctccaggaaccactcctctgtacaagcgaccctaccgtatggcagcaaatgaactggccgaagttaagaaacagttggaagagttgaaagaaaaggggtatatacgtccgagtacttccccctggggtgctcctgtgatttttgtggagaagaaagacaagacgaagaggatgtgcgttgactacagagctctcaatgaagtcaccatcaaaaacaagtatcctcttccccggatcgatgacctgttcgatcagcttaaaggtgccactgtattctccaagatcgatcttcgttccggatatcaccaattacgtattcgtgaagaagatattccgaagaccgcattcaccacgcgatacggactgtatgaattcacggtgatgtcgttcggtttaaccaatgcacctgccttcttcatgaacttaatgaacaaagtgttcatggaatacttggacaagtttgttgtgccgcgccgcgccgccgttgcagccgccgtcgtcagtcgccgtcgccaccatcgggttcgcaaggtcgccgccgtccccgtccaccgcttcgccgccgccgaagaccgccggagcaccgtcgccgccgtcgacccgatcttctccgccgccttttcctcgacgccgccgccgtccgttggtcttccgccgacgttttggtcatcggtgagttcgccgcgccgtgatctacgtcttggtgccctccgtttgtgccgtagagccgccgttcgccggcgagcatgcgccgtccgagccgtccgagccgccgagccgccgccggtgctgacgtcgtcgctgaccccctttccgaggtaccgtggtggtactgaggcacatggtgacatgatgtggggctgtgtcttgtgggtacagtggtacacctctggccagagatactaccggaggttcatcgagaacttctccaaaatcgctcgacccatgacacagttgttgaagaaagaagagaaatttgtgtggagcccgcaatgcgagaaggcgttccagactctcaaagaaaagctggtttcctcgccggtgttaatcttgccggatactcgcaaggatttcatggtgtactgtgatgcttcgcgccaaggattgggcctctcggtccacggcggaccgggagcacgcggctggcggcggccggcgccgtgggtcccacgcgtcagccgcacccgcgggcgcgggcggctgacggccgggccccacctggcagccgcggggcgcgcccgaaggcggcctcgccggcacggccgacgggagaacggcgcacccgcgccccgatggtcgccgccggcgaccaacggcgcggcggagtggcacccgagagagaggagggaagggggaagcgaacggagcggtccacggctcaccccggtcgacggcgacgacgggaacggcggccgaaaacggagaaaggcggcggcgcggttcgggacgacgaggacgacggcgttccggcggtcggcgagcgaagcggaggggcggacgaggtcgacgacgacgcggcgaagccgaaggagacgacgccgagaggggaggaagtccggagcgacggcggcggcgaaccggagctcggcggcgacggcggagagaaggtgcgacggcgcgagcacgattccgacggggagagcgagcggcgagcggcggaaacggaggaggagagcacgggggacgtttaaatag

SEQ ID NO: 5163 - DNA, 783 bp, Oryza sativa
  Clone ID: PAT_MRT4530_11979C.1
atggcttgtgttgtgtgcgcaggtgacgaccggcgattctgccagtttggtgagctgacttggccgcatgcccgcatccagctaacaataactgctattctgttctggaatgacacctgggccatcaacccgacgttgtaccaaaagttcgaagccctattttcccatgcaacggatcaagacgtcatagtgaagtctgtgttccaagggggagatgagcaacatttgcacacttacagcctccgtcaggactgcctaagctgcatcaccaaatcttttttcctggagctgggcatcaaggcgtcggcggcggcggccccgtgtcctcccccgtccacgctccacaccgaacctgaacctcgtcgctggcagccgcatcctcccccgtccacggtcctctctcgtccacggtccacatcgaagctcgtcgccggcgaccacgtcctccgtcaggagctcatcaccggcggccgcgtccgtcgtccacacctcagccggtggcagcgtcctccacgccggagctcatcaccagtgccgtcaccatcaccacgcaggatcctccgttatccacgccccacgccggagctcgtcgtcagcgccgtctctatcaccacgcaggatcctccgccgtccatgcgaccatgtcccacgccagagctcgccggcggccgcgtcctccacgccggagctcatcgtcggcactgcttccatcaccacgttgcgatatcttgctacatcgaacgagcaagttgtggaaaagaggagcatcttgttggagggacg

SEQ ID NO: 5164 - DNA, 420 bp, Oryza sativa
  unsure (1)..(420): unsure at all n locations
  Clone ID: PAT_MRT4530_1197C.1
cgatggtaacaaagatttcaccgtttaatctaatatgtggattttatgacatcggacctccgncgatgattctttaaccttagatcatacttgnntctatatatattgntagccgattggnttctacttgattatattgctattttattacatcagnatcagccgagcgattgcctctatattgttatttacatcatgtcagaatctacattggatgtatagccgatagctcaaaaccctatcgatatcggctggactacttcatcggcttgtcagtcgatcggctcgatcagctcactggtcttgtcagttgtaggatcaaactgactggcacgcccgcacctcaccaagatttggacctgcactggagctaagcagatctcccaggccagtgtgtatttttcgcatcatcagctcgtt

SEQ ID NO: 5165 - DNA, 306 bp, Oryza sativa
  Clone ID: PAT_MRT4530_11980C.1
atgaagttaagcatgaaacgacccccgtacaaccgcacttctcgtatggagtgcatgaggatgaaaagttcatggagcgggtactgccaatgcgaggttatcgaaaagctttgccgtgacgcgtctcatgtgttgagacaaggctcatgtgttgggcagtcgcggagtgtgggtaaagtgtacatccactgcagggttacaagtccgtttcaggttacaagattgacggagcgtggggctcctcaccgggagaccgcgcgggcccccctttgccggttcggccaggggcgctgggtgaggttctaa

SEQ ID NO: 5166 - DNA, 3402 bp, Oryza sativa
  Clone ID: PAT_MRT4530_11981C.1
tcggcattagatgttccgggatggcgtcgccgtacgaccaccagtcgccgcatgcgcagcacccgtcggggttgccgaggccgccgggggcgggggcgggtgcggcggcgggcgggttcgcgcgggggctgatgaagcagccgtcgcggctggcgtccggggtgaggcagttcgcgtcgagggtgtcgatgaaggtgccggagggggtgggggggatgcggcccggtggcgggaggatgacgcggatgcagtccagcgcgcaggtggggctccgggggctccgcttcctcgacaagacgtccggcgggaaggaggggtggaagtccgtcgagcgccgcttcgacgagatgaaccgcaacggccgcctccccaaggagagcttcggcaagtgcatcggcatgggggactccaaggagttcgccggcgagctgttcgtggcgctggcgcggcggaggaacctggagccggaggacggcatcaccaaggagcagctcaaggagttctgggaggagatgaccgaccagaacttcgactcgcggcttcgcattttctttgacatgtgcgacaagaatggcgatgggatgctcacggaagatgaggtcaaggaggttattatactgagtgcgtcggcgaacaagctggcgaagctgaagggacacgcggcgacgtacgcgtcgctgatcatggaggagctggacccggacgaccgcgggtacatcgagatctggcagctggagacgctgctgcgcggcatggtgagcgcgcaggcggcgccggagaagatgaagcggacgacgtcgagcctcgcgaggacgatgatcccgtcgcggtaccggagcccgctgaagcggcacgtgtccaggacggtggacttcgtgcacgagaactggaagcggatctggctcgtcgcgctgtggctcgccgtcaacgtcggcctcttcgcctacaagttcgagcagtacgagcggcgcgccgcgttccaggtgatgggccactgcgtgtgcgtggccaagggcgccgccgaggtgctcaagctcaacatggcgctcatcctcctccccgtgtgccggaacacgctcaccacgctcaggtccacggcgctcagccacgtcatccccttcgacgacaacatcaacttccacaaggtgatcgcggcgaccatcgccgccgccaccgccgtccacacgctggcgcacgtcacctgcgacttcccgaggctgatcaactgccccagcgacaagttcatggcgacgctggggccgaacttcgggtgcaggcagccgacgtacgccgacctgctggagagcgcccccggcgtcaccggcatcctcatgatcatcatcatgtccttctccttcacgctggccacgcactccttccgccggagcgtcgtcaagctgccgtcgccgctgcaccacctcgccggcttcaacgccttctggtacgcgcaccacctcctggtgctcgcctacgtcctcctcgtcgtgcactcctacttcatattcctcaccagggagtggtacaagaaaacgacatggatgtacctgatagtcccagtgctcttctatgcatgcgagagaacgatcagaaaagttcgagagaacaactaccgcgtgagcatcgtcaaggcagcgatttacccaggaaatgtgctctctcttcacatgaagaagccgccgggtttcaagtacaagagcgggatgtacctgtttgtgaagtgccctgatgtctctcctttcgaatggcatcccttctccatcacttctgcacctggagatgactacctgagtgtgcatatccgtacactaggtgactggacgactgaactcagaaacctgtttgggaaggcttgcgaggcacaggttacttctaagaaggctaccctttcaagacttgaaactacagttgtggcggacgctcagacagaggatactaggtttcctaaggtccttattgatgggccctatggtgcaccggcgcaaaactacaagaagtatgacattcttttgcttattggtcttggaattggtgctactcctttcatcagcattctgaaggatctgttgaacaacattaaatccaacgaagaggtggaaagcatacatggttctgagataggcagcttcaagaacaatgggccaggaagagcttacttctactgggtgaccagagagcaagggtccttcgagtggtttaaaggagtcatgaacgatgtcgctgaaagtgatcacaataatattatagagatgcacaattacctgaccagcgtgtatgaagaaggcgacgcaaggtcagctttgattgccatggttcagtcacttcaacatgccaaaaatggtgtggatatcgtctccggcagcaggattcgcacacattttgcgaggcctaactggagaaaggtgttctctgacttggcgaatgcccacaaaaactcacgcataggtgttttctattgtggatcccctacactcacgaaacaactcaaggatctttcaaaagaattcagccagacaaccacaactagattccacttccacaaggaaaacttttaagaccgtaccaaaggacgtctaaacagactgcatatacttgtataggaaagaaatacgatagcattgggatagcaaatatagtcttacaagttttgctctacgatggattgtacaaaatatatgttgaaagctagtgtcaccatcgtgcatagattctggaatgtttacagatatatgtattggaacagtgggaatgcatgttagaaaaattgagttccaggtggtgcgccttgagcatgcatattttctctcttcagtctttctgccttcgccagtttttctgccctgactgtctgtgcattgcgtataagaacactattttgtggtgtgcattcagcactctgagcatttccagacaagttcctgttttttggaggcctgcctcttcttttaggctgagtattggcaggaatagttgcatcctttcgaggatacatagttgcatcctttcgaggcctgcccctttttctaggttgactactagcgttaacatatgcatcgttggatgtagatgctggaaccaacgctagtaagttattggattgatgttcatttgccgctccagtcatcatctgatcttccatagcattagcatttctgtgtaaagttccatcaagaactggaacattggtgtacaaaggtacgtgggcattagttagtgctgctgccgtttatagatggaggaaaaagaaaggcatgtattttctgagcaatttgattgtttcttagaatgtactagaaacaacgtgcggctttgccgcgcccaatttagattaggccaatctattttgtcagtggccttgtttaggatcaatggttttttttttctaacatattgaaccaaaaaccc

SEQ ID NO: 5167 - DNA, 121 bp, Oryza sativa
  unsure (1)..(121): unsure at all n locations
  Clone ID: PAT_MRT4530_11982C.1
gacactggtatcggtatagattttcagaactgctcacgagctttcactgcacactgttgcagttttcattatgangaccgattgagcatgcacagggagaaggccgatgaagcctatgtcc

SEQ ID NO: 5168 - DNA, 1878 bp, Oryza sativa
  Clone ID: PAT_MRT4530_11983C.1
cccacgcgtccgcccacgcgtccgcccacgcgtccggattcgcacacattttgcgaggcctaactggagaaaggtgttctctgacttggcgaatgcccacaaaaactcacgcataggtgagcctcttttttcagctattatcgtcgatgcaacaattttgagctttgcagtaacggttgttaacaaatccataaatatgcaggtgttttctattgtggatcccctacactcacgaaacaactcaaggatctttcaaaagaattcagccagacaaccacaactagattccacttccacaaggaaaacttttaagaccgtaccaaaggacgtctaaacagactgcatatacttgtataggaaagaaatacgatagcattgggatagcaaatatagtcttacaagttttgctctacgatggattgtacaaaatatatgttgaaagctagtgtcaccatcgtgcatagattctggaatgtttacagatatatgtattggaacagtgggaatgcatgttagaaaaattgagttccaggtggtgcgccttgagcatgcatattttctctcttcagtctttctgccttcgccagtttttctgccctgactgtctgtgcattgcgtataagaacactattttgtggtgtgcattcagcactctgagcatttccagacaagttcctgttttttggaggcctgcctcttcttttaggctgagtattggcaggaatagttgcatcctttcgtggatacatagttgcatcctttcgaggcctgcccctttttctaggttgactactagcgttaacatatgcatcgttggatgtagatgctggaaccaacgctagtaagttattggattgatgttcatttgccgctccagtcatcatctgatcttccatagcattgtttgtgttgccatccgttatagcatagacttttcttggtctacccaccttaggtttgaagacaggagctgtattttgaagtgcgaatttatccgaaataagtgttttcagcgggatagttatgtccaatggcagcatgatctcctccacttccttccactcgagatcctcctggtctccatcttgatagacaacactgtaccagttactttcactatcatacttgtccactttccctacaaaatgcttgtccccaaaaggtttccttactttccgcccttctagaaattcaccaaaacgatgatcaacaggaggttctgcagcattacgtggctcaggttgtgattcggatgctacatcaggaggcaagtctggaactccattgataatgacggcaggctctctggcaactttgatgacagatgcagtctttgattcttgcatgccatgaatctcctccatgacctcgggcttgcgctctccctgcggggaactgtgctcgcgaaactcggagggctctcccccctttcgcgggtgagagacctcgctcgccgtcgccgggtcgcacaaaccctaaccctccgacgagaagggcggggggtagatcctgacggcctggatctggcagcagccacgcagtacgatgggagcgcccgcaaaggtggtggccgttgagggaggcacggcgccgacgagaggcgggcgcgcggtggccgccgtctccggagaggcggagacggcgagaggtgagcgccgcaggcaatccctcatgttctttcccccccccccccccccactgaaggaatttctgcagaaatcttttgacctcattgtcacattcgttgtcctgtttgtccttaatcttgaatccgtcactggtgtaagcaatctccacaatactataacggccgacaaagattcggcagccaccctccccgcctttgacggaaagacaagaactgcaaatggccttcat

SEQ ID NO: 5169 - DNA, 479 bp, Oryza sativa
  Clone ID: PAT_MRT4530_11984C.1
cccgtgttgagcttgttcatggcgttgaggttcagggtcgcctcctcctcgctctgccctccggacaggaattcgatgaaaaaaaaaaacataatttgattaattgcagggaaggtcgacgcagtatgtccatttcacttcatggacaatgcaacagagaatgcccatatgatgcaaaacactacaaaaatgttatgttgctgctgcagcaccagcggcaaatttacatctcgccaagactgataaaacgtattatttcctttcccctccgcggacaagtagtataaagtaaaagattcacccatgtcttcagaatcttttcattgataaaaactacagcaaatgaagctgcgtttcgacagtcagatagggacaccatagttcgcaatcttcgtgagggtgttgttaagtactctcttctccttcttcacctgagaggcttggtctgcattttcttcttcttgcaactcttatccttt

SEQ ID NO: 5170 - DNA, 731 bp, Oryza sativa
  Clone ID: PAT_MRT4530_11985C.1
ttttcagcgggatagtatgtccaatggcagcatgatctcctccacttccttccactcgagatcctcctggtctccatcttgatagacaacactgtaccagttactttcactatcatacttgtccactttccctacaaaatgcttgtccccaaaaggtttccttactttccgcccttctagaaattcaccaaaacgatgatcaacaggaggttctgcagcattacgtggctcaggttgtgattcggatgctacatcaggaggcaagtctggaactccattgataatgacggcaggctctctggcaactttgatgacagatgcagtctttgattcttgcatgccatgaatctcctccatgacctaacaccgtatcagttgtccttctatgtagctataacagcctcgggcttgcgctctccctgcggggaactgtgctcgcgaaactcggagggctctgtaggtacgcgccacccccccccccccctttcgcgggtgagagacctcgctcgccgtcgccgggtcgcacaaaccctaaccctccgacgagaagggcggggggtagatcctgacggcctggatctggcagcagccacgcagtacgatgggagcgcccgcaaaggtggtggccgttgagggaggcacggcgccgacgagaggcgggcgcgcggtggccgccgtctccggagaggcggagacggcgagaggtgagcgccgcaggccccacgcgtccg

SEQ ID NO: 5171 - DNA, 273 bp, Oryza sativa
  Clone ID: PAT_MRT4530_11986C.1
atggcgcgagttattggccggtattgctccggtgagggagatcagccgcgcgtggtggtggccggcggcaaaaggcggtggcgcaaggcggttccagaggggaagatcaaggaaaacttcgtgacggcgccgtggaaaagaaaacgacggcgtcggctctgtgctccgattggatgtcgacggcggcgcgcacacacgtcggctgccagggagttgggcggcggggaaggaggaacacggcacagcatcgacgcgacttggcggcgacggtag

SEQ ID NO: 5172 - DNA, 169 bp, Oryza sativa
  Clone ID: PAT_MRT4530_11987C.1
gcttcgcttgacatgcaaatcgatcctagctctctacaccaatgtcatgacacggcgcggaccagggcgccgtaacatatcggcagcatcgaaccttacagacatccgatctctcctcacacgcactatatatatgctgggaagctggcttggatcaagaccatgccga

SEQ ID NO: 5173 - DNA, 138 bp, Oryza sativa
  Clone ID: PAT_MRT4530_11988C.1
tcggcgctgaagctcatcgatgacatctgcgccgccgtacactccgcctgcggtgccaatgtgtcctgtgccgacatcaccatgctcgccacgcgtgacgccatcgtcgcctccggtgtgtgccctacttcgacgttg

SEQ ID NO: 5174 - DNA, 939 bp, Oryza sativa
  Clone ID: PAT_MRT4530_11989C.1
atgtggtggccgggcgaaggcctcagggtagcacgccccgaaggcctgaggggtgtgacgtggcaccccgaggacggcaacaacaacaaggaagagatagtggaatcgaggaaagaaaagaaaggaataagagaacaagaggtgttggcgatagaccctcgccagccgactaagcagtggcacatgttccttttcggtgtcttgatactaggggtgcgacgacgcaagagctcgcatgctgcttcgccgccgctccgcacgttcctgagccggcgggagcaactccgcgcggcgccgtcttccccatcgccggtggaggagggagagcaagacgccagcgaagcaccgccacgcgtaagcgacgacgaggacggcggaagccggcggagattcaccgccgtgagcggcaacgacgccgatgaagtcgatagaacgccactgtttttccgagagtcacggcccaccgccttccctttttttccggatctgaggtcttggctcttggcggcggtaagctcgggtaagctggggtcgacggcggcgaacttcacctacacgctccgcgcagatttaacatgccatcatcctctgtaccatcgcgatgcccctgacgagaaggcagcgatcgaggaggtgcgccccacgctagatcgggagaaagaggtgagcccgtcgtggcccatagagcacctccgtcgcaccacccgtgcagatcggaggatgggacatcgtcccttgctctatgaggtggtggaactggacctgctgataggcctcccctatggactgagctttagcgccgttgatcaccatcttcaccggtcggaggaggccgaagatgtagccgtcagatcaggcacgacactgccgatcttcctcccagctgcccggaaggcactaggacaggagacaggaggagttcctttgatatttgattga

SEQ ID NO: 5175 - DNA, 667 bp, Oryza sativa
  unsure (1)..(667): unsure at all n locations
  Clone ID: PAT_MRT4530_1198C.1
tgnnaacgttctttgcaanaagtccccattgtaagcatcgagncccgttcnntgagncgctgggaggcctgnanctnnttctccaagacccaggacatccagatcgttgccgatgacctgactgtcaccaaccctcttcgcatcaagaaggctatcgaccagaaggccgccaacgctctgctcctcaaggtcaaccagatcggtaccctgaccgagtctatccaggctgccaaggactcttttgccgacggctggggcgtcatggtctcgcaccgttcgggtgagactgaggatgttaccatcgccgacattgccgtcggtctccgtgccggtcagatcaagaccggtgcccccgcccgctcggagcgtcttgccaagctcaaccagatcctccgcattgaggaggagctcggctccaacgctgtgtttgctggcgagagcttccgcaaggccatcaacatgtaatgcaaaattgttaaaatgcgaggctggagtagcctcttcctgatggtatcgaggactatgctggcacttgagcggtattgtcctctgaagcaggtaacttaacggcttatgataaaaaatgaactcagatagacgatgggctgttttgcaggtacccataataatacccatttggcccttttgaaaaaaaaaaaaaaaaaaa

SEQ ID NO: 5176 - DNA, 237 bp, Oryza sativa
  Clone ID: PAT_MRT4530_11990C.1
atgcgtggcaatcattatgaagcacatcaacctaaaccgacaacgtatgctgtgtcatactgtcggattcggcttaatcggctaaccccgtctgactcgaactctgccgatcttagccgtagccgattcggactccagccgatcttcactctgtttccgggacgatttccatctcgacttcttctcgatttcttctccatctccgatccttagattaccaaatttggtcgttaacac

SEQ ID NO: 5177 - DNA, 333 bp, Oryza sativa
  Clone ID: PAT_MRT4530_11991C.1
ggccccggaatcccatttcatatgttacatgatcttatttgccatagactacctatacctttatcaataattatgaggatttgccccccctaattaacaggagtcctattacaaaggaaatggttcggggtacttcgtttcaccgaattataggagccttttatgcatgcatgcccccccttggaaacgggggaaacaaccgatccaaccgggaaaaagaaaaaaaattaatgccgggggaaaatgggaaaaaaaaaaattgggcagacttattttttgagcaattggtgggaacgattgggcatgctcccccccggcccggggggggggggg

SEQ ID NO: 5178 - DNA, 468 bp, Oryza sativa
  Clone ID: PAT_MRT4530_11992C.1
atggggatgctatcgctgaagcggctcatggctaggcagcggcagcgggagtggcgccgacgtcgtcagaaggcgcagaaaccccgcgcagatggatcgattgcttctgaaagaaagggtaataattatcaatgtggtaaaagattaagatattcatggccaaactttccagaggatattgaataccatgtccttgatagctccacatattacgcgccgatgtcttaccctacaggtctggacgtcgaggagctggactgtttggttgagagtccccagggcgagggccgcgtggcgccggaggccggatcccgtggtgacggagcaggagcagtactgggggaggctacgaagcgcggggcgccacgccacgccacgccaccggaggggaagacgacgacgcgcacaggagggggaggcggaggcgggggaaacaaatgccgctccgcttctgccctaggccagtag

SEQ ID NO: 5179 - DNA, 1335 bp, Oryza sativa
  Clone ID: PAT_MRT4530_11993C.1
atgcaggggcagcagaagcagaatgcaggtggtggtggtggtgacaatgcgagcccttgcattgtgctggatgggcccatcatcgtcggcgccgggccgtcggggctggccgtggcggcgacgctccggcagcacggagcgccgttcaccgtggtggagcggtccggtggcgtggccgacctgtggacgaaccgcacgtacgaccgcctccgcctccacctccccaaggtgttctgcgagctcccccacgtcgccttcccgccggacttccccacctaccccaccaagcacgacttcctccgctacctccactcctacgccgcccgcttcgccatcgccccgctcctccgccgcaccgtcacccgcgcctggtacgaccacccggcctccctgtggcgcgtgacgacgacgacaacgtcgtcgtcggcgacgtctgtgatcaccgagtacgcgtcgccgtggctggtggtggcgagcggggagaacgcggaggtggtggtgcccaaggtgaaggggagggagaggttcgccggcgaggcgctgcactcgagcgagtaccggagcggggagaggttcaggggcatgagggtgctggtcgtcggctgcggcaactctgggatggagatgtgcctggacctctgcgagcatggcgccatgccgttcatgtcggtcaggagtggtgtgcatgttctaccgagagagatgtttggggcctcgacatttggtatagcaatgaagctgttgagatggctgcccatcaagatggtggataggtttctactcctcgttgcaaggatggtgctgggagacaccgagaagtatggtctcaagaggcccaaactgggcccattggagatcaagaacatcaccggcaagagccctgttctcgacgagggagcatggtccttgatcaaatcgggaaacatcaagaaagaaagaatgtacgataattctggctatgcatctggacaacgatcgttctttttgaaatgggtcgagatagtaccggaggtggagtcattcagcggcaacggggcgaggttcgtggacggcaacgagatggcgttcgatgccgtcatcttcgccaccggctacagaagcaatgtcccctcctggctccaggaggacggtgagttgttcacggaggagggcaagctgaggagcagcggcagcagcagtgagtggaggtggaggggtccaaacgggctctactgcgtgggattctccgggcggggcctgctcggcgctggagcagacgcgctgcgagctgccgccgacatcgccgggaggtggcaggagacgcagcaggcagcagccaacatctcctcggtgtag

SEQ ID NO: 5180 - DNA, 1437 bp, Oryza sativa
  Clone ID: PAT_MRT4530_11994C.1
atgaagaagaccatggtgctctaccctggcctctctgtcagccacttcctcccgatgatgaagctcgccgacgagctcgtggagcacggatacgccgtcaccgtcgcactcatcgacgacccgctccaaaagcaaatcgccttcacggccaccgtcgaccgcgtcatctcgtccaagccctccatatgcttccacaggctaccacgcgtcgaccaccttcccgccgtcaccaccaacgacggcgaattctacctccccgggtatctggacctcgtgaggcgacacaacgagcccctccatggtttcctctcttcccatttccgcggaggcatacaggccctcgtcgtggatatgatgtccgtcgaagcgctcgacatagctgagaggctcaaggtccctggctacctcttccacccatcgaatgcaagcctttttgccttcttcctccagattccgtccatctgtgcagagagtaaacggagcttcagtgagctaggagacacccctctcgagatccctggcctccctcccatgccggcctcccacttcatcgacaatcggcccgaggagccgcctgagagtgaagtgtacaaggccgtgatggatttggttcgcaggtacactaataaatgctccaatggcttcctcgtgaacactgtcgactcgctggaggcacgggtggtgaacacgctcaggcacgcacgccgtcaaggcggccgggcgttgccgccgttctactgcgtcgggccgttggtcaacaaggccggcgaaaggggagagcgacccgagaggcacgagtgcctcgcatggctcgaccggcaaccggaccgcaccgtcgtgttcctctgctttggtagcaccggcattggcaaccactccacggagcagctcagggagatcgccgtcggcctggagaaatccggccaccgtttcctgtgggtggtgcgcgcccccgtcgtcagcgacgatcccgacaggccggacctcgacgcgctcctcccggcggggttcttggagcgaaccagtggccaaggcgccgtcgtcaagcaatgggcgccgcaggtggacgtgctccatcaccgggccaccggcgcgttcgtgacacactgtggatggaactcggtgttggaggggatcaccgcgggcgtgccaatgctgtgctggccgctccactcggagcagaagatgaacaaggttctcatggtggaggagatgggcatcgccgtggagatggtcgggtggcagcagggccttgtcacggccgaggaggtggaggccaaggtgaggctggtcatggagtccgaggcaggcgtcgagctcagggcgcgcgtcacggcgcacaaggaagccgcggccgtggcttggaccgacgttggctcgtcgcgcgctgcgttcacagagtttttatctaacgcagacagccgacagacatcgtga

SEQ ID NO: 5181 - DNA, 168 bp, Oryza sativa
  Clone ID: PAT_MRT4530_11995C.1
atggcgtacggcgacgacggcggcggggcgacggcgtcggcgcggcgtggcagcgaggcgcgagagggtgaaaacggctatggcggcaccatgactcacttgcggctagtgctggtctccttgtgctgctacgggcaggtgatcggcggacggaggtatgctggatag

SEQ ID NO: 5182 - DNA, 287 bp, Oryza sativa
  Clone ID: PAT_MRT4530_11996C.1
gagacacaatcttggacgccggcaccaacaacgtgaccaccacccagggccatgatgaccctggctagaaatgcgccaagcactacaaggctggagcccgctacaacaagaggcgcgacgtactcaagatcggccccaaccagccagacaagctcgccattgatctgaatgcgcaaggcctcgctatgctacgccatcatatgccacgagaacggcatggtgccgatcggagagcccgacatcctagatcatgggcctcacgacatagaccgaagcgcctacaaata

SEQ ID NO: 5183 - DNA, 2217 bp, Oryza sativa
  Clone ID: PAT_MRT4530_11997C.1
agtacacaatttacttcacttgatttcttttcatgcttctcagctagtttttcaattaatacatccaagggtagttgcaaacataagctagccaaacccgagaaaacaaaactacgagaaagctacaaggtggcatttgaccaaacaatataacatatgtaaacaacaaaggaggccatggtagccatctaaattaaacacaaaattaaattatgtacctgcgtaatgcataactagagattaatgccgagttgctgactcaaataccagcttgctcccgagaagaacatcagcatttcatgtgtatagaaacaagtgacacacacatgtccaggagtgagtgttacacctatgcgataaaagagaaattagtcaccggcgtttctctttagacttaacagtggcccactgaaagtgaccacaatttgcttcttggtttgatgcaggtccctgagcacgggcacagacatagaataggcgaccaatattagagcctttcttcacagaccttggaatgcaaggttcatggtgtcctttgcaaagtggtagggtcatcttcattctctgctgtattctttgccactccagtgttgcttcattgcatttatctgttgaaagcgagcagggtacatctgagttaccctgatcttcggttgctggagttgtacactggatgctttctggcagacagtcattctttggatcatgtaattcatccataccatgcaaagtatctggtggagtaactatgctattggtactgctatctcctggctttgactttggttgttgaaaaaatgacttgatcgtaggttgggaagacaagttatgtttgtttttcttgttggacacagccttgctgcaagaaaaggaagcttttctactttgtgttgccagtaatgctgcagtgctattatgggagttgccacttgaaccttcatttaacaattgatcacgaattttccgcttgatgacactatgaaggtcgttacctttggaaaatttggctatatcagttggtggttcttccttatatatagctttcctttccaagccaccaccacagcagctttcatctgctctatccatggacatggcatctttatgttcataaatcatgcctttccttaggaatgatactatgctctgttgccgtccacggatttcaggaagatatctagcagctgatgaaggagtgttatgaactggaagttcaggtatctcattcagcacaatataaactggaatatgatctgatccttctagcttactacttctccctcctttccacattgacatattttcgctattccctcttctgaaatgatccataatttcacattcttccacatggcagggaaagatgctgtggtcatccacagaaccgcagtgatggaagcaggcaccagaaatgagaatgtgatcaattctagaaccataattgtatacttcagctccaactttttgattaaaacaggtataagctcccactctttcagggtgttttgatcggaaagcatcaaaaaatggacctccatgttctctcagcatggatctcaaccatttccgaaaccttgaattagggaaagggtaatgaagtaatttgtcattcccaagtggcttcatgttagagtactgtttgcttctcgaatccaggttgggcatcacacctatctgtagtatcttgtaaaatagtagcttaaagcgaactcgttctatatcatcttcttcaacagctgggccatatatattaaaaagaacaaaatgtccatgatctgtaattacacaacgtccttcattgtccaccttgagcagctcttcttttgttacttcaccaagaccttcctcttccacaggagttacaagaacaaaatccccaatagtttcactgttctttgcagtctcttgcaatccagtaaagccttcctcagctgctactggtaaagcaacctcttgactggaaaaggctgatgttacccggcaaaacgtggcaacaccagagtaagctccacgccctttcgatgaacgattgcatgaaataaaagcctcgtatccctcagccatgatgacatcccccgacaagtcctgcctcgacaattttgtctcctggaagcagatgatgtcggcgtcgagggcgtcgaggaggcggcggagcgagccatgctgcgccacccgcggccgcagcccgttcacgttgtacgtcactatcttcaccat

SEQ ID NO: 5184 - DNA, 429 bp, Oryza sativa
  Clone ID: PAT_MRT4530_11998C.1
atgacgaaaaagacagccggaccggatgaagacgacggcgcggctcgggtggacggggacgactgcgctccgacggtcggcgagctcgacaagagggtggacggggtcgacggcggtgcggcaaagccggaggagtccgcgccggggcgggaggcggtcccggcgagcggagaggacgctgcagcatcggaagatccgctcttcgtggaggttgaagccgacatttgtgaaagcgagcaaggcaagacaaatgaaggctacacgagctgcggcccggtagtcgagatgtcatggcacagggctggtgtcctgctgctagaggctcagtcctgcctacccgtcctggaggttccggccataggtgggcggcagcgcgccgcctcgctgcagctacagcacgacagcaagcgggagggcatggaggcctga

SEQ ID NO: 5185 - DNA, 3037 bp, Oryza sativa
  Clone ID: PAT_MRT4530_11999C.1
ccaattcattcatcaaccgccgtctcttccattctcaactccaatcctcattccatttccatattccgtctgtctgtctccaagtcccatgaagccgtctcccgccgccaacctggacgtccgcgtggagaggcctaggccaccgccggtgcaccctcaccggccgggaagtctcagggcgcgcccctactaccgccgatggacgccctggatcgtcgccgccatcgccctctcctgcgtcgtcgtcttcctcgtctccatgtatgtcaacgattgcccccgccgcaactccggggactgcgccgccggcttcctcggccgcttcgccttccagccgctcaaggagaatcccctcctcggcccttcctccgccacgttactgaagatgggagctctagatgtaactaaggttgtccatggtcaccaaggatggcgtctaattacatgcatctggcttcatgctggagttgttcatttgctcatcaatatgctatgccttctatttatcggcattcgacttgaacaagagtttgggtttgtgaggattggtctggtttatctcatctctggtcttggtgggagcttgatgtctgccctcttcatccgatcaagtatctctgttggtgcctctggtgctttgtttggattgattgggtccatgctttctgaactcataacgaattggtcgctctatgcaaacaaggtggcagcactactaacactagtgtttgtaattgtggtgaatttggctcttgggatacttcccagggtagataactttgcgcacattgggggccttatatccgggttccttcttggatttgttatgtttattcgtccacagtttgcatggattaatcagagaagagtagcacctggacaacaacctgctcctgtgaaacgcaagcacaagacataccaatatatactgtggttagctgctgccattatgctaattgtcggatttacagtggctatagtactgcttctccgaggatataatgcaaacgaccactgctcttggtgtcactatctcagctgtgttcctacgaaaagatggaaatgcaactcatcaccaacatattgcacgattctgaaaatggctatgaaggacatatctcttgacagttcatggtatgaccaaattgttcccctttgcaggcacagaagagcgatgaggagccgcagccccagcaagaggagaaggcatggcagcaggggaagaagccctccaagctcacgacatggctgtgccaaggataaggaaggtgctgctgtaagcctcttcgtcagcaaccttccgcgaagctgcagacctgaggatgtccaagttccatttcaaaagtttggtcctgttcgggatgtttatctgccaaaagactacaacactggggagccaagaggatttgcatttgtggagtttgctcactcttctgatgcttctaaagcgcgatatcacatgaaccgtaagatgctttctggacgtgagatcagtgttgcttttgctgtgcagacacggaaaaggcccgaggaaatgcgaagaataattggagccaggcataattccccacagagaaaggaagagtgccgaacaaactctccaggacagcctaaaggacatgatgagaagcggaagcgcagatcctatactcccaaatataagggatcgggcggtttgcttggctttggtcgtcgatgagacgcccgcctggcacctgatagtgaagccgccctgggctctgtgcaggtcacccaggccatcccctccagggcaatctcattctcgctcatactcacgttcccattctcttcatctccatgaccatgctagaacacggtcatgctctcctgccccaggaaggcaagatgaccagtatgcttccccgcagaggaaggagcaccaaacaaaatcatcaggacagacaaaaggacatgatgatatgcgcagatcctatactcctgaatataatgaatgccaggatgctgacaatggttttgatgagacacctccggcacctgatggtgagcgatcctctgtgctgggcaggtcaccccggccatcccctccaggacggtctcattgtcattcacactcacgttcccgctctcctgaactccgtggccatgctagatcacggtcatgctctcctgccacaggaaggcaagataaccagtctacttccccacagagaagggagaagcaccaaacaaaatcatcaggacaggctaaagaacatgatgagaagcgcagatcctatactcctgaatataatgatcgccgggatgctgacaatggttatgatcagacgccgccggcacctgatggtgagcgatcctgggcactgggcaggtcaccccagccatcccctccaggacggtctcattttcattcacactcgcgttcccgctctcctgaactccgtggccgtgctagatctcggtcatgctctcctgcccccggaaggcaaggagatgaccagtatgcttccccacagagaaaggaggagcagcaaacaaatcatcacgacagactaaagaacatgatgaggagcgaagatcctgcactcctgaatatagcgatcgccgtgatgctttcatcggtcatgatgagacaccgccgtcagccgaatgggggagtaaactgggcactgtgcaggttatctccaacaccgccgccagcagcaactagactcttctgtttatagctagactagattgaaggtgcgctcaatatttatgtcttatctcttgtacatgttgcgtgcatttggattgattattcacacatagagtatacatagcagcaaaatgagggatggtcgacgatgaacgtttcttgtttgtttcatagtactccgtatgatattatggtgtagaatcatgaaagtggagtgctatgggctttggatagtcgttgtggggtgtacggtgactccatctgtccggagtaaactaacactgtagaggtgaggtggagtgaatactagtaagaagagtaacttttaattagttgttttgttttggatccctctttaag

SEQ ID NO: 5186 - DNA, 156 bp, Oryza sativa
  Clone ID: PAT_MRT4530_1199C.1
atggatttattgaggagggggtccttgctgctggcgccggtggcgcacccctccggctgccgcgcatcatggaggtcctcggcgacggtggcaaggatggaggctcacacggtcgccgcccgacttttgcgtctttgccagcaggaggagctgtag

SEQ ID NO: 5187 - DNA, 411 bp, Oryza sativa
  Clone ID: PAT_MRT4530_119C.1
atgggctgctggggtgggctgtcggtgaactgtggcgagcggcataaccaccttctctgccagtacgccggtacaaacactgaagcttggacagtgtgtactactccagaaatggacttgatgggcgttcgtaaccaagggctgcttgctctttgtcagcctggcagactgcaaggtttcacatttttgcaggtaaacggtgggggcaagtccgagttgggcggctttggttacaggaaacggatgacgatgatcagacctgccacacctctgtcagaaacaaagtccacaagaggagttaatccccttgctaatcctgttcccgtgcaactagaaggcactgtctggccagtggttagtgatcactcccttgccaagcactcaacggggcaaatgcatccggttcggtga

SEQ ID NO: 5188 - DNA, 780 bp, Oryza sativa
  Clone ID: PAT_MRT4530_11C.1
ggtatttcggtcgtccgtaaaaaaaaccgggccaaaaaaccgagcgaaaaaaaccgggcgaaaaaaagtccgaccaaaaaacggagtgaaaaaaaaaacgggagaaaaaaaatgtctgataaaaaaacggagctaaaaaaaaggcaaaaaaaaaaacaattctgtccgaccaaaaaaataggaacggggcgaaaaaaacgagcgaagaaacctggcgaaaaaatagtctgatccaaaaaaaatcgaagcgaaaaagggagaaaaaaatttccgatcaaaaaaaaacggggcaaaaaaaagcagaaaaaaacgaaacagtcagtaaaaaaagagcgaaaaaatttaaaaaattttccgattccaaagaaaaaggaattatatatgacacggtaaaaaaaatcgaccgagcgaaaaaaagccgagaaaaaaaactgggcgaaaaaaagtccgataaaaaaacggggcgaaaaaaaaacaaatatgtccgacccaaaaaaaggcaaaaaaaaggaagaaaaatcgaaacgaaaaaaaatcgaccgggcgaaaaaaaaagcgagcaaaaaaactgggcgaaaaaatgaaaaaaagtctgataaaaaaaacggggcgaaacaaaaaacaattatgtccgatccaaaaaaaaggcaaaaaagggaagaaaaatcgaaacgaatccgactccgtcgacgcggtaaaaaaagggcgaaaaaaattaaaaaaaagtctgattacaaagaaaaacatcatcgaggttgggctattacatttaagatgttc

SEQ ID NO: 5189 - DNA, 535 bp, Oryza sativa
  Clone ID: PAT_MRT4530_12000C.1
tcgggtatattacttcaaggccctgcccgggttcaaatggggcaaccaccaatggaaagaccacgtggttcaacggcgagcttgctcccgcggacactggcttattatcccccaccctatgcacgtgtggtgaaagaaggccccatagtagataggatggtggcttgacctgggcattcaagacccaatcctaactctatggtaaccccccttgcacggaaagagtgtccatgctgtccgtgctgctccccaatggatggtgtgctacccaatggcattatcgcatctccacagagaagaggctccagaggctcaagcatacccgaggagatgagttcggtgcgcatgtgcactcccatcccatacccagagctaccccagacgtttataatgcgccccgaatcctcttaggtcggcttgcggataaagaataactaaataaataaattccacacccattttttctgctatgtactggtccccatctttgcgactaatggatgataaacctctctttatcccttaaaaaaaaaaa

SEQ ID NO: 5190 - DNA, 216 bp, Oryza sativa
  Clone ID: PAT_MRT4530_12001C.1
gacggccctcctttttttttttaagctcaaaagacctcaggggataaggatcctcaaacacaaacacagagaaagattgccaaccaagatacaaactcagcatagcactttccctcgacagaagcaaaaagtgatgacaaagcatagattttacaacacaagcttaggttaacaatagatagagtgcactataaacataggcagaggaaccagtct

SEQ ID NO: 5191 - DNA, 348 bp, Oryza sativa
  Clone ID: PAT_MRT4530_12002C.1
atgcggcctccacctcctccgctcagcgcggatttggctagcagtgtggacttggggaccgccgcctccgcatcctctgacgtcgaggaagcccgtggcaacaacggggttgggggtagatgggagggcggcgagctcgagcgccactgtgaccaagggatcaaaacacgtgtatacggtaggctcatggcttatgatacacggtgggttcaagaactcccatctgtcttatgggccatacgcactacactgacttcatccaacaaagagattgtcatggttacggataaggcatactgtcacgcccagaaatccggcaacctgaatctcaagcagattgtgtattaa

SEQ ID NO: 5192 - DNA, 2685 bp, Oryza sativa
  Clone ID: PAT_MRT4530_12003C.1
atggccggcagcgtcagccgtcgtggcttggacatgactggtttcgtcttggagctgcggggcatgtgcgttgtcctggggtatccgcatggagtggactaccaggccaggccgcttccggatcaggagggtgacgatgcagagccccacgctgcgtgggagcactcgccctaccgctaccaccctcgccgtggaggagcccgcgactacgccaccttccgggatgctagctcggaggatgacgctaccatcgtgcacctggcgcgcatggtggaggcgtacgacgcggctcgtatcgacttccatcagatggtgcgccgtgggatggtcgagaacaacttgaagatcctggagctgcatcaggagaacctgcagctcaagaaggacctagacgcagtggaggcgcagctgcatcagctcaagatcgcccagggagaggtctgccgccccaagcgccaccgcgtctaccgcagccagaagatcaccgcccgcaaaagcacctccaggcccgagcttgttcgtcagtccctggcgtggacctgcttcgtggagacccctcgtgccgagcccgcgcccgtggttccccaggagggggaagcctccggcgttggtagcacggaggatgcgctgttgctcaccttccgtcctggcccgtcgcagcggagaagtgctaataccggtgatggcaaccaacctgaaggcagcaaccacaaccaccagggcagcccacctccacctcctcctccgcctccaccaccaccaccagataccaacgccattctcacccaaatcctcgcccagcaggccaacatgatgactgctttcctccaccacctccaaaatccgccacaacagaatgctccaccaccacccccacaacactctaaactcgccgagttcctccgcatccgcccacctaccttctctagctccaacaaccccgtggatgcgttggattggttgcatgccgtggggaaaaagctagacactgtgcagtgcagcgatgaggagaaagtcatcttcgccgcccaccagctgcaggggcccgcatctctatggtgggaccatttccaggctacgcagccagaggggcagcctattacttgggcccgtttcaccgccgctttccggaggacccatgtgcctgccggagtcatggcccttaagaaaagggaattccgggagttgaagcaaggcaaccgctctgtgatggagtatttgcatgagttcaacaacctggcccgttacgccccggaggatgtgcgggaagatgaggagaagcaagagaagttcttggcaggaatggaccctgagctgtccgtccgtctagtctccggggactatccggatttccaacgtctggtggacaagagcatccgcttggaagccaagcacaaggaactggagtcgcacaagcgccgcttggcgaatttccgcaatcaacaggatgctaaccaaagggtccgctacaccaatccctatccagggggatcctcctcgcagcagcaacaacagcagcagcaacctcgctccgcgcctcgacctcaattcgtggtgcgcgtcccacagccgcagcagcagcagaatcaacaagggactcgtgcgccccgtcctcctacgccaactgtgcagcctggtcaaggccgcagggacgctcaaggtccgcagcgtctgtgcttcaactgcttcgagcccgggcactttgcggataaatgcccgaagccgaggcgccagcaaggccaagcgcctccccgctccaacaatggtggtaaggatgttattcggggtcgtgtgaaccatgtgacggccgaggacgtgctgacaactccagacgtcatcgttgggcacgtgatatctgctaaagaagttgctgtggaccccgaaacagtgaccgccgtcactgattggaagcaacccaagaccgtcactcaaattcgcagtttcttaggtttggcaggatactaccggagcgtgtcaaggcagagcaccaacgaccggccggacttctccaacctctccaagtaccagaatggaaatgggatgaaattgggatggatttcatcaccggacttccaaaaacccaaggtagctcgatttattcctgtgaagaccacctatggagggaacaaactagccgagctctacttcgctaggatcctccggtccgccgccgtcgtcaccccggaccgcctcccacctcggggccggctccttcggcttcgccgcatcctcgccgacctcgtccacctctccgtttcggtcgccgaccgccggagcgccgccgcccccgtctacccgagccgcgccgccaccttcctccgctccggtcgccgttcccgtcgtcgccgtcgacccggggtgagccgtggaccgccgtttcacttcccccttccctcccctctctcgggcgccgctccgccgcgccggtggtcgccggcggcgaccatcagggcgcgggtgcgccgcctcccgtcggctgtgccggcgtggccgccttcgggcgcgccccgcggctgccatgtggggcccggccgtcagccgcccgcgccctcgggtgcggctgacgcgtgggacccacggcgccggccggcgcaagccgcgtgcacccggtccaccgtggaccgtgaggctgccgcgtgggccccactcccgtggacccggtccgcgcgcccctccctcggctga

SEQ ID NO: 5193 - DNA, 4842 bp, Oryza sativa
  Clone ID: PAT_MRT4530_12004C.1
atgacatggcacagggccggtgtcctgctgctaggggctcagtcctgcctacttgtcccgggggttccggccgtaggtggggttgggtcggtactcttctctatggctaggatgggttggaaactatgtcacgtcttccgtccgtataccgtggtgatggccggtagcatcaaccgtcgtggtctggacctgactggcttcgttttgaagctgcggagcatgtgcgctgtcctggggtatccacatggagtggactaccagggcaagacttcgttggcagtcaccgcgggtggagattccttctccgccgcttgccagaacgccgcactcctcgccatcggcactctacaccagcgctacccggacgagttgcagcacttgccctaccgctaccaccctcgtcgcggaggagcccgcgactacgccaccttccgggatgctagctcggaggatgacgctaccatcatgcacctggcgcgcatgctgaagaaggacctagacgcagtggaggcgcagcggtgtcaggtcaagatctcccagggagagatggtgacgactaggagaagtgctaataccggtgatggcaaccaacccgaaggtagcaaccacaacaaccatggcagcccacctccacctcctcctccacctccaccactaccaccagacaccaacgccatcctcacccaaatcctcgcccagcaggccaacatgatggctgctttcctccaccacatccaaaatccgccacagcataatgctccaccactacccccacaacactctaaactcgccgagttcctccgcatctgtccgcctaccttctctagctccaataaccccgtggatgcgttagattggttgcatgccgtggggaaaaagttagacaccgtgaagtgcaacgatgaggagaaagtcatcttcgccgcccaccaactgcaggggcccacatctctatggtgggaccatttccaggctacgcagtcagaaggacagcatattacttgggctcgcttcaccgccgctttccggagaacccatgtgcccgccggagtcatggcccttaagaaaagggaattccaagagttgaagcaaggcaaccgctctgtgatggagtatttgcatgagtttaacaacctggcccgatacgccccggaggatgttcgtgaagatgagaagaagcaagagaagttcttggcaggaatggaccctgagctgtccgtgcgtctggtctccagggactatccggatttccagcgtttggtggacaagagcatccgtttggaagccaagcacaaggaactggagtcgcacaagcgtcgcttggcaaatttccgcaatcaacagggggctaaccaaaggccgtgcagcctggacaaggccacagagacattcaaggtcagcagcgtctgtgcttcaactgctttcgagcctgggcactttgcggataaatgcccaaagccgaggcgccagcaaggccaagcacctccccgccccaacaacggtggtaaggatgtcattcggggtagggtgaatcacgtgactgccgagaatatgctgacaactccagacgtcatcgttggtacgttcctcattcattccatccctgctaccattttgttcgactctggagcttcccactcgtttatatatgtgccattcgtggggagaaatcggttgggggtagaaaggcttaggaaccctctgctcatcaccacccctggaggggttatgacagcaaagtattatagccctgccgttcctatagaaatccagggaattccttttccctcggatctgattcttctagacaccaagaacttggatgtgatccttgggataaattggttggctcaattccaaggagtagtggattgtgcaagacgcactgtcactctgtaccgagggccggaacaaccggttgttttctttgcacccccaacctctgtcggtagttcagaacttcatcagataggactgtcggaaatccccatcgttagagagttcggagacgtgtttccggaagaactacccggtatgccgccgaagcgagagattgagttccggatagatcttgctccaggaaccactcctctgtacaagcgaccctaccgtatggcagcaaatgaactggccgaagtcaagaaacagttggaagagttgaaagaaaaggggtatatacggccgagtacttccccctggggtgctcctgtgatttttgtggaaaagaaagacaagacaaagaggatgtgcgttgactacagagctctcaatgaagttactatcaaaaacaagtaccctcttccccggatcgatgatctgttcgatcagcttaaaggtgccactgtattctccaagattgatcttcgttccggatatcaccaattgcgtattcgtgaagaagatatcccgaagaccgcattcaccacgcgatacggactgtatgaattcacggtgatgtcgttcggtctaaccaatgctcctgccttcttcatgaacttaatgaacaaagtgttcatggaatacttggataagtttgttgtggttttcattgacgacattctggtgtactcacaattagaggaagaccatcagcagcatctccgtctggtgttgggaaagttgcgggaacatcaattgtatgccaagcttagcaagtgtgagttctggttgtccaaagtcaaattcttagggcacgtgatatctgctaaaggagttgctgtggaccccgaaacagtgaccgccgtcactgattggaagcaacccaagacagtcacccaaattcgcagcgttttgggtttggcaggatactaccggaggttcatcgagaacttctccaaaatcgctcgacccatggcacagttgttgaagaaagaagagaaatttgtgtggagcccgcaatgcgagaaggcgttccaaactctcaaggaaaagctggtttcctcgccggttttaatcttaccggatactcgcaaggacttcatggtgtactgtgacgcttcgcgccaaggattggggtgcgtgctcatgcaggaaggtcatgtggtagcctatgcctcacgccagctacggccccatgaaggcaactaccctacccatgatttggagttagccgctgtggttcatgctctaaagatctggcggcactatctcattgggaatcgctgtgaaatatatactgatcataagagtttgaaatacatcttcactcagtcggatctgaatcttcggcaaaggagatggttagaactcatcaaggattatgatgtgggaattcactatcatcctggtaaggccaacgtggtcgccaacgctctaagtcgaaaaagccactgcaacactcttggcgtccgtggcattccaccagaacttaatcaacagatggaagccctgaacctaagtatagttagtcgtggattcttagctacgctggaagccaagcctaccttgctcgatcaaatccgcgaggctcagaagaatgatccggatgtgcgtggactcctcaagaatatgaaacagggtaaagccgctggtttcacagaggatgaacacggaaccctatggaatggaaatcgggtatgcgttccagacgacagagaacttaaacagttgatacttcaggaagctcacgaaagtccttattccatccaccctggcagtacgaagatgtacttagacttgaaagagaaatactggtgggttagtatgaagcgggaaattgcagagttcgtggccctttgtgatgtgtgccagcgtgtcaaggcagagtaccaacgaccggccggacttctccaacctctccaagtaccagaatggaaatggggtgaaattgggatggatttcatcaccggacttccaaaaacccaaggcggatatgattctatatgggtagttgtggaccgacttaccaaggtagctcggtttattcctgtgaagaccacctatggagggaacaaactagccgagctctacttcgctaggatcgtgagtctccatggtgttcctaagaaaattgtatctgataggggaagccaattcacctctcacttttggaagaagctccaagaagagttgggtacccgattaaatttcagcaccgcgtatcacccgcagacagatggacagaccgagcgtctaaatcagatcctagaagatatgctccgtgcctgcgtcctagatttcgggaagaccggggataagagtctcccctatgccgagttctcctacaataacagctaccaagccagcatacaaatggcaccctatgaagcgttgtatggacgcaaatgccggacaccgctattgtgggaccaagttggggaaagccaagtgttcggaactgatatcctgagagaagctaaagctaaagtcagaaccattcgggataatctaaaggtggcacagtcctggcagaagagttatgcagataaccgacgccgtaatctggaatttgcagtggacgattttgtgtaccttcgggtcacgccattgcggggtgtacacaggttccagacgaaagggaagcttgcccctcggttcgtgggtcctttccgtatcattgctcggcgcggggaagtcgcttaccagttggagctgcccgcctccttgggcaacgtgcatgatgtgttccatgtgtcgcaactcaagaaatgtcttcgagtgccatccgagcaggccgattcagagcaaattgaagttcgcgaagacttgacctacgtggaaaggccagtgaaaatcctggacaccatggagcgcaggatcaggaaccgggtaatccgtttttgcaaggtccaatggagcaactacgctgaggaagaagctactacgctgaggaagacgagatga

SEQ ID NO: 5194 - DNA, 411 bp, Oryza sativa
  Clone ID: PAT_MRT4530_12005C.1
atgggtatgatgaatgggagtctgttcacccccaaccacagcgaaaccggcctcctcgcgcgcgcagcgaaacgttcccacgcctctttgcgccctcgtctgccacctagattaaggcaagcacagcagtccggcaactggttggctggggcgatggcgacctgcggtgggggcgacgccgcctgtgggcagggagaggaggatcaggcgtgcgtacagcggagggggaagaggccgatcaactatcaagattgcgactacagcagaatcaacatcattgtggtgctcaatggcaacagccttcaattacacaacccatggcacgcaagcccccacaagaagcaacacgaaatcttcctcatgagcttcatccgagatgggaaagagacccgagcgtacctgagggaatag

SEQ ID NO: 5195 - DNA, 219 bp, Oryza sativa
  Clone ID: PAT_MRT4530_12006C.1
atgaagcgacgaacagttgtaaacgtggacggggctcctggcttgatagctgatgacacggctggaggagtcgttgtccctgcttggcccacgaccgtctacaagcagcagcaaccaggcagccggagcagcgccttgctaccgatggataaacgtctcttcgtcggaatgtgcacgtttgccggtgtaatgatcctggctcattcgtcgcgggagacg

SEQ ID NO: 5196 - DNA, 5271 bp, Oryza sativa
  Clone ID: PAT_MRT4530_12007C.1
atggacatctccagggcaaatgaaggctacacgagctgcggcccggtagtcgagatgtcatggcacagggccggtgtcctgctgctaggggctcagtcctgcctgcctatcccggaggttccggccgtaggtgggattgggtcggtactcttgtctatggctaggatgggttggaaactatgtcacgtcttccgtctgtataccgtggtgatggccggcagcgtcacccgtcgtggtttggacatgactggcttcgtcttggagctgcggggcatgtgcgtggtcctggggtatccacatggagtggactaccaggccaggccgcttccggagcaggagggtgacgatgcagagccccacgctggttgggaggtcactgcagtgatcctctctggctctcccgagcggacttcgctggcagtcaccgcgggtggagattccttccccgccgcttgccagagcgccgctctcctcgccatcggcactcttcaccagcgctacccggacgagttgcagcactcgccctaccgctaccaccctcgccgcggaggagcccgcgactacgccaccttccgggatgctagctcagaggatgacgctaccatcgtgcacctggcgcgcatggtggaggcgtacgacgcggctcgtatcgacttccatcagatggtgcgccgtgggatggtcgagaacaacatgaagatcctggagctgcgtcaagagaacctgcagctcaagaaggacctagacgcggtggaggcgcagctgcatcagctcaagatcgcccagggagaggtctgccgccccaagcgccgccgtgtctgccgcagccagaagatcaccgcccgcaagagcacctccaggcccgagcttgttcgtcagtccctggcgtggacttgcttcgtcgagatccctcgtgccgagcccgcgcccgtggttccccaggagggggaagcctccggcgttggtagcacggaggatgcgctgttgctcaccttccgtcctggcccgtcgcagcggagaagtgctaacaccggtgatggcaaccaacctgaaggcagcaaccaccaccaccagggcagcccacctccacctcctcctccgcctccaccaccaccaccagacaccaacgccattctcacccaaatcctcgcccagcaggccaacatgatgactgctttcctccaccacctccaaaatccgccacaacataatgctccaccaccacccccacaacactctaaactcgccgagttcctccgcatccgcccacctaccttctctagctccaacaaccccgtggacgcgttggattggttgcatgccgtggggaaaaagctagacactgtgcagtgcagcgatgaggagaaagtcatcttcgccgcccaccagctgcagggacccgcatctctatggtgggaccatttccaggctacgcagccagaagggcaacctattacttgggcccgtttcaccgccgctttccggagaacccatgtgcccgccggagtcgtggcccttaagaaaagagaattccgagagttgaagcaaggcaaccgctccgtgatggagtatttgcatgagttcaacaacttggcccgttacgccccggaggatgtgcgggaagatgaggagaagcaagagaagttcttggcaggaatggaccctgagctgtccgtccgtctagtctccggggactatccggatttccaacggggatcctcctcgcagcagcaacaacagcagcagcaacctcgctccgcgcctcgacctcaattcgtggtgcgcgtcccacagccgcagcagcagcagaatcaacaagggactcgtgcgccccgtcctcctacgccaactgtgcagcctggtcaaggccgtagggacgctcaaggtccgcagcgtctgtgcttcaactgcttcgagcccgggcactttgcggataaatgcccaaagccgaggcgtcagcaaggccaagcgcctccccgctccaaccacggtgggaaggatgtcattcggggtcgggtgaaccacgtgacggccgaggacgtgctgacaactccagacgtcatcgttggtacgttcctcattcattccatccctgctaccattctgttcgactctggagcatcccactcgtttatatctgtgccattcgtggggagaaatcagttgggggtagaaaggcttaggaaccctctgctcatcaccacccctggaggggttatgacagcaaagtattatagtcctgccgtccctatagaaattcaggggattccttttccctcggatctgattctgctagacaccaagaacttggatgtgatccttgggatgaattggttggctcaattccaaggagtagtggattgtgcgagacgcactgtcactctgtaccgagggccggaacaaccggttgttttctttgcacccccaacctctgtcagtagttcagaacttcatcagataggactgtcagaaatccccatcgtcagagagttcggagacgtgtttccggaagaactacccggtatgccgcccaaacgagagattgagttccggatagatcttgctccaggaaccactcctctgtacaagcgaccctaccgtatggcagcaaatgaactggccgaagtcaagaaacagttggaagagttgaaagaaaaggggtatatacgtccgagtacttccccctggggtgctcctgtgatttttgtggagaagaaagacaagacgaagaggatgtgcgttgactacagagctctcaatgaagtcaccatcaaaaacaagtaccctcttccccggatcgatgatctgttcgatcagcttaaaggtgccactgtattctccatgattgatcttcgttccggatatcaccaattacgtattcgtgaagaagatattccgaagaccgcattcaccacgcgatacggactgtatgaattcacggtgatgtcatttggtttaaccaatgcacctgccttcttcatgaacttaatgaacaaagtgttcatggaatacttggataagtttgttgtggttttcattgatgacattctgatatactcacaatccgaggaagaccatcagcaccatctccgtctggtgttgggaaagttgcgggaacatcaattgtatgccaaacttagcaagtgtgagttctggttgtccgaagtcaaattcttagggcacgtgatatctgctaaaggagttgctgtggaccccgaaacagtgaccgccgtcactgattggaagcaacccaagacagtcactcaagtccgcagtttcttaggtttggcaggatactaccggaggttcatcgagaacttctccaaaatcgctcgacccatgacacagttgttgaagaaagaagagaaatttgtgtggagcccgcaatgcgagaaggcgttcaaaactctcaaagaaaagctggtttcctcgccagtgttaatcttgccggatactcgcaaggatttcatggtgtattgtgatgcttcgcgccaaggattggggtgcgtgctcatgcaggatggtcatgtggtggcctatgcctcacgccagctacggcctcatgaaggcaactaccctacccatgatttggagttagctgcggtggttcatgctctaaaaatctggcggcactatctcattgggaatcgttgtgaaatatatactgatcataagagtttgaaatacatcttcactcagtccgacctgaatcttcggcaaaggagatggttagaactcatcaaggattatgatgtgggaattcactatcatcctggtaaggccaacgtggtcgccgacgctctaagtcgaaaaagccattgcaacactcttaacgtccgtggcattccactcgaacttagtcaacagatggaagccctgaacctaagcatagttggtcgcggattcttggctgcgttggaagccaagcctaccttgctcgatcaaatccgcgaggctcagaagaacgatccggacatgcatggactcctcaagaatatgaaacagggtaaagccgctggtttcacagaggatgaacacggaaccctatggaacggaaatcgagtatgcgttccagataacagagaacttaaacagctgatactacaggaagctcacgaaagtccttattccatccaccctggcagtacgaagatgtacttagacttgaaggagaaatactggtgggttagtatgaagcgggaaattgcagagttcgtggccctttgtgatgtgtgccagcgtgtcaaggcagagcaccaacgaccggccggacttctccaacctctccaagtacctgaatggaaatgggatgaaattgggatggatttcatcaccggacttccaaagacccaaggtggatatgattctatatgggtagttgtggatcgattaaccaaggtagctcgatttattcctgtgaagaccacctatggagggaacaaactagccgagctctacttcgctaggatcgtgagtctccatggcgttcccaagaaaatcgtatctgataggggaagccaattcacctctcacttttggaagaagcttcaagaagagctgggtacccggttaaacttcagctccgcataccacccgcagacagatgggcagaccgagcgtctaaatcagatcctagaagatatgcttcgcgcgtgtgtcctggatttcgggaagacctgggataagagtctcccctatgccgagttctcctacaataacagctatcaagccagcatacaaatggcaccttataagcgttgtatgggcgcaaatccgaacacgctcttgtggatcaagttggggaaagccaagtgttcggtggacgattttgtataccttcgggtcacgccattgcggggtgtacacaggtttcggacaaaagggaagctcgcacctcggtatgtgggtcctttccgtatcgttgcccgacgcagagaagtcgcttaccaattggagctgcccgcctccttgggcaacgtgcacgatgtgctccatgtgtcgcaactcaagaaatgccttcgagtgccatccgagcaagccgactcagagcaaattgaagttcgcgaagacttgacctacgtggagaggccagtgaaaatcctggacaccatggagcgcaggaccaggaaccgggtaatccatttttgcaaggtccagtggagcaaccacgtcgaagaagaagctacctgggagcgtgaagacgagctgaaggcagcccatcccgatctcttcaccagttcttctgaatctcggagtcgagattccttttaa

SEQ ID NO: 5197 - DNA, 624 bp, Oryza sativa
  Clone ID: PAT_MRT4530_12008C.1
cccacgcgtccggcgagaggtggtgacggcggtggaagcgcgatgtatcggcaacagcggaagtgcgacgccacgcctgctgctggcgtgcagtgccgccgtcgttttcccagctcgcggctctcctctcctgacgatgtccttcccttcttccctctcttccattgatggctccatccatccccaatctcacccctaaccctaggttggcctaaacactaaagattgttgacgatggtgctgcttgcgcagcaggtggtcaggttttgccgacggtgcgccgtggatttgggcctcccatcctcaaaccttcaaggtcatttctatctcccagccaaggacactgttcaaatgtgctcctccattcccctccttccccaggtagacatgtatcatgtgtttttgtatggtctggagaaggcatgctttagccatgatgatgttcaaggtgagcaggggcgccagtagatgtctagctagcactgtggttcttcagtattttgtaacccatgttgtcattccttttatataataagatttcattgtaattttagattaaattcgatcaatgttgcctatataaaattatgtatatgtattctctaagttgttcgtttacagtat

SEQ ID NO: 5198 - DNA, 168 bp, Oryza sativa
  Clone ID: PAT_MRT4530_12009C.1
atggtgggtgtgggtgtgggtcgtggcgtggtgtgcgacggcgaacgtcctggcagggccgtgtggcgtgtggcgagagagagggaccgaatgcgtgagccagggctctacgtggaggcgagggggctctccggtcttgccggccagccggccaggacggcatcgtga

SEQ ID NO: 5199 - DNA, 281 bp, Oryza sativa
  Clone ID: PAT_MRT4530_1200C.1
gtggtggacaagaatgaccagtcagacgctggtcgcgtcagcaacgggcagccacgatcccacgttgcgcctgtctccgccgggagtggagatccaccaaaacacaggagtagggtattacgcttctcagcggcccgaacctgtatacatcgccggtgtctcgcgttctcttgctagcagacaatctttccacaaacagagagagcttgagatctcaccctaagcccccggccgaaccggcaaaggggggcccgcgcggtctcccggtgaggagccacgag

SEQ ID NO: 5200 - DNA, 1773 bp, Oryza sativa
  Clone ID: PAT_MRT4530_12010C.1
atgtcatggcacagggccggtgtcctgctgctaggggctcagtcctgcctacctgtcccgggggttccggccatggccggcagcgtcagtcgtcgtggtctggacatgactggtttcgtcttggagctgcggggtatgtgcgttgtcctggggtatccgcatggactggactaccagggcaggccgcttccggagcaggagggtgacgatgcagagccccacgcttcttgggaggttactgcagtgatcctcactggctcacccgagcggacttcgttggcagtcaccgcgggtggagattctttctccgccgcttgccagagcgccgctctcctcgccatcggcactcttcaccagcgctacccggacgagctgcagcactcgccctaccgctaccaccctcgtcgcggaggagcccgcgactacgccaccttccgggatgctagctcggaggatgacgctaccatcatgcacctggcgcgcatggtggaggcgtacgacgcggctcgtatcgacttccatcagatggtgcgccgtgggatggtcgagaacaacctgaagatcctagagctgcgtcaggagaatctgcagctgaagaaggacctagacgcagtggaggcacagctgcatcagctcaagatcgcccagggagagatggtgacgaccaggagaaatgctgccaccagtgatggcaaccaacttgaaggcagcaaccacaacaaccatggcagcccacctccacctcctccaccgcctccaccaccaccaccagacaccaacgccattctcacccaaatcctcacccagcaggccaacatgatggctgctttcctccaccacatccaaaatccgccacaacataatgctccaccaccacccccacaacactctaaactcgccgagttcctacgcatccgtccacctaccttctctagctccaacaaccccgtggatgtgttggattggttgcatgccgtggggaaaaagctagacactgtgcagtgcagcgatgaggagaaagtcgtcttcgccgcccaccaactgcagggacccgcatctctatggtgggatcatttccaggctacgcagccagaggggcagcctattacttgggcccgcttcaccgccgccttccggaggacccatgtgcccgccggagtcatggcccttaagaaaagggagttccgagagttgaagcaaggcaaccgctccgtgatggagtatttgcatgagtttaacaacttggcccggtacgccccggaggatgtgcgggaagatgaggagaagcaagagaagttcttggcaggaatggacccggagctgtctgtccgtctagtctccggtgactatccggatttccaacgtctggtggacaaaagcatccgcttggaagccaagcacaaggaactggagtcgcacaagcgtcgcttggcgaatttccgcaaccaacagggtgctaaccaaaggatccgctacaccaatccctatccagggggatcttcctcgcagcagcagcaacctcgctccgcgcctcgacctcaattcgtggtgcgcgtcccacagccgcagcaacagcagagccagcaagggacccatgcgccccgtcctcctacgccagccgcgcagtctggtcaaggccgcagggacgttcaaggtccgcagcgtctgtgcttcaactgcttcgagcccgggcactttgcggataaatgcccgaagtcgaggcgccagcaaggccaagcgcctccagacgtcatcgttgttgcgcatccgtga

SEQ ID NO: 5201 - DNA, 5262 bp, Oryza sativa
  Clone ID: PAT_MRT4530_12011C.1
atgtcatggcacagggccggtgtcctgctgctaggggctcagtcctgcctgcctgtcccgggggttctggccgtaggtgggattgggtcggtactcttgtctatggctaggatgggttggaaactatgtcacgtcttccgtctgtataccgtggtgatggccggcagcgtcacccgtcgtggtttggacatgactggtttcgtcttggagctgcggggcatgtgcgttgtcctggggtatccacatggagtggactaccagggcaggccgcttccggagcaggagggtgacgatgcagagccccacgctgcttgggaggtcactgcagtgatcctcgttggctctcccgagcggacttcgctggcagtcaccgcgggtggagattctttccccgccgcttgccagagcgccgctctcctcgccatcggcactcttcaccagcgctacccggacgagttgcagcactcgccctaccgctaccaccctcgccgcggtggagcccgcgactacgccaccttccgggatgctagctcggaggatgatgctaccatcgtgcacctggcgcgcatggtggaggcatacgacgcggctcgtatcgacttccatcagatggtgcgccgtgggatggtcgagaacaacatgaagatcctggagctgcgtcaagagaacctgcagctcaagaaggacctagacgcggtggaggcgcagctgcatcagctcaagatcgcccagggagagatggtgacgaccaggagaaatgctgccaccggtgatggcaaccaacctgaaggcagcaaccacaacaaccaccaggggaacccacctccacctcctcctccgcctccaccaccaccaccagacaccaacgccattctcacccaaatcctcgcccagcaggccaacatgatgactgctttcctccaccacctccaaaatccgccacaacataatgctccaccaccacccccacaacactctaaactcgccgagttcctccgcatccgcccacctaccttctctagctccaacaaccccgtggatgcgttggattggttgcatgctgtggggaaaaagctagacactgtgcagtgcagcgatgaggagaaagtcatcttcgccgcccaccagctgcaggggcccgcatctctatggtgggaccatttccaggctacgcagccagaggggcaacctattacttgggcccgtttcaccgccgctttccagagaacccatgtgcccgccggagtcgtggcccttaagaaaagagaattccgagagttgaagcaaggcaactgctccgtgatggagtatttgcatgagttcaacaacctggcccgttacgccccggaggatgtgcgggaagatgaggagaagcaagagaagttcttggcaggaatggaccctgagctgtccgtccgtctagtctccggggactatccggatttccaacgtctggtggacaagagcatccgcttggaagccaagcacaaggaactggagtcgcacaagcgccgcttggcgaatttccgcaatcaacagggtgctaaccaaagggtccgctacaccaatccctatccagggggatcctcctcgcagcagcaacaacagcagcagcaacctcgctccgcgcctcgacctcaattcgtggtgcgcgtcccacagccgcagcagcagcagaatcaacaagggactcgtgcgccccgtcctcctacgccagccgtgcagcctggtcaaggccgcagggacgctcaaggtcagcagcgtctgtgcttcaactgcttcgagcccgggcactttgcggataaatgcccaaagccgaggcgtcagcaaggccaagcgcctccccgctccaacaacggtgggaaggatgtcattcggggtcgtgtgaaccatgtgacggccgaggacgtgctgacaactccagacgtcatcgtcggtacgttcctcattcattccatccctgctaccattttgttcaactctggagcttcccactcgtttatatctgtgccattcgtggggagaaatcagttgggggtagaaaggcttaggaaccctctgctcatcaccacccctggaggggttatgacagcaaagtattatagccctgccgtccctatagaaattcaggggattccttttccctcggatctgattctgctagacaccaagaacttgaatgtgatccttgggatgaattggttggctcaattccaaggagtagtggattgcgcgagacgcactgtcactctgtaccgagggccggaacaaccggttgttttctttgcacccccaacctctgtcagtagttcagaactccatcagataggactgtcagaaatccccatcgtcagagagttcggagacgtgtttccggaagaactacccggtatgccgcccaagcgagagattgagttctggatagatcttgctccaggaaccactcctctgtacaagcgaccctaccgtatggcagcaaatgaactggccgaagtcaagaaacagttggaagagttgaaagaaaaggggtatatacgtccgagtacttccccctggggtgctcctgtgatttttgtggagaagaaagacaagacgaagaggatgtgcgttgactacagagctctcaatgaagtcaccatcaagaacaagtaccctcttccccggatcgatgatctgttcgatcagcttaaaggtgccactgtattctccaagattgatcttcgttccggatatcaccagttgcgcattagggaagaagatattccgaagaccgcattcaccacgcgatacggactgtatgaattcacggtgatgtcattcggtttaaccaatgcacctgcctttttcatgaacttaatgaacaaagtgttcatggaatacttggataagtttgttgtggttttcattgatgacattctgatatactcacaatccgaggaagaccatcagcaccatctccgtctggtattgggaaagttgcgggaacatcaattgtatgccaaacttagcaagtgtgagttctggttgtccgaagtcaaattcttagggcacgtgatatctgctaaaggagttgctgtggaccccgaaacagtgaccgccgtcactgattggaagcaacccaagacagtcactcaagtccgcagtttcttaggtttggcaggatactaccggaggttcatcgagaacttctccaaaatcgctcgacccatgacacagttgttgaagaaagaagagaaatttgtgtggagcccgcaatgcgagaaggcgttcaaaactctcaaagaaaagctggttgcctcgccagtgttaatcttgccggatactcgcaaggatttcatggtgtattgtgacgcttcgcgccaaggattggggtgcgtgctcatgcaggatggtcatgtggtggcctatgcctcacgccagctacggcctcatgaaggcaactaccctacccatgatttggagttagctgcggtggttcatgctctaaaaatctggcggcactatctcattgggaatcgctgtgaaatatatactgatcataagagtttgaaatacatcttcacccagtcggatctgaaccttcggcaaaggagatggttagaactcatcaaggatcatgatgtgggaattcactatcatcctggtaaggccaacgtggtcgccgacgctctaagtcgaaagagccattgcaacactcttaacgtccgtggcatcccacccgaacttagtcaacagatggcagccctgaacctaagcatagttagtcgtggattcttggctgcgttggaagccaagcctaccttgctcgatcaaatccgcgaggctcagaagaatgatccggacatgcatggactcctcaagaatatgaaacagggtaaagccgctggtttcacagaggatgaacacggaaccctatggaacggaaatcgagtatgcgtcccagataacagagaacttaaacagctgatacttcaggaagcccacgaaagtccttattccatccaccctggcagtacgaagatgtacttagacttgaaggagaaatactggtgggttagtatgaagcgggaaattgcagagttcgtggcactttgtgatgtgtgccagcgtgtcaaggcagagcaccaacgaccggccggactcctccaacctctccaagtacctgaatggaaatgggatgaaattgggatggatttcatcaccggacttccaaagacccaaggtggatatgattctatatgggtagttgtggatcgattaaccaaggtagctcgatttattcctgtgaagaccacctatggagggaacaaactagccgagctctacttcgctaggatcgtgagtctccatggcgttcccaagaaaatcgtatctgataggggaagccaattcacctctcacttttggaagaagctccaagaagagctgggtacccgattaaacttcagcaccgcatatcacccgcagacagatgggcagaccgagcgtctaaatcagatcctagaagatatgcttcgcgcatgtgtcctagatatcgggaagacctgggataagagtctcccctatgccgagttctcctacaataacagctaccaagccagtatacaaatggcaccttatgaagcgttgtatgggtgcaaatgccggacaccgctcttgtgggaccaagttggggaaagccaagtgttcgggactgatatactgagagaagctgaagcgaaggtcagaaccattcgggataatctaaaggtggcacagtcccggcagaaaagttatgcaaataaccgtcgccgtaacctggaattcgcagtggatgattttgtgtaccttcgggtcacgccattgcgaggtgtacacaggtttcagacgaaagggaagctcgcacctcggtatgtgagtcctttccgtatcgttgcccgacgcggagaagtcgcttaccaattggagctgcccgcctccttgggcaacgtgcatgatgtgttccatgtgtcgcaactcaagaaatgccttcgagtgccatccgagcaggccgactcaaagcaaattgaagttcgcgaagacttgacctacgtggagaggccagtgaaaatcctggacaccatggagcgcaggaccaggaaccgggtaatccgtttttgcaaggtccagtggagcaaccacgccgaagaggaagctacctgggagcgtgaagacgagctgaaggcagcccatcctgatctcttcgccagttcttccgaatctcggggtcgagattccgtttaa

SEQ ID NO: 5202 - DNA, 249 bp, Oryza sativa
  Clone ID: PAT_MRT4530_12012C.1
cacaaaaacaacccatccggcgtcggatcgcccatgttagaacgatggccgagtaggggctggagcagaccactcagcttcctcagggacgcagcccctcgacgggatgagctcgtccgccgcgtgcgagactccggcggcctgataaacatgcgccgcactcgtcaagagcgcgccccagaccatgtggtgtggacctgaccgtcccaagtacctagagccggtctctgagcacacgccatcagacct

SEQ ID NO: 5203 - DNA, 1988 bp, Oryza sativa
  Clone ID: PAT_MRT4530_12013C.1
cttcccactcgtttatatccgtgccattcgtggggagaaatcagttgggggtagaaaggcttagaaaccctctgctcatcaccacccctggaggggttatgacagcaaagtattatagccctgccgtccctatagaaatccaggggattccttttccctcggatctgattctgctagataccaagaacttggatgtgatccttgggatgaattggttggctcaattccaaggagtagtggattgcgcgagacgcactgtcactctgtaccgagggccggaacaaccggttgttttctttgcacccccaacctctgtcagaagttcagaacttcatcagataggactgtcagaaatccccatagtcagagagttcggagacgtgtttccggaagaactacctggtatgccgcccaagcgagagattgagttccggatagatcttgctccaggaaccacccctctgtacaagcgaccctaccgtatggcagcaaatgaactggccgaagtcaagaaacagttggaagagttgaaagaaaaggggtatatacgtccgagtacttccccttggggtgctcctgtgatttttgtggagaagaaagacaaaacgaagaggatgtgcgttgactacagagctctcaatgaagtcaccatcaagaacaagtaccctcttccccggatcgatgatctgttcgatcagcttaaaggtgccactgtattctccaagattgatcttcgttccggatatcaccaattacgtatccgtgaagaagatattccgaagaccgcattcaccacgcgatatgggctgtatgaattcacggtgatgtcgttcggtctgaccaatgctcctgccttcttcatgaacctaatgaacaaagtgttcatggaatacttggataagtttgttgtggttttcattgatgacattctgatatactcacaatcagaagaagaccatcagcaccatctccgtctggtgttgggaaagttgcgggaacatcaattgtatgccaagcttagcaagtgtgatttctggttgtccgaagtcaaattcttggggcacgtgatatctgctaaaggagttgctgtggaccccgaaacagtgaccgccgtcactgaatggaagcaacccaagacagtcactcaaattcgcagtttcttaggtttggcgggatactaccggagatttatcgagaacttctccaaaatcgctcgacccatgacacagttgttgaagaaagaggagaaattcgtgtggagcccgcaatgcgagaaggcgttccaaactctcaaggaaaagctggtttcctcgccagtgttaatcttgccggatactcgcaaggatttcatggtgtattgtgatgcttcgcgccaaggattggggtgcgtgctcatgcaggacggtcatgtggtagcctatgcctcacgccaactacgacctcatgaaggcaactaccctacacatgacttggagttagccgcagtggttcatgctctaaaaatctggcggcactatctcattgggaatcgctgtgaaatatatactgatcataagagtttgaaatacatcttcacccagtcagatctgaatcttcggcaaaggagatggttagaactcatcaaggattatgatgtgggaattcactatcatcccggtaaggccaacgtggttgccgacgctctaagtcggaagagctattgcaatactcttaacgtccgtggcattccacccgaacttaatcaacagatggaagccctgaacctaagcatagttggtcggggattcttggctgcgttagaagccaagcctaccttgctcgaccaaatccgtgaggctcagaagaatgatccggacatgcatggactcctcaagaatatgaaacagggtaaagccgctggtttcacagaggatgaacacggaactctatggaacggaaatacggtttgcgtttcccgatacagagaacttaaacagctgatactttaa

SEQ ID NO: 5204 - DNA, 5376 bp, Oryza sativa
  Clone ID: PAT_MRT4530_12014C.1
atggatgaagtcgggggtcgatggacattctccagggcaaatgaaggctacacgagctgcggcccgatggccggtagcgtcacccgtcgtggtttggacatgactggcttcgtcttggagctgcggggcatgtgcgtggtcttagggtacccacatggagtggactaccaggccaggccgcttccggatcaggagggagacgacgcggagccccacgctggttgggaggtcactgctgtgatcctctctggctctcccgagcggacttcgctggcagtcaccgcgggtggagattccttccccgccgcttgccagaacgccgctctcctcgccatcggcactcttcaccagcgctacccggacgagttgcagcactcgccctaccgctaccaccctcgccgcggaggagcctgcgactacgccaccttccgggatgctagctcggaggatgacgctaccatcgtgcacctagcgcgcatggtggaggcgtacgacgcggctcgtatcgacttccatcagatggtgcgccgcgggatggtcgagaacaacatgaagatcctggagctgcgtcaagagaacctgcagctcaagaaggacctcgacgcggtggaggcgcagctgcatcagctcaagatcgcccagggagagatctgccgccccaagcgtcgccgcgtctgccgcagccagaagatcaccgcccgcaagagcacctccaggcccgagcttgttcgtcagtccctggcgtggacttgcttcgtcgagacccctcgtgccgagcccgcgcccgtggttccccaggagggggaagcctccggtgttggtagcacggaggtcgtgtggggcatggttatgccgatggtgacgaccaggagaaatgctgttaccggtgatggcaaccaacccgaaggcagcaaccacaaccaccaaggcaatccacctccacctcctcctccgcctccaccaccaccaccagacaccaacgccattctcacccaaatcctcgcccagcaagccaacatgatgaccgctttcctccaccacctccaaaatccgccacaacagaatgctccaccaccacctccccaacactctaaactcgccgagttcctccgcatccgcccacctaccttctctagttccaacaatcccgtggatgcgttggattggttgcatgccgtggggaaaaagctagacacggtgcagtgcagcgatgaggagaaagtcgtcttcgccgcccatcagctgcaggggcccgcatctctctggtgggaccatttccaggctacgcaaccagaggggcaacctattacttgggctcgcttcaccgccgctttccggagaacccatgtgcccgctggagtcgtggcacttaagaaaagagaattccgagagttgaagcaaggcaaccgctccgtgatggagtatttgcatgagttcaataatctggcccgttacgctccggaggatgtgcgggaagatgaggagaagcaagagaagttcttggcaggaatggaccccgagctgtccgtccgtctagtctctggggactatccggattttcaacgtctggtggacaagagcatccgcttggaagccaagcacaaggaactggagtcacacaagcgccgcttggcgaatttccgcaatcaacagggtgctaaccagagggtccgctacaccaatccctatccagggggatcctcctcgcagcagcaacaacagcagcagcaacctcgctccgcgcctcgacctcaattcgtggtgcgcatcccacagccgcagcagcagcagaatcagcaagggactcgtgcgccccgtcctcctacgccaactgtgcagtctggtcaaggccgcagggacgctcaaggtcagcagcgtctgtgcttcaactgcttcgagcccgggcactttgcggataaatgcccgaagccaaggcgtcagcaaggccaagcgcctccccgctccaacaacggcgggaaggatgtcattcggggtcgtgtgaatcacgtgacggccgaggacgtgctgacaactccagacgtcatcgttggtacgttcctcgttcattccatccctgctacaattttgttcgactctggagcttcccactcgtttatatctgtgccattcgtggggagaaatcagttgggggtagaaaggcttaggaaccctctgctcatcaccacccctggaggggttatgacagcaaagtattatagtcctgccgtccctatagaaattcaggggattcctttttcctcggatctgattctgctagacaccaagaatttggatgtgatccttgggatgaattggttggctcaattccaaggagtagtggattgcgcgagacgcactgtcactctgtaccgagggccggaacaaccggttgttttctttgcacccccaacctctgtcagaagttcaggacttcatcagataggactgtcagaaattcccatcgtcagagagttcggagacgtgtttccggaagaactacctggtatgccgcctaagcgagagattgagttccggatagatcttgctccaggaaccactcctctgtacaagcgaccgtaccgtatggcagcaaatgaactggccgaagtaaagagacagttggaagagctgaaagaaaaggggtacatacgtccgagtacttccccatggggtgctcctgtgatttttgtagagaagaaagacaagacgaagaggatgtgcgtcgactacagagctctcaatgaggtcaccatcaaaaacaagtaccctcttccccggatagatgatctgttcgatcagcttaaaggtgccactgtattctccaagattgatcttcgttccggatatcaccaattacgtattcgtgaagaagatattccgaagaccgcattcaccacgcgatacggactgtatgaattcacggtgatgtcgttcggtttgaccaatgcacctgccttcttcatgaacttaatgaacaaagtgttcatggaatacttggataagtttgttgtggttttcattgatgacattctgatatactcacaatcagaggaagaccatcagcaccatctccgtctggtgttgggaaagttgcgggaacatcaattgtatgccaaacttagcaagtgtgagttctggttgtccgaagtcaaattcttagggcacgtgatatctgctaaaggagttgctgtggaccccgaaacagtgaccgccgtcaccgattggaagcaacccaagacagtcactcaagtccgcagtttcttaggtttggcaggatactatcggagattcatcgagaacttctccaaaatcgctcgacccatgacacagttgttgaagaaagaagagaaatttgtgtggagcccgcaatgcgagaaggcgtttcaaactctcaaagaaaagctggtttcctcgccggtgttaatcttgccggatactcgcaaggatttcatggtgtattgtgacgcttcgcgccaaggattggggtgcatgctcatgcaggacggtcatgtggtagcctatgcctcacgtcagctacgacctcatgaaggcaactaccctacacatgacttggagttagccgcggtggttcatgctctaaaaatctggcggcactatctcattgggaatcgctgtgaaatatataccgatcataagagtttgaaatacatcttcacccagtcggatctgaatcttcggcaaaggagatggttagaactcatcaaggactatgatgtgggaattcactatcatcctggtaaggccaacgtggttgccgacgctctaagtcgaaagagccattgcaacactcttaacgtccgtggcattccacccgaacttagtcaacagatggaagccctgaacctaagcatagttggtcgtggattcttggctgcgttggaagccaagcctatcttgctcgatcaaatccgcgaggctcagaagaacgatccggacatgcatggactcctcaagaatatgaaacagggtaaagccgctggtttcacagaggatgaacacggaaccctatggaacggaaagcgggtatgcgttccacataacagagaacttaaacagctgatacttcaggaagctcacgaaagtccttattccatccaccctggcagtacaaagatgtacttagacttgaaggagaaatactggtgggttagcatgaagcgggagattgcagagtttgtggccctatgtgatgtgtgccagcgtgtcaaagcagagcaccagcgaccggccggacttctccaacctctccaagtaccagaatggaaatgggatgaaattgggatggatttcatcaccggacttccaaaaacccaaggcggatatgattcaatatgggtagttgtggatcggttaaccaaggtagctcgattcattcctgtgaagaccacctatggagagaacaaactagcggagctctacttcgctaggatcgtgagtctccatggcgttcccaagaaaatcgtatctgataggggaagccaattcacctctcacttttggaagaaactccaagaagagctgggtacccgattaaatttcagcaccgcataccacccgcagacagatgggcagaccgagcgtctaaatcagatcctagaagatatgcttcgcgcatgtgtcctagatttcgggaagacctgggataagagtctcccctatgccgagttctcctacaataacagttatcaagccagcatacaaatggcaccttatgaagcgttgtacgggcgcaaatgccggacaccgctattgtgggaccaagttggagaaagccaagtgttcgggactgatatcctgagagaagctgaagctaaagtcagaatcattcgggataatctaaaggtggcacagtcccggcagaaaagttatgcagataaccgtcgccgtgacctggaattcgcagtggatgattttgtgtatcttcgggtcacgccattgcgaggtgtacacaggtttcagacgaaagagaagctcgcacctcggtatgtgggtcctttccgtatcgttgctcgacgcggagaagtcgcttaccagttggagctgcccgcctccttgggcaacgtgcatgatgtgttccatgtgtcgcaactcaagaaatgcctccgagttccatccgagcaggccgactcagagcaaattgaagttcgcgaagatttgacctacgtggagaggccagtgaaaatcctggacaccatggagcgcaggaccaggaaccgggtaatccgtttttgcaaggtccagtggagcaaccacgccgaagaagaagctacttgggagcgtgaagacgagctgaaggcagcccatcccgatctcttcgccagttcttccgaatctcggggtcgagattccgtttaa

SEQ ID NO: 5205 - DNA, 5394 bp, Oryza sativa
  Clone ID: PAT_MRT4530_12015C.1
atggacatctccagggcaaatgaaggctacacgagctgcggcccggtagtcgagatgtcatggcacagggccggtgtcctgctgctaggggctcagtcctgcctgcctatcccggaggttccggccgtaggtgggattgggtcggtactcttgtctatggctaggatgggttggaaactatgtcacgtcttccgtctgtataccgtggtgatggccggcagcgtcacccgtcgtggtttggacatgactggcttcgtcttggagctgcggggcatgtgcgtggtcctggggtatccacatggagtggactaccaggccaggccgcttccggagcaggagggtgacgatgcagagccccacgctggttgggaggtcactgcagtgatcctctctggctctcccgagcggacttcgctggcagtcaccgcgggtggagattccttccccgccgcttgccagagcgccgctctcctcgccatcggcactcttcaccagcgctacccggacgagttgcagcactcgccctaccgctaccaccctcgccgcggaggagcccgcgactacgccaccttccgggatgctagctcagaggatgacgctaccatcgtgcacctggcgcgcatggtggaggcgtacgacgcggctcgtatcgacttccatcagatggtgcgccgtgggatggtcgagaacaacatgaagatcctggagctgcgtcaagagaacctgcagctcaagaaggacctagacgcggtggaggcgcagctgcatcagctcaagatcgcccagggagaggtctgccgccccaagcgccgccgtgtctgccgcagccagaagatcaccgcccgcaagagcacctccaggcccgagcttgttcgtcagtccctggcgtggacttgcttcgtcgagatccctcgtgccgagcccgcgcccgtggttccccaggagggggaagcctccggcgttggtagcacggaggatgcgctgttgctcaccttccgtcctggcccgtcgcagcggagaagtgctaacaccggtgatggcaaccaacctgaaggcagcaaccaccaccaccagggcagcccacctccacctcctcctccgcctccaccaccaccaccagacaccaacgccattctcacccaaatcctcgcccagcaggccaacatgatgactgctttcctccaccacctccaaaatccgccacaacataatgctccaccaccacccccacaacactctaaactcgccgagttcctccgcatccgcccacctaccttctctagctccaacaaccccgtggacgcgttggattggttgcatgccgtggggaaaaagctagacactgtgcagtgcagcgatgaggagaaagtcatcttcgccgcccaccagctgcagggacccgcatctctatggtgggaccatttccaggctacgcagccagaagggcaacctattacttgggcccgtttcaccgccgctttccggagaacccatgtgcccgccggagtcgtggcccttaagaaaagagaattccgagagttgaagcaaggcaaccgctccgtgatggagtatttgcatgagttcaacaacttggcccgttacgccccggaggatgtgcgggaagatgaggagaagcaagagaagttcttggcaggaatggaccctgagctgtccgtccgtctagtctccggggactatccggatttccaacggggatcctcctcgcagcagcaacaacagcagcagcaacctcgctccgcgcctcgacctcaattcgtggtgcgcgtcccacagccgcagcagcagcagaatcaacaagggactcgtgcgccccgtcctcctacgccaactgtgcagcctggtcaaggccgtagggacgctcaaggtccgcagcgtctgtgcttcaactgcttcgagcccgggcactttgcggataaatgcccaaagccgaggcgtcagcaaggccaagcgcctccccgctccaaccacggtgggaaggatgtcattcggggtcgggtgaaccacgtgacggccgaggacgtgctgacaactccagacgtcatcgttggtacgttcctcattcattccatccctgctaccattctgttcgactctggagcatcccactcgtttatatctgtgccattcgtggggagaaatcagttgggggtagaaaggcttaggaaccctctgctcatcaccacccctggaggggttatgacagcaaagtattatagtcctgccgtccctatagaaattcaggggattccttttccctcggatctgattctgctagacaccaagaacttggatgtgatccttgggatgaattggttggctcaattccaaggagtagtggattgtgcgagacgcactgtcactctgtaccgagggccggaacaaccggttgttttctttgcacccccaacctctgtcagtagttcagaacttcatcagataggactgtcagaaatccccatcgtcagagagttcggagacgtgtttccggaagaactacccggtatgccgcccaaacgagagattgagttccggatagatcttgctccaggaaccactcctctgtacaagcgaccctaccgtatggcagcaaatgaactggccgaagtcaagaaacagttggaagagttgaaagaaaaggggtatatacgtccgagtacttccccctggggtgctcctgtgatttttgtggagaagaaagacaagacgaagaggatgtgcgttgactacagagctctcaatgaagtcaccatcaaaaacaagtaccctcttccccggatcgatgatctgttcgatcagcttaaaggtgccactgtattctccatgattgatcttcgttccggatatcaccaattacgtattcgtgaagaagatattccgaagaccgcattcaccacgcgatacggactgtatgaattcacggtgatgtcatttggtttaaccaatgcacctgccttcttcatgaacttaatgaacaaagtgttcatggaatacttggataagtttgttgtggttttcattgatgacattctgatatactcacaatccgaggaagaccatcagcaccatctccgtctggtgttgggaaagttgcgggaacatcaattgtatgccaaacttagcaagtgtgagttctggttgtccgaagtcaaattcttagggcacgtgatatctgctaaaggagttgctgtggaccccgaaacagtgaccgccgtcactgattggaagcaacccaagacagtcactcaagtccgcagtttcttaggtttggcaggatactaccggaggttcatcgagaacttctccaaaatcgctcgacccatgacacagttgttgaagaaagaagagaaatttgtgtggagcccgcaatgcgagaaggcgttcaaaactctcaaagaaaagctggtttcctcgccagtgttaatcttgccggatactcgcaaggatttcatggtgtattgtgatgcttcgcgccaaggattggggtgcgtgctcatgcaggatggtcatgtggtggcctatgcctcacgccagctacggcctcatgaaggcaactaccctacccatgatttggagttagctgcggtggttcatgctctaaaaatctggcggcactatctcattgggaatcgttgtgaaatatatactgatcataagagtttgaaatacatcttcactcagtccgacctgaatcttcggcaaaggagatggttagaactcatcaaggattatgatgtgggaattcactatcatcctggtaaggccaacgtggtcgccgacgctctaagtcgaaaaagccattgcaacactcttaacgtccgtggcattccactcgaacttagtcaacagatggaagccctgaacctaagcatagttggtcgcggattcttggctgcgttggaagccaagcctaccttgctcgatcaaatccgcgaggctcagaagaacgatccggacatgcatggactcctcaagaatatgaaacagggtaaagccgctggtttcacagaggatgaacacggaaccctatggaacggaaatcgagtatgcgttccagataacagagaacttaaacagctgatactacaggaagctcacgaaagtccttattccatccaccctggcagtacgaagatgtacttagacttgaaggagaaatactggtgggttagtatgaagcgggaaattgcagagttcgtggccctttgtgatgtgtgccagcgtgtcaaggcagagcaccaacgaccggccggacttctccaacctctccaagtacctgaatggaaatgggatgaaattgggatggatttcatcaccggacttccaaagacccaaggtggatatgattctatatgggtagttgtggatcgattaaccaaggtagctcgatttattcctgtgaagaccacctatggagggaacaaactagccgagctctacttcgctaggatcgtgagtctccatggcgttcccaagaaaatcgtatctgataggggaagccaattcacctctcacttttggaagaagcttcaagaagagctgggtacccggttaaacttcagcaccgcataccacccgcagacagatgggcagaccgagcgtctaaatcagatcctagaagatatgcttcgcgcgtgtgtcctggatttcgggaagacctgggataagagtctcccctatgccgagttctcctacaataacagctatcaagccagcatacaaatggcaccttatgaagcgttgtatgggcgcaaatgccggacaccgctcttgtgggatcaagttggggaaagccaagtgttcgggactgatatcctgagagaagctgaagctaaagtcagaaccattcgggataatctaaaggtggcacagtcccggcagaaaagttatgcagataaccgtcgccgtgacctggaattcgcagtggacgattttgtataccttcgggtcacgccattgcggggtgtacacaggtttcggacaaaagggaagctcgcacctcggtatgtgggtcctttccgtatcgttgcccgacgcagagaagtcgcttaccaattggagctgcccgcctccttgggcaacgtgcacgatgtgctccatgtgtcgcaactcaagaaatgccttcgagtgccatccgagcaagccgactcagagcaaattgaagttcgcgaagacttgacctacgtggagaggccagtgaaaatcctggacaccatggagcgcaggaccaggaaccgggtaatccatttttgcaaggtccagtggagcaaccacgtcgaagaagaagctacctgggagcgtgaagacgagctgaaggcagcccatcccgatctcttcgccagttcttctgaatctcggggtcgagattccttttaa

SEQ ID NO: 5206 - DNA, 156 bp, Oryza sativa
  Clone ID: PAT_MRT4530_12016C.1
atggccatggccatccttcccctctccagaactttgctcacttcggccgccatggccatccttcccctcgccagaacttcgctcacttcccaaagaggatggaggcttggagcggtccaacctgaatcagtgcaccaaccacggtgtgacgaatag

SEQ ID NO: 5207 - DNA, 5416 bp, Oryza sativa
  Clone ID: PAT_MRT4530_12017C.1
atggatgaagtcgggggtcgatggacattctccagggcaaatgaaggctacacgagctgcggcccgatggccggcagcgttacccgtcgtggtttggacatgactggcttcgtcttggagctgcggggcatgtgcgtggtcttggggtatccacatggagtggattaccaggccaggccgctcccggagcaggagggtgaggatgcagagcctcacgctggttgggaggtcactgcagtgatcctctccggctctcctgagtggacttcgctggcagtcactgcgggtggagattccttccccgccgcttgccagaacgccgctctcctcgccatcggcactcttcaccagcgctacccggacgagttgcagcactcgccctaccgctaccacccccgtcgcggaggagccagcgaccacgccaccttccgagacgccagctcggaggatgacgctaccgtcgtgcatctggcacgcatggtggaggcgtacgacgcggctcgtatcgacttccatcagatggtgcgtcgtggcatggtggagaacaacctgaagatcctggagctgcgccaagagaatctgcagctcaagaaggacctcgacgcgttggaggcgcagctgcatcagctcaaggtcgcccagggagagatctgccgccccaagcgtcgccgcgtctgccgcagccagaagatcaccgcccgcaagagcacctccaggcccgagcttgttcgtcagtccctggcgtggacttgcttcgtcgagacccctcgtgccgagcctgcgcccgtggttccccaggagggggaagcctccggcgttggtagctcggagggtgcgctgttgctcaccttccgccctggcccgtcgcagcgctctccttctctgtttgctggttctgtgtggggttttcagatggtgtcgaccaggagaaatgttaacaccggagaaggcaaccaacccgaaggcagcaaccccaacccccaaggcaacccacctccaccaccaccaccaccagacaccaacgccattctcacccaaatcctcgcccagcaagccaacatgatgaatgctttcctccaccacctccaaaatctgccacagcagaatgctcccccaccacctccccaacactccaaactcgccgaattcctccgcatccgtccacccaccttctctagctccaacaaccctgtggatgcgttggattggttgcatgccgtggggaagaagctagacacggtgcagtgcagcgacgaagagaaagtcatcttcgccgcccaccagctgcaggggcccgcatctctatggtgggaccacttccaggctacgcagccagaggggcaaccgattacttgggctcgcttcaccgccgctttccgaagaacccatgtgcccgctggagtcgtggctcttaagaaaagggaattccgggagttgaagcaaggcaaccgctccgtgatggagtatttgcatgagttcaacaatctagcccgttatgccccggaggatgtgcgggaagatgaggagaagcaagagaagttcttggcaggaatggaccctgagctgtctgttcgtctagtctctggggactacccggattttcaacggctggtggacaagagcatccgcttggaagccaagcacaaggaactggagtcgcacaagcgccgcttgggcgaatttccgcaatcagcagggtgctaaccagagggtccgctacaccaatccctacccagggggatcctcctcgcaacagcagcagcagcagcaacctcgctccgcgccccgacctcaattcgtggtgcgcgtcccacagcagcaacagcagcagaatcagcaagggactcgtgcgccacgtcctcctacgccaactgtgcagcctgttcaaggtcgcagggacgctcaaggtcagcagcgtctgtgcttcaactgtttcgagcctgggcactttgcggataaatgcccaaagccaaggcgtcagcaaggccaagcgcctccccgctccaacaacggtggcaaggacgtcatccgtggtcgcgtgaatcacgtgacggccgaggacgtgctgacaactccagacgtcatcgttggtacgttcctcgttcattccatccctgctacaattttgttcgactctggagcctcccactcgtttatatctgtgccattcgtggggaaaaatcagttgggggtagaaaggcttagaaaccctctgctcatcaccacccctggaggggttatgacagcaaagtattatagccctgccgttcctatagaaattcagggaattccttttccctcggatctgattctgttagacacaaagaacttggatgtgattcttgggatgaattggttggcacaattccaaggagtagtggattgcgcgaggcgcactgtcactctgtaccgaggaccggaacagccggttgttttctttgcacctccaacctctgtcagaagttcagaactgcatcaggtaggtctgtcagaaatccccatagtcagagagttcggagacgtgtttccggaagaactacctggtatgccgcccaagcgagagattgagttccggatagatcttgctccaggaaccactcctctgtacaagcgaccctaccgtatggcagcaaatgagctagccgaagttaagaaacagttggaagaattgaaagaaaaggggtatatacgtccgagtacttccccatggggtgctcctgtgatttttgtagagaagaaagacaaaacgaaaaggatgtgcgttgactacagagctctcaatgaagtcaccatcaaaaacaagtaccctcttccccggatcgatgatctgttcgatcagcttaaaggtgccaccgtattctccaagattgatcttcgttccggatatcaccaactacgtattcgtgaagaagatattccgaagaccgcattcactacgcgatatggactgtatgaattcacggtgatgtcgttcggtttgaccaatgctcctgccttcttcatgaacttaatgaataaagtgttcatggaatacttggacaagtttgttgtggtttttatcgatgacattctgatatactcacaatcagaagaagaccatcagcaccatctccgtctggtgttgggaaagttgcgggaacatcaattgtatgccaagcttagcaagtgtgagttctggttgtccgaagtcaaattcttggggcacgtgatatctgctaaaggagttgctgtggatcccgaaacagtgaccgccgtcaccgattggaagcaacccaagacagtcactcagattcgcagtttcttgggtttggcaggatactatcggagattcatcgagaacttctccaaaatcgctcgacccatgacacagttgttgaagaaagaagagaagttcgtgtggagcccgcaatgcgagaaggcgttccaaactctcaaagaaaagctggtttcctcgccagtgttaatcttgccggatactcgcaaggatttcatggtgtactgtgatgcttcgcgccaaggattggggtgcgtgctcatgcaggacggtcatgtggtagcctatgcttcacgccagctacgacctcatgaaggcaactaccctacacatgacttggagttagcagcggtggttcatgctctaaaaatctggcggcactatctcattgggaaccgctgtgaaatatatactgatcacaagagcttgaaatacatcttcactcagtcagatctgaaccttcggcaaaggagatggttagaactcatcaaggattatgatgtgggaatacactatcatcctggtaaggccaacgtggttgccgacgctctaagtcgaaagagccattgcaacactctcaacgtccgaggcattccgcccgagcttaatcaacagatggaagccctgaacctaagcatagttggtcgcggattcttggccgcgttagaagcaaagcccaccttgctcgatcaaatccgcgaggctcagaagaatgatccggacatgcatggactcctcaagaatatgaaacaaggtaaagccgctggtttcacagaggatgaacacggaactctatggaacggaaagcgggtatgcgttccagatagcagagaacttaaacagctgatacttcgggaagctcacgaaagtccttattccattcacccgggcagtaccaagatgtacttagacttgaaggagaaatactggtgggtcagcatgaagcgggaaatcgcagagtttgtggctctatgtgatgtgtgccagcgtgtcaaggcagaacaccagcgaccggccggactcctccaacctctccaagtgccagaatggaaatgggatgaaattgggatggatttcatcaccggacttccaaaaacccaaggtggatatgattctatatgggtaatagtggatcgattaaccaaggtggctcgattcattcctgtgaagaccacctatggagggaataaactagcggagctctacttcgctaggatcgtgagtctccacggtgttcccaagaaaatcgtgtctgataggggaagccaattcacctctcacttttggaagaagctccaagaagagctgggtactcgattgaatttcagcaccgcatatcacccgcagacagatggacagaccgagcgtctgaatcagattctagaagatatgctccgcgcatgtgtcctagatttcgggaagacttgggataagagtctcccctatgccgagttctcctacaataacagctatcaagccagcatacaaatggcaccttatgaagcgttgtacgggcgcaaatgccggacaccgctattgtgggaccaagttggagaaagccaagtgttcgggactgacatcctaagagaagccgaagctaaagtcagaatcattcgggaaaatctaaaggtggcacagtcccggcagaaaagttatgcagataaccgtcgccgtgatctggaattcgcagtggatgattttgtgtatcttcgggtcacgccattgcgaggtgtgcacaggtttcagacaaaagggaagctcgcacctcggtatgtgggtcccttccgtatcactgctcgacgcggagaagttgcttaccagctggagttgcccgcctccttgggcaacgtgcatgatgtgttccatgtgtcgcaactcaagaaatgtcttcgagtgccatccgagcaggccgactcagagcaaattgaagttcgcgaagacttgacctatgtggagaggccagtgaaaatcctggacaccatggagcgcaggaccaggaaccgggtaatccgtttttgcaaggttcagtggagcaaccacgccgaagaagaagctacttgggagcgcgaagacgagctgaaggcagcccatcccggtctcttcgccagttcttccgaatctcggggtcgagattccgtttaa

SEQ ID NO: 5208 - DNA, 1623 bp, Oryza sativa
  Clone ID: PAT_MRT4530_12018C.1
atggttctccggctgcctgacccctcgcacggcggcggcgcgccgccgcacgaccacaccgaggacgagtggttcaaggagcggtacggcggcggcggcggcggaggggacgcgccgaggtcgtcgagggcggtgaatcccgtgccgccctacgggaggcgatcggcgctcgcgcctcggaggaaggaggacttcggcgacggcggcgccttccccgaggtccacgtcgcgcagtacccgctcgacatgggccgccgcggcggcgacggcgacggggagcagcgggggtcttccggcggcgtgctcagcctcaccgtcgatgggagcggcggccgcgtcgagttcgacgccgtcgtgagacagggggagaacgccgggaagaccgtgtactccagccccggcgacgtcttgcccaagatcaacgccgccgccgccgacgccgacgatgacgagcaggcggccgtggaggagaccacggcgcggacgagcgccgcgctgcgtgcgatcgtcgagaaacgcctctccgccgtgcagccgtcgaacaccctggccagcaaccacgacccggaattcatcaagtacacgcctgcgcggcagacatcggcgttcaactccggcgcggcggagaggatcatccggatgggggagacccagcaggacccgctcgagccgcccaagttcaagcacaagcgagtgcccgcccccgccgggtcgccgccggtgccagtgctgcgctcgccgccgcggccaccgtcgcagaaggaccacgacgactggaaggtgccgcccagcatctcgagctggaagaaccccaagggctactccatcccgctcgacaagcgtgcggcgttggacggccgcggcctgcacgacgtccaggtgagcgacgccttcgccgcgctcgccgaggcgctgtacgccgccgagcagaaggcccgggaggccgtcgagacgcgcgccaaggtacacaccgagatgaagatgagggagaaggagaaggccgagcagcatctcctccagctcgccacgaaggcgcgcgcggagatgctcggcgccgctcctccggcgccgagcgagcggtcgaaggcggcagcagagcgcgacgcgatacgcgaggagcggaggcgcgagaggcggctcgaggcgagggccgccgccgccgcggcgagcaagaagagcgcggccacccgggacagggaccgcgacgtcagcgagaggatcgccctgggcatggcgaacaccggcggcggcggcggcgaggtcacctacgaccagcggctgttcaaccaggagaagggaatgggctccgggttcgccggcgacgaccagtacaacgtctactccgggaggctcttcgcggcgcagccggcgctgtcgacgctctacaagccgagcaagcacggcgaggaggaccctgacgcctacggcgacgccgacgagcacctcgggaagattgccaagacacgcaggttcgtgcccgacaaggcgttcaccggagctccggcgagcgtggccgccggcaagagggagaggcccgtcgagtttgacgggccggagatggaggaggatccgttccaccttgatcagttcttgactcagatgaagaaggggaagcatcagtga

SEQ ID NO: 5209 - DNA, 949 bp, Oryza sativa
  Clone ID: PAT_MRT4530_12019C.1
ctttccggccggggcaaacagcacaaaaaggcagcagctttgctctgctcgggtgttccgccgccaccgccgccgccgacgaatcactccggcgggctcttccctcctcctcgtcgtcgtccaccggcgaccggcgcttcgtacgaagatgttgaacctctttaagataaagggacagaagaaggaagaggcggcaaatacaaatgggagacctcctgctaagaagcaaagtccaggagaattacgtctccataaagacattgctgagcttaatcttccaaagaaaaccaacattacttttcctaatggaaaggatgatctgatgaacattgagattactcttcggcctgacgaaggatactatgtgggtggagcttttgttttcactttacaagttcctcctacttaccctcacgagccgcccaaggtcaagtgcacgactaaggtttatcaccctaatattgacttggacggaaatgtctgcctgaatatcctgcgtgaagactggaagcctgtcttgaatatcaataccattgtatatggtttgaaccttcttttcattcaacccaatgacgaggatcccttgaaccatgatgctgcggctgtcctccgagatgacccacaaaagttccggaggaatgttcagacggcgatgtcgggaggctatgtcgacagggtgcattttccaaggtgtaagtaaaggtgtgtgtttgctggtgctctgtggctggcttctgcccaccttactcctgaataccgttctgcaatctgaacaatgtgacttgcccaagaaatgacatatttgtgttacatttgagtatgaatgatgcttggttgaaatgtactggaatcatgtaagcgcaacgatgtttaaactgaaatgtcaaatgatgtttggaacttggcaaaaaaaaaaaaaaaaaaaaaaaaaaaaaaaaaaccccaaaac

SEQ ID NO: 5210 - DNA, 1773 bp, Oryza sativa
  Clone ID: PAT_MRT4530_1201C.1
atggctcaagacgctggcgacacagtgctccctttttcccgcattacggcagacaggcaccttagcctcccccgcaagatcatgccggatggcgccgtcgtgagggcggtggagtcgcggccgcggccgcgatatccggagcggtccgtgcacctcttgtccttcgccatggcgggcttaattccgtcgttctccagatttttccatgaggttctggatttctacgaaatccatgccttgcatctcgcacccaatgccgtgatgacgctggccatctttgtgcatctgtgcgagatgttcatcggggtgcggccgacgatgcggctgttccaagccttcttcatcccgcagctgctgcaaggtgcggtggtggggggatgctacttccagccccggccaggcacggcggggcagtacatcgagagtcatctccgcaagaaatgggaggactggaagaaggactggttctacaccgcgttgccggaccatccatccgccgcatggctagcggtttcggagctgggcgaggaatacgacgcggtgtgggatcgcctcaggggtctgcgaagcctgggcctcacgggggcaatggtctttggcgattacatccgccgccgcatcgcacctctccaggaacgatcccgtggcgcgtgggaatacactggtcccaacgaccccatgcgcacgcatgtgggcgagcgctgggactggggggaggaggacgcaaagatggtgctggtgctgggcctggactccgccaagcaaacgctaatcccagatgggatcctccccctctactgcgaccgcgaccgggagagcatcctggccgtgatgtcagttgttggcgccggtaggagccggtccagccgaggcggcgccagcggtagcgccgttggcgcgggtggcggcggcgcgactgcgggtgggagccggacaagcggtccaggcggtggtggctcaagggcgcccgactcgagccgcggacctggagacgacttggtcggcgacccaaaggggaagcggaaggtgcccgaatcccggccgccctctcccccgcgtggagggggcaccgagcacgcggcagatcatccgccagcgggccacaagcgccctgccgggcccgaggtcggacggaagaagaaacgggtccgaaagatagggcaaacggagccgagccgagggagcttcatcgagaccccgaagtggactttcaaccgccctccccgtagcgagattccttctcagggggtctcagggtcggagccttcgtgggggacgaaatccgaacgatcggaacggtccgggcccggccaatccaaggccgcggggtcttcgcagcctcgcagtgggacccacaggccacataccgggcctggtcccgagcgaccctcagccgggactcgacttgctgcgggcaacggtagcggcgacgttcctcccgggggcggctgtgagactagggtccatgcggaacgccacccaggatcggggggtgagggaggtcgcagctcgggagccgaggccggaggtgatcctgagcccgaggtcgaagtcaaggctgggggcggtcccgagtccgaggtcaaggtcgaggttgggggcggtcctgagcccgaggtcgaagtcgaggctgcccggttggccccccagttcacctttgggctcgcctcggatgaggagagcggaagtgggggtgacgacgacaacgtgggcgacgaagactgggacgacgtcgtcagcggcgccggcctcgggggcctgggcaccccgtga

SEQ ID NO: 5211 - DNA, 5473 bp, Oryza sativa
  Clone ID: PAT_MRT4530_12020C.1
acgagccttagatcccaagccttagcaatattttcaaaactaaaaatcctgtcttaattgtgaaaaccctctagtctctctctgtcctgctgcttcatttatcgccaaaatctgacttttaaatgttgcttttctttttgtttttgtttgtagatggccggcagcatcagccgtcgtggtctggacctgactggtttcgtcttggagctgcggggcatgtgcgttgtcctggggtatccgcatggagtggactaccagggcaggctgctcctggagcaggagggtgacgatgcagagccccacgctgcttgggaggttactgcagtgatcctcactggctcacccgagaggacttcgttggcagtcaccgcgggtggagattctttctccgccgcttgccagaacgccgctctcctcgccatcggcactcttcaccagcgctacccggacgagttgcagcactcgccctaccgctaccaccctcgccgcggaggagcccgcgactacgccaccttccgggatgctagctcggaggatgacgctaccatcatgcacctggcgcgcatggtggaggcgtacgatgcggctcgtatcgacttccatcagatggtgcgccgtgggatggtcgagaacaacatgaagatcctggagctgcgtcaggagaatctgcagctgaagaaggacctagacgcagtggaggcgcagctgcatcagctcaagatcgcccagggagaggtctgtcgccccaagcgtcgccgcgtctgccgcagccagaagatcaccgcccgcaagagcacctccaggcccgagcttgttcgtcagtccctggcgtggacttgcttcgttgagacccctcgtgccgagcccgcgcccgtggttcctcaggagggggaagcctccggcgttggtagcacggaggatctctctctgtttgctggttctgtgtggggttttcagatggtgacgaccaggagaagtgctgccaccggtgatggcaaccaacctgaaggcagcaaccacaacaaccatggcagcccacctccacctcctcctccgcctccaccaccaccaccagacaccaacgccattctcactcaaatcctcgcccagcaggccaacatgatgactgctttcctccaccacctccaaaatccgccacaacagaatgctccaccaccacccccacaacactctaaactcgccgagttcctccgcatccgtccacctaccttctctagctccaacaaccccgtggatgcgttggattggttgcatgccgtggggaaaaagctagacaccgtgcagtgcagcgatgaggagaaagtcgtcttcgccgcccaccaactgcaggggcccgcatctctatggtgggaccatttccaggctacgcagccagaggggcagcctattacttgggcccgcttcaccgccgccttccggaggacccatgtgcccgccggagtcatggcccttaagaaaagggaattccgagagttgaagcaaggcaaccgctccgtgatggagtatttgcatgagtttaacaacctggcccggtacgccccggaggatgtacgggaagatgaggaaaagcaggagaagttcttggcaggaatggaccctgagctatccgtgcgtctagtctccggtgactatgcggatttccaacgtctggtggacaagagcatccgcttggaagccaagcacaaggaactggagtcgcacaagcgccgcttggcgaatttccgcaatcatcagggtgctaaccaaagggtccgctacaccaatccctatccagggggatcgtcctcgcagcagcaacagcagcaacaacctcgctccgcgccccgacctcaattcatggtgcgcgtcccacagccgcagcaacagcagagtcaacaagggactcgtgcgccccgtcctcctatgccagccgtgcagcctggtcaaggccgcagggacgttcaaggtccgcagcgtctgtgcttcaactgcttcgagcccgggcactttgcggataaatgcccgaagccgaggcgccagcaaggccaagcgcctccccgctccaacaacggtggtaaggatgtcattcggggtcgtgtgaaccacgtgacggccgaggacgtgctgacaactccagacgtcatcgttggtacgttcctcattcattccatccctgctaccattttgttcgactctggagcttcccactcgtttatatctgtgccattcgtggggagaaatcagttgggggtagaaaggcttaggaaccctctgctcatcaccacccctggaggggttatgacagcaaagtattatagtcctgccgtccctatagaaattcaggggattccttttccctcggatctgattcttctagactccaagaacttggatgtgatccttgggatgaattggttggctcaattccaaggagtagtggattgtgcaagacgcactgtcactctgtaccgagggccggaacaaccggttgttttctttgcacccccaacctctgtcagtagttcagaacttcatcagataggactgtcagaaatccccatcgtcagagagttcggagacgtgtttccggaagaactacccggtatgccgcccaagcgagagattgagttctggatagatcttgctccaggaaccactcctctatacaagcgaccctaccgtatggcagcaaatgaactggccgaagttaagaaacagttggaagagttgaaagaaaaggggtatatacgtccgagtacttccccctggggtgctcctgtgatttttgtggagaagaaagacaagatgaagaggatgtgcgttgactacagagctctcaatgaagtcaccatcaaaaacaagtaccctcttccccggatcgatgatctgttcgatcagcttaaaggtgccacggtattctccaagattgatcttcgttccggatatcaccagttgcgcatccgtgaagaagatattccgaagaccgcattcaccacgcgatacggactgtatgaattcacggtgatgtcattcggtttaaccaatgctcctgccttcttcatgaacttaatgaacaaagtgttcatggaatacttggataagtttgttgtggttttcattgatgacattctggtatactcacaatcagaggaagaccatcagcaccatctccgtctggtgttggggaagttgcgggaacatcaattgtatgccaaacttagcaagtgtgagttctggttgtccgaagtcaaattcttagggcacgtgatatctgctaaaggagttgctgtggaccccgaaacagtgaccgccgtcactgattggaagtaacccaagacagtcactcaaattcgcagtttcttaggtttggcaggatactaccggaggtttatcgagaacttctccaaaatcgctcgacccatgacatagttgttgaagaaagaagagaaatttgtgtggagcccgcaatgcgagaaggcgttccaaactctcaaagaaaagctggtttcctcgccagtgttaatcttgccggatactcgcaaggacttcatggtgtattgtgacgcttcgcgccaaggattggggtgcgtgctcatgcaggacggtcatgtggtggcctatgcctcacgccagctacggcctcatgaaagcaactaccctacccatgatttggagttagccacggtggttcatgctctaaaaaatctggcggcactatctcaatgggaatcgctgtgaaatatatactgatcataagagtttgaaatacatcttcacccagtcggatctgaatcttcggcagaggagatggctagaactcatcaaggattatgatgtgggaattcactatcatcctggtaaggccaacgtggtcaccgacgctctaagtcaaaaaagccattgcaacactcttaacgtccgtggcattccacccgaacttaaccaacagatggaagccctgaatctaagcatagtgggtcgtggattcttggctgcgttggaagccaagcccaccttgctcgatcaaatccgcgaggctcagaagaacgacccggacatgcatggactcctcaataatatgaaacagggtaaagccgctggtttcacagaggatgaacacggaaccctatggaacggaaatcgggtatgcgttccagataacagagaacttaaacaactgatacttcaggaagctcacgaaagtccttattccatccaccctagcagtacgaagatgtacttagacctgaaggagaaatactggtgggttagtatgaagcgggaaattgcagagttcgtggccctttgtgatgtgtgccagcgtgtcaaggcagagcaccaacgaccggccggacttctccaacctctccaagtaccagaatggaaatgggatgaaattgggatggatttcatcaccggacttccaaaaacccaaggtggatatgattctatatgggtagttgtggatcgattaaccaaggtagctcgatttattcttgtgaagaccacctatggagggaacaaactagccgagctctacttcgctaggatcgtgagtctccatggcgttcccaagaaaatcgtatctgataggggaagccaattcacctctcacttttggaagaagctccaagaagagctggatacccgattaaatttcagcaccgcgtatcacccgcagacggatggacagaccgagtgtctaaatcagatcctagaagatatgcttcgcgcatgtgtcctagatttcgggaagacctgggataagagtctcccctatgccgagttctcctacaataacagctaccaagccagtatacaaatggcaccttatgaagcgttgtatgggcgcaaatgccggacaccgctcttgtgggaccaagttggggaaagtcaagtgttcgggactgatatcctgagagaagctgaagcgaaggtcagaaccattcgggataatctaaaggtggcacagtcccggcagaaaagttatgcagataaccgtcgccgtaacctggaattcgcagtggacgattttgtgtaccttcgggtcacgccattgcgaggtgtacacaggtttcagacaaaagggaagctcgcacctcggtttgtgggtcctttccgtatcattgcccgacgcggagaagtcgcttaccagttggagctgcccgcctccttgggcaacgtgcatgatgtgttccatgtgtcgcaactcaagaaatgtcttcgggtgccgtccgagcagaccgactcagagcaaattgaagttcgcgaagacttgacctacgtggagaggccagtgaaaatcctggacaccatggagcgcaggaccaggaaccgggtaatccgtttttgcaaggtccaatggagcaaccacgccgaggaagaagctacctgggagcgtgaagacgagctgaaggcagcccatcccgatctcttcgccagttcttccgaatctcggggtcgagattccgtt

SEQ ID NO: 5212 - DNA, 2151 bp, Oryza sativa
  Clone ID: PAT_MRT4530_12021C.1
atggaggagttgctcggcttggtgcggggcttcgtcgacgtcctcgtcctcgccggcggccgcacctcgtctggcgccgccgccacctggcgctccggtgacgtcaagaaggccctccaatgggccctcttcttcgaggaggttttcaagaacctgcgtgacgatggtcagtacgatgagtctgcaagtgagctcgatgctgcactcgttcaactcgcttcaagcccgaatttccccaagggtattgaggatatccgatcaaaaacacttgcgatggcaagagagttggttgtgaagcattttctgaaaacaacgaatgcggagaatttaggtgctgtacttcaagcagttgttgagatggatatggatggcatttctgctagtggtgaatgcaatgtgtgccaagagtatgtgcaatcgattttagatatgaatttacctagtttgatgcgaaccaagaatgcccgtgatgttggacattccactagctctgatgaattttgtgaagaatccttgtttacgggtaattcacagattctacttaaagaactacagaagaagctggattcaggatcgtgtatttctttggctgagagagaactgaacacacttctaaaaagcatgaaaaaggacagctttgatagtgcaggaagtacattgtgcacctcagcaactgctcagaaaacacaaatcatcgacaagtttatcctgtggaagcaatggaaagcaaagtgtttgtcgtacttgcttgatgagcgtaccattcggatcatgtcaggaactaatatgatctttaatgctcccaaggagcagtggatgggattgtttgaaccattaaaagtttctgcagattctagtcaaagtggcatcattgaagtcatggagctatgcttgttgggattggttgcaaggcaatggaactcattaatagagagcatcatgtcacatacttttagttcctttcctatatcaaaacaatatgctgatctgcaccagttgcttcaaggaacaactcaggatgaatgccaagacaagcttcttggtttcaaggagatggatatttgtgagtatgcaaggcaatcattagagagcgaaccgtacatattatggcttctacctccagttcttactgctgcagcaatgccgccacggtcaagcttgtttaagatataccttgttgaaatagataagcaactcggtgaagctgcttccaaagaccgaaaatgcaattgccgagcagatgtgatcgactagcagccaatctcttccaactttacatcagatctttatatcaacaaaagtgaatcacctaacggcaagctttcttctgaatcatatgctattgatacctctggatgtgattcttccttgccgccaacacagtcattatacaagggtaatccaagttctttaaggatggtttatcctaaagtatctgaacagaatagttggagtcaagaaccactgcctggaccatttgtttgtccaactagtgttgatttcttcgatcaacaagatatgactatttttgaccaacaaatacaagataacattgcagcaagtcctagcaccaaccttgcaaagcaaaatgagtggttctcatctggcacttccttgcagtatttggaaagttcggtgtctgctggttctgtgctgaaggctgttgatgcgacaagtacaacaccttcaaattatttgcattgtcatgcacagagaaatacatcaaatcctcccaacttcaatgaaatttgttctgaagcaactccaaaagctgtccagaaagttatgaaggttgacggcttaactatataccatgtaaaaagccatctacagaagtatcgcacagttcatcatcgacctcaactatctgatggtcgaggcatggaaaccacctgtgaaggattaagggtccagattggcttgcagaaacaacttcacgaacaacttgagatccaaagaaagctgcagctgcaagtagaagaacacagcaagtacctcgccatgataatcgagaagcagagcgagagcctaagacaactgggagcattaccaagatctctagatgcacccactcaggttttggataacagggaaacgtgcgagggacaaacaggagatgctgattcagcagagcaaaaacctgagaaatga

SEQ ID NO: 5213 - DNA, 428 bp, Oryza sativa
  Clone ID: PAT_MRT4530_12022C.1
aacatctcaaactatatatacattcacatcacagatcctaaaaaaaataccacaaatcaaatacatcacatattgcatctcagatacatacaataaatcacaaattctcaaaaaaaaattacacatcttaatggaatcacaaattgcaaaaaaatttttttcaaacgaatcggccgccaaccgcctgctcgccgccgcgcgtgggcctgcctgccgccgccctccgcagtcgccgccgctcagccacaccagcgcctgccgcccaccgccactgccctccacagccgccgccactcgaccgcccaccgccgctcggcccgccgccgccgccctccgtagccgctgccgctcgaccagccgccaccaccctccacagccgccgccgctcggccacgccggcgcttgccgccctccgccgccgctcgatc

SEQ ID NO: 5214 - DNA, 376 bp, Oryza sativa
  unsure (1)..(376): unsure at all n locations
  Clone ID: PAT_MRT4530_12023C.1
gtgctatatcttgcagtgcatagccagtactgtcactcagcctgcagtttattgtataactgtgcagttccgaaacaaacaagccaacagcccatgtggtcgtctccttcccataacctcatcgatcacaaggaccaatggatattcccccctttcatatcatttatcatatgcccttcaattcccgagctctctcactaaccagctactactagtttcccaccaatcagtgctcactgctcacctcagtcagtcagtagttcagtacaggcagcagcatcagcagcagcttctncttcttcttcgattgggttcttgatcgtcgtcgtcgtcgatctgtgcctgaggagagggacgagaagtacgtggaaattaa

SEQ ID NO: 5215 - DNA, 330 bp, Oryza sativa
  Clone ID: PAT_MRT4530_12024C.1
atggctgacaacagagacggattaaagtacgtgtactgcaaggagtgcgggatcgacgattgggtaccatctgtacaagaaaaggcacatgctaaacaacaccgcaaacagaatttagagaggatgaatctgcttcgccttcgagcacaacaactacaagcgaaaaaggcaatggaggctagcaaggccgcgaagaaagccaacagtgaagcgaagaaagccaaacctcaagctaaaaaatacccaaacaagcacagttcccctgttaaaaagacactagaggaaacagtcgctaatctgctagcaccaattggaacacctgatagctaa

SEQ ID NO: 5216 - DNA, 211 bp, Oryza sativa
  Clone ID: PAT_MRT4530_12025C.1
aatacgctgtcggcgagggcgaggggcaagcggtcgcggttgtcggcgaggcggccgagagaggatcgtggcgctggtagggcggcagcgttgggggcatgatcgagttcctgcgtagcccgccggcgtggacgtcctgctgaacacgagggcgctgcacagcttcgcggcgtggacaacacgccgcgctgaacacttccgggcacgctga

SEQ ID NO: 5217 - DNA, 527 bp, Oryza sativa
  Clone ID: PAT_MRT4530_12026C.1
cgccgcaagcctcaccctcaccgccaaatccgccggccggccgccgctcccgcaccccgctcctctctgggcctccatctccctggccgacggcgccgcattccccgccgagacgtccggcgggcgccgcctcctcggcgtcggcctccgcaggaccaccatcctcggcctcaagtccatcgacgtctacgcgtttggtgtgtatgcggatgaccacgatctgagacagctgagggagaagtaccagaagctccctgtctctcaactgaaggagaacgccgagctgatcaacgatgcgttggagcgtgacatacggatgacggtcaggctccagattgtgtatgggaggttgagcattcgatccgtgcgaagcgcgttcgagaagagcgtgggaagcaggctgctgaagtttgggggatcagacactcatgagttgcttcagagggtgggggtcgaccccgagggctgcgagatgggacccgccgccgctgacgacgccgctgccggcgaggaccaggctttgtccg

SEQ ID NO: 5218 - DNA, 336 bp, Oryza sativa
  Clone ID: PAT_MRT4530_12027C.1
attcacaacaaaacaccattcatttggcccttgattggcgtccggccggccccagttacaacaatgggggattttaattcccaaaaaaaaaaattggccctttggaaattaagtaaacaaaccgggggtaaaaccctgtccacatggcaaatttaaagaaaatctggggaaaatttttgggttttggaaaacacaaaccaaaaatggccccaaaacccctgttcgaaacaattaggacaacaggtgggccaaatttgcccccccaaagcctgtaaaaagggggggaaaccaccaggggccctccaaaaaagcccgttggggccccccctcgggggg

SEQ ID NO: 5219 - DNA, 435 bp, Oryza sativa
  unsure (1)..(435): unsure at all n locations
  Clone ID: PAT_MRT4530_12028C.1
cgacacatcacgggcatacatatacacattctttgcgtgcacacggtgggctcgtacatgtacagagtaccaatgtggtagatgtggggtaggtcggtggcgcgtagccacccacctgatacagtgcacgccactgcaacgggggtgggatacgcatacgtacacacatgtacaccacacttggggtcctcgtacctgctcacatgacacgcgtaattatactgcttaattactgatttgtgacaggtcaaataagactgatgaatttttcatttcttnaaaaaccnnncttntnncnncccttttcttcttaaaaaaaaaaaaaaaaaaaaaaaaggggggccgttttaaaggatacaaaaataaaaaaaaaagggggggccgctttttaggtttccaattgggtcccctaaatttaataaaatggcgcttttt

SEQ ID NO: 5220 - DNA, 660 bp, Oryza sativa
  unsure (1)..(660): unsure at all n locations
  Clone ID: PAT_MRT4530_12029C.1
gtggattttcttcaagcgcgacatggtgatcacgctcaagcaggagctgatcatgaacagcttcaagaccatcgacggccgtggcgccaacgtgcacatcgccaatggcgcctgcatcaccatccagtacgtcaccaacgtcatcatccatggcctgctcatccatgactgcaggcccaccggcaatgccatggtccggagctcgcccagccactacgggtggcgcaccatggccgacggcgacgccgtctccatcttcggcgccagccacatctgggttgaccattgctcgctctccaactgcgccgacggcctcatcgacgccatcatgggttccactgcaatcacagtgtccaacaactacttcacccaccacaatgaggtgatgctcctgggtcacagcgattcctatgtcaaggacaaggcaatgcaggtcacgatagcattcaaccatttcggagaaggtcttattcagagaatgccaaggtgcaggcatggttacttccatgtggtgaacaatgactacacccactgggagatgtacgcaattggtggaagtgctgagccaaccatcaacagccagggcaaccgctaccttgctccgacanatccctttgccaaggaggttacaaagaaggtttgagactgctcagaccatct

SEQ ID NO: 5221 - DNA, 624 bp, Oryza sativa
  Clone ID: PAT_MRT4530_1202C.1
atgaatttaggtgacactatagaagagctatgacgtcgcatgcacgcgtacgtaagcttggatcctctagagcggcgcgtgttgaagacgaacgggccatcggcccacgaccgccacgtcttgaacgtccggagcggcacctccaggctcgtgaggcgccacggcccacgggtacagctgcaccgtgtaaccccacgacaccgacacggaccaggtgtagcgcggcccgcgctggtagcagaacgcctgctgcagcgaccgcgcctggtcgagccgcgacgcgcgcaccagccgccgcgccgcgtccagcgggctgccatgctgccccccggggctgatgggctcgatgtggtcgaggtggtggagcgacaccagcggcgccagcgggtgggcggccagcatcccgtacgcgtcgccgcggacgtccacctggtggaatccgggctcgcgggtgagagggacgccgagctcgctgaggcaggcttgcacgcgctgatcgctgccgtagaacagcctgtatcgttcgaggcaaccgtcgatggccttggcgagctcggcggcggccgggtagctgacaggcgaacccgcgccgccgaacgccatgccgtaccgagtgcatcacgt

SEQ ID NO: 5222 - DNA, 643 bp, Oryza sativa
  unsure (1)..(643): unsure at all n locations
  Clone ID: PAT_MRT4530_12030C.1
ccccgcgtccgctttgttttgatttgacacaggcggcaaatacatacatcattttctctctctttttccctgagcaatctgcgtggtgtgtagatctaccacaacagaatacttanaaatggagcaaaaattcgccctctgttttcaccaaaaacaagaagcaaacaagagaagaacagcaacgggttgccacataaacaaacttgaaatgcacagcaagatgatgccatccttttattttagtaattttttttgtgttttttgggtaagtgggtgagaggttagtagtaattagcatctttattgacggcacattgttttcacaacaaagtgtcaatgaccttgatgattgctcattctactctatttatatgattaatgatcttggtgatgatagctgaagatcctgagagaacagacaaagtgtgtgtatctgacagtctgaaacttgggtgaaacaggatcctatatcactattctactaattgatgccctaatcttgatggttttgttcttaaatgtaagcagatgtgcttagaaatttggagttaatcaagtttggtaggaactagagagagaaagaggggggctgactgtacatgtgcaatgtgatcttatnctgttgcacaatgggtactgtaaa

SEQ ID NO: 5223 - DNA, 2573 bp, Oryza sativa
  Clone ID: PAT_MRT4530_12031C.1
tttttttttttttttttttttgttttttttttccttttttttttttttgttttttttttttttttttttataacataaatattaagcctgctctttaactttcagtgaagaagaggaaaggagggtaaactatgcatattttcgtcttttacagcagtagcactcactccacgcacggcaaacacatctgcaacccaaggcacaaaacaaaacattgtggtagactcttccttttgacaaccaaaggtattgtgagacgtcgagcgccccctgatctcgcattacacttgctatgatcaggggggcagacatcatcatcgatccgacacaaaacatacacacactcaacacactcagatgtctaataggagaccgagcgaacgacgaaatctcaatcagcaacgcttctcgcctgctgccattgacagtgttcacagttgggagcagggggaggttgaggaaatggtgaatcttcttggagagggtcatatataaccattgtcaaaagctgcaaaaaaagagagagagagagggagaaggggagagaaaagaaaaggctgtaacccgcgatgttccggtagtagcttttagcttcttctataattcttgtgtttcttttgtgcttgtcgtggcgccacagcggggtggcgcgacaggttcaggaaatggtcaatcgtcttgtagaaggtcgtgtccccccggcacgacaaggcgcccgcaccggatgtgatggtgccaaccatggatgatgacttggcaccgaggcttgaggcgcgcgagtagctggccgaggcgcctgcacctgatggggtgaagaaggcgccgttcaggaggagatccccctctgatctccagttccagcccttccagatggtctgagcagtctcaaccctctttgtaacctccttggcaaagggattggtcggagcaaggtagcggttgccctggctgttgatggttggctcagcacttccaccattgttcaccatatcgaagtaaccatgcctgcaccttggcattctctgaataagaccttctccgaaatggttgaatgctatcgtgacttctccgaaatggttgaatgctatcgtgacctgcattgccttgtccttgacataggaatcgctgtgacccaggagcatcacctcattgtggtgggtgaagtagattgttggacactgtgattgctagtggaacccatgatggcgtcgatgaggccgtcggcgcagttggagagcgagcaatggtcaacccagatgtggctggcgccgaagatggcagacggcgtcgccgtcggccatggtgcgcccctcgtagtggctgcgcgagctccggaccatggcattgccggtgggcctgcagtcatggatgtgcaggccatggatgatgacgttggtgacgtactggatggtgatgcaggcgccattggcgatgtgcacgttggcgccacggccgtcgatggtcttgaagctgttcatgatcagctcctgcttgagcgtgatcaccatgtcgcgcttgaagacgatccacagcggctcgtcgcggatgacggcgtaccggagcgtgcccttcttggggttcaccgcgtcgtcgtcgctggggtcggtgaccacgtagaccttgccgtcgcggccgccgacggcgttgcggccgatgccgatcccgcacgcgtcgcgagccgcgtggcgattgattgtgccagccgcgcgtcacgcctcgcagccgtcgtcgctccgagcggtgctgccgcacgacaggtagcccagcttcctcctcgccaaaatgttcttgattgtcatgcgcaccttcaataccacatcctccagggcgtccaccgcgccgttcttttttggtgctgctgctctctcactaatgtgctcttgcgagaccaccccctccgggtcgtccaccgcgccgggcaccgtcatcgccgccgacgacgcctcatcgccatcaccgtcatctcctctgctcgccgccgccgcggccgccgccgtcgccggccaggacgagtcgcgcagccaccgccgcgtgccgctcgccgccgccgtgctcccggcccggaggccagcgagaagccgccgcccgccgctcccgcctccgccgccgatgagctcgacggtgccggtgagaagcaccagcagcaccagcgccgccgcccacctcctcgccgccgcctccgccattgctcccgcgcctcgacgcagctagggctcggaagcaaacacttggtggagtcgagaatggaagcagaggaggaggagatcgaggttgaggaggagggcgtcgagcgccgcgccgatttatactaagctcgccttcttcatcgggacacctcctcaccgcattccccctcgagaacaacttattcacagataggccctccgtgtcgcgtgctcgaggacctggatgtaattatgtgaaagtcgaggggtgggtgggtgtctgaaatctcaatgcgtctcgtactaaacctcccgccaactaattgcggtgattagaggacgctaatcgctggaagtaagtacgattatagtaatcaggttgagtgtgctgctgcagtagtgtagtgc

SEQ ID NO: 5224 - DNA, 498 bp, Oryza sativa
  Clone ID: PAT_MRT4530_12032C.1
ctcttcgactacgaagagtcggatttttttacttttagcgaaccattcgactccgcttatttgccctggatggcctttaagaggggataatctgtttcgccaagattaatgcaatgattataatgttgtttttagaaagattgagaaatctattgagctaaaactctgctagctttgtttggggggaattgtgaaataccataggttccccaacatacttgcaggttattattgttctttctattttcttagttataccctgtgattaggcctggattgaaatttacttctgttttttttggaccttttccttgaattcttgggattttgggtttataattatcgtactaattttatacatttaccaagtaaagtctgggatggctctgtatagaactatagatatggttagcaatatattagaaaataaaggggatttgaaagatgagttgacaccatgcaagggcctattgataattgaaatttgaaaacttaact

SEQ ID NO: 5225 - DNA, 273 bp, Oryza sativa
  Clone ID: PAT_MRT4530_12033C.1
atggcactactgaccaagcccaggatatctcgcatgatccatcgacacgctcagaagaaaggtcagaaacagcaagcacaggctgctactgctagcaggagcgcggtgccgactgatcacctccatggctacttctcagttctctctccactctcctcggcaactctgtcgattcaagatatcgactggttacatctgaagtacactgatggatccattcaggatgttgtggccgtcggcatcacatttgacaccagcactggcttagccttt

SEQ ID NO: 5226 - DNA, 297 bp, Oryza sativa
  Clone ID: PAT_MRT4530_12034C.1
atgtggctcttccctgggaggggtcgggccctgggtgaagtggttgtcaccccctcctcgcttgggggtcgggtcgccccgaccccctccacgtgcgtggctgacaggccgcacgtcgcccgaatgatgggtccgacggggttagtgcacctgactgctgactgcttgttagacggcttgcagcttgcgctgccccatcacatcggtatgttgagggttgtttgccccttgcctaggcctgagtccacgttccgctccgggccatgggtgcagcccgtgagaaggctcggcatgtag

SEQ ID NO: 5227 - DNA, 1325 bp, Oryza sativa
  Clone ID: PAT_MRT4530_12035C.1
ggctagggcgcggcccgagagaaaggggcggctcggccgagcttaatgggccggccggcccaagaaggcggcccaaggcgcgcgcgcgggcggggaggggagagagagagccggtgggccgggtccatcccgcgtggtcccgggtgggacccgcttgtcgtcgactcggctcaccgtgagcgaggtgcacgcggggcgtgctagggtttggggagggaggcgcggcgcatgcgtgcggttcgcggaggacgcggtgcggcgggcccactcgcagcctcacggctcgcggtggaccgcgcgcgcgagggggcggagggaagcggcggaccggggtctgcttgacccggtcacggccgaggtggcgccgacgtggcgcctatgtggctgccacgcgggccggtgggaggtagacgacgacgccggtcggaacggacggcggacgacggcggcgagggccggagcgaaccatggcaattcaggcgaaggcgagcacaccgggatgttgcacaggacgaggggagacgagccaatggctcggattcgacgggggatgcttgacggtggcggattgcggtggcggcaaccgacggcgggagaagggggaaacggcgatgaggtcacgaggggccgattcccggcggcgagagcatctacgcggctacgggaacccaccccttgcgccggattaggaggaatcgcatcgagggaggccggcgacgagaggcgttgccgagctcgggcggcgacggcggcgagcacacggcgagagacggtagcaaggaagagagggtgcgtccggagtcccgttccgcgtcctaacgcgcaccgactccttcggcacacgtgatggcgtcggtcggcgatcagcaagacagaggggacggcaatggcgcgggcgaaaaacggggaagattgggaggggaaaaggaagggagggcgcctgggtttatagggcggcgatgtcggtttagaaaggctcagcctccgtcccttggaagccagcgtgcggcggtggcggggccgggtcgatgacgacggcgatgacggcggaccggtttggagtggagcggcgacatgggcggcagacgcggggcaagcgcggcaggcgctgacggcggcggtgactggccggtcggccaccacggtgcgcgcgcgcgcgggcggcgcgacgatttgggcggcatcggcgggaatggcagcgagagcgggagggagggctcggcgcggctcacggtagagcggggagagagagagagacagagccggggagggagggggagatgggccgagagggattcggcccatcgaacccgagggaggctaaa

SEQ ID NO: 5228 - DNA, 384 bp, Oryza sativa
  Clone ID: PAT_MRT4530_12036C.1
tttttgttttttttttttttttgttttttcttttttttttttttttttttttttttttttttttttttttaaaaaaaaagggccacccccttttttcattacaggaccaggcaacacttcacaaaaggggcaatccaatggagagggaagaaaatttttaaaaccctaaaacaaccgggaaaggattcagggcccacccgcaggaaacactggaggggggggggcaacatttcctccaaagcacaaaagccctttttaagaaaaaaacaggggcttaaatcccctccatcaaaaattgcccgaactttgggggggaaaccatataccctgaaaaacccttaaacaaaagcctgggtggaaacccccccactccaaaagggggaa

SEQ ID NO: 5229 - DNA, 1339 bp, Oryza sativa
  Clone ID: PAT_MRT4530_12037C.1
atgcgcgcggttcgcggaggacgcggtgcggcgggcgcacgcgtagcctcacggctcaccgtggaccacgcgcacgtggggggggggggaaacggagggagcggctggccaggtcagccgatccggtcgcggccgaggtggcgccgaggtggcgcctacgtggctgccacgcgggccggcgggaggtagaagacgacgccggtcggaacggatggcggacgacggcggcgagcggcggagcgaaccagggcgatacaggcgaaggcgagcacaccgggatgttgcacaggatgaggggagacgagccgacggctcggattcgccggagggagctcgacggcggcggcaaccggcggcgagggaagggggaaacggcgatgaggtcatgaggggtcgattcctggcggtgagagcatctacgcggctacgggaatccgttgctagcgtcggattgggtggagctacgctgagcaaggccggcgacgagcgggcgctacggagcactggcggcgacggcggcgagcacacagcgagcggcgacaacgtgacgagaggccgacggcacgggagtgatctctccggcgtcgggtcggggaagaggaagaaggcgagcgcccggagtccccttccgcgtcctaacgcgcaccggctcctccggcacacgcgacggcggcggctggcgggagagacagcaatggcgcgggcgagaaacggggaagattgggagggaaaagagggaggcgcttgggtttatagggcggcgatgtcggtttggaaaccgaccttgggcggtcaagggagcgagctggcgctcggcgctcgcggccaaaacggcgacaggagggggggaggatgacgccggcgggagggaaaagggaaaaagggggaaagaaagagggcttgcctccttgccgctttggggaaaaggaggagggagagagggcgacgcggcagagggaggaggagctctgcccccgtcccttggaggcacgcgcggggagaggcggggccgagtcgatgacgacggcgatgacggcggggcggtttggagtggagcggagacacgggcggcagacgcggggcaggcgcggcaggcgctgacggcggcggcgactggccggtcggccaccacggcgcgcgcgcacgcgcgggcggcgcggcgatttgggtggcatcggcgggaacagccgcgagagtggagagggagagctcgacgcggttcacgggcagagcggggagagagagagagagagagagagagagagggagggggagatgggccgagagggattcggcccatcgaacccgagggaggcaaaatagacttttgcggagggat

SEQ ID NO: 5230 - DNA, 300 bp, Oryza sativa
  Clone ID: PAT_MRT4530_12038C.1
atggggccagggcaactctccctgggcaccttcctagccatctggccaaacaacagtcgcgccgaagaagatgccgacgcgacgacggtcatggctagggcaaagatgagtggcgagacatcttttcgcctccatttgaacggcatctcggcgatttgcgctgcacagtgcacatacgttggtgctttgcgttcatgtgcttctttcgcttgcgtgagtggtgctagtagcagttatccagcctcttgctccgctggaaacatcggcagatctgccagtgccaagtactgggagaattag

SEQ ID NO: 5231 - DNA, 467 bp, Oryza sativa
  Clone ID: PAT_MRT4530_12039C.1
cgggagggaaaagggaaaaagggggagagaacccttgcctccttgccactttgggaaaaaggaggagggagagggggcgacgcggcagagggggggagctctgcctccgtcccttggaggcacgcgcggggagaggcggggccgagtcgatgacgacggcgatgacggcggggcggtttggagtggagcggcgacacgggcggcagacgcggggcaggcgcggcaggcgctgacggcggcggcgactggccggtcggccaccaaggcgcgcgcgcgcgcgggcggcgcggcgatttgggcggcatcggcgggaacggcagcgagagcgggagggagggctcggcgcggctcacggcagagcgggcagagagagagagagagagagccggggagggagggggagatgggcctagagggattcggcccatcgaacccgagggaggcaaaatagacttttgcggaggaat

SEQ ID NO: 5232 - DNA, 1271 bp, Oryza sativa
  Clone ID: PAT_MRT4530_1203C.1
atggcccaagacaccggcgacgcagtgctcccttcctcccgcatcacagcagacatgcaccttagcctttcccgcaagatcatgccggacggtgccgtcgtgcgggcgggagagtcgcggccgtgaccgcgatatctggagcgatccatgcacctcttgtccttcgccatgacgggcttgattccgcctttctccagattcttccatgaggttctggatttctacgaaattcatgccttgcatctcgcacccaatgccgtgatgacgctggccatcttcgcgcatttgtgcgagatgttcattggggtgcgactgacgatgcggttgttctaggccttcttcattccgcagctgttgcaaggcgcggtggtggggggatgctacttccaaccccggccaggcacggcgggtcagtacatcgagagccatctctgcaagaaatgggaggactggaagaaggattggttctacaccgcgttgccggaccatccgcgacttcgagttcccgctagccctcctgaaaggtccgccgcatggctggcaacttcggagctgggcgaggaatacgacgcggtgtgggatcgccttaggggcctgcagagcctgggcctcacaggggcgatggtctttggcgattacttttgccgtcgcatcgcacctcttcaggaacgatcccgtggagcgtgggaatacattggtcccaacgaccccatgcggacgcatgtgggcgagcgctgggactggggtgcggaggacgcgaagagggtgattcagcgggtgctgggactagactccgccgagccaacactaatcccagatgggattcttcccctctgctgcgaccgcgaccgggagagcattctggccgtgatgtctgccgtcggcgccggtaggagccggtccagccgaggcggcgccagcggtagcgtcatcggcacgggtggcggtggtgcgaccacgggcgggagccgggccgaaggtccaggcggcggtggctcaagggcgcctggatcaagccgcggacccggagacgattccgccggcgacccaaaggggaactcctcgaggtccgaatcccggactgcctcgggatcataaggctcggggccacctgccaaagcctccgctcctcccttgggggcctcggggtcctcccgggggctggaaactttgggcgctaggccttcgggggatgaggggccattgcaagccgaaggggcctcccgttcgccttcctcacatcttgtagcaacgtgtcctggtggtgcgtc

SEQ ID NO: 5233 - DNA, 2674 bp, Oryza sativa
  Clone ID: PAT_MRT4530_12040C.1
atggcggccgagatctccgcgccggtttccatctcctccggccgctttccctctctcccgacgctatttaaacgtcccccgtgctctcctcatccgtttccgccgctcgccgctcgctctccccgtcggaatcgtgctcgcgccgtcttcctctctctccgccgtcgccgacgagctccggttcgccgccgccgtcgctccggacttcctcccgtctcggcgtcacctccatcggcttcgccgcgtccccgtcgacctcgtccgcgcctccgtttcgcccgtcgaccgccggagcaccgtcgtcctcgtcgtcccgaaccgcgccgccgccttcctccgtttcggccgccgttcccgtcgtcgccgtcgaccggggtgagccgtggaccgctccgttcgcttcccccttccctcctctctctcgggtgccgctccgccgcgccggtggtcgccggcggtgaccatcggggcgcgggcgtgccgcctcccgtcggccgtgccggcgaggccgccttcgggcgcgccccgcggctgccaggtggggcccggccgtcagccgcctgcgcccgcgggtgcggctgacgcgtgggacccacggcgccggccgccgccagccgcgtgctcccggtccaccgtggacccacctcggccatataaggaccggtcttgggcctctgttgcaaagcactaccgtacttccacatgtctagtggggcaaatgaaggctacacgagctgcggcccggtagtcgagatgtcatggcacagggccggtgtcctgctgctaggggctcagtcctgcctgcctgtcccgggggttccggccgtaggcgggattgggtcgatgtacacctctgatcagagtagaatctattcgaatagccgcgccctcggttatgggcaagccgagcaatgtacccaaatggccggcagcgtcacccgtcgtggtttggacatgactggcttcgtcttggagctccgaggcatgtgcgtggccctggggtatccacacggagtggactaccaggccaggcctctcccggagcaggagggtggggacgcggagccccgcgctggttgggaggtcactgcagtgatcctcgctggctcttctgagcggacttcgctgacagtcaccgcgggtggagactccttccccgccgcttgccagagcgccgctctcctcgccatcggcactcttcaccagcgctacccggacgagttgcagcactcgccctaccgctaccaccctcgtcgcggaggagcccgcgactacgccaccttccgggatgctagctcggaggatgacgctaccgtcgtgcacctggcgcgcatggtggaggcgtacgacgcggctcgtatcgacttccaccagatggtacaccgtgggatggtcgagaacaacttgaagatcctggagctgcgtcaggagaacctgcagctcaagaaggacctagacgcggtggaggtgcagctgcatcagctcaagatcgcccagggagaggtctgccgccccaagcgtcgccgtgtctgccgcagccagaagatcaccgcccgcaagagcacctccaggcccgagcttgttcgtcagtccctggcgtggacttgcttcgtcgagacccctcgtgccgagcccgcgcccgtggttccccaggagggggaagcctccggcgttggtagcacggaggatgcgctgttgctcaccttccgtcctggcccgtcgcagcggagaaatgctgccaccggtgatggcaaccaacctgaaggcagcaaccacaaccacccgggcaacccacctccacctcctcctccgcctccaccaccaccaccagataccaatgccattctcacccaaatcctcgcccagcaggccaacatgatgactgctttcctccaccacctccaaaatccaccacaacagaatgctccaccaccacccccacaacactctaaactcgccgagttcctccgcatccgtccacccaccttctctagctccaacaaccccgtggatgcgttggattggttgcatgccgtggggaaaaagctagacacggggcccgcatctctatggtgggaccatttccaagctacgcagccagaggggcaacctattacttgggcccgcttcaccgccgctttccggaggacccatgtgcccgctggagtcgtggctcttaagaaaagggaattccgagagttgaagcaaggcaaccgctccgtgatggagtatttgcatgagttcaacaatctggcccgttacgccccggaggatgtgcgggaagatgaggagaagcaagagaagttcttggcaggaatggaccccgagctgtccgtccgtctagtctctggggactatccggattttcaacgattggtggacaagagcatccgcttggaggccaagcacaaggaactggagtcgcacaagcgccgcttggcgaatttccgcaatcagcagggtgctaaccaaagggtccgctacaccaatccctatccagggggatcctcctcgcagcagcaacaacagcagcagcaacctcgctccgcgcctcgacctcaattcgtggtgcgcgtcccacagccgcagcagcagcagaatcagcaagggactcgtgcgccccgtcctcctacgccgactgtgcagcccggtcaaggccgcagggacgctcaag

SEQ ID NO: 5234 - DNA, 343 bp, Oryza sativa
  Clone ID: PAT_MRT4530_12041C.1
aaacgggcagcatggcccggcacagcccaaactcagccgtgtctaggccgagggtagtcgggctggcacagcccgaccaacacaccaggccatgccgtgccagcccacgggccgcacacatgccccaggcgcggcccaacacgactcgggccgtgccgggccggcccaacctggcctgctagcccaacgtgctggtcgcgggaggcccaggcacagcccggcggtcgggccgggccggcacaggtccgacccaagtcagggcgtgccatgcttgggtcgggccaaaatatcgtgccgtgggccgggcctttgggctttgggccttatggccatctataacccc

SEQ ID NO: 5235 - DNA, 1188 bp, Oryza sativa
  Clone ID: PAT_MRT4530_12042C.1
atggtgcgcgccatcgggcccctgctcctgctcgcccacgtgctcgtgttcgtggtgtccattgcggcggcggcggcgcccgtgcgacggccacgctgcgacgccggcgaccgcgccgcgctactcgccgtgaaggcggccttcaacaacgcgtcctacttccagtcctggacgcccgacatcgcctgctgccactggtacggcgtcgactgcggcggcgacgactacgactacgaccccaccgacggcgaccgcgtcctcagcctcgccatcatacgcgatgacaacgtcaccggcggcataccaggcgacgccatcgcccgcctcacccgcctccaggagctcatgttcttcaaggtccccggcgtcaccggccccatccccgccgcgctcgccacgctcaccgccctcagggagctcaccatctcccgcaccgccctctccggctccatcccttccttcatcggcgacaagttcaccgcgctccagtctctcgacctctccttcaactcgctcaccggcgccatcccggcgagcctcgccaagcccccgaagctcatctccatcgacctcagccgcaaccagctcaccgggagcatcccgcggctgctgctgagcaaggccgggcagcaagcgttcctgacgctgtcacacaacaacctgtccgggaggatcccggcggcgttcggcgccgtcaacttcgtgcagatcgacctgtcgcgaaaccagctcaccggcgacgcgtcgatgctgttcgggtcggggaagaaggagctcggcagcgtctacctgtcgcgcaacgcgctgagcttcgacatgtcggagctgcggctgccggagcggctgagcttcctggacgtgagccacaacgccatccgcggcggcatcccggcgcaggtggcgaatctgagcaacctgcagctgctcaacgtcagctacaacaggatgtgcggcgagggcggcaaccacctctcccggagcatcagcatcccggcggagttcgccgccgtcaacttggcgcgcatcgacctgtcagctcaccggcggcgctgttcgatcgggcgagggaaggccgcgcaggccatcgacgtgtcgcgcaacgcgttggagttggagttggagctgccggagcaggtggtcaccgtggacgtgagccacaacatgcatcatctacggcgacgaagctga

SEQ ID NO: 5236 - DNA, 1357 bp, Oryza sativa
  Clone ID: PAT_MRT4530_12043C.1
gcgcgcgcgggcggggaggggagagagagggggtttggggagggaggcgcggcgcatgcgcgcggttcgcggaggacgcggtgcggtgggcccacgcgcagcctcacggctcgcggtggaccgcgcgcgcgagggggcagagggaagcggcggaccggggtctgcttgacccggtcgcggccaaggtggcgccgacgtggcgcctacgtggctgccacgcgggtcggcgggaggtagacgacgacgccggccggaacggacggcggacgacagcggcgagcggcggagcgaaccacggcgatacaggcgaaagcgagcacaccgggaagttgcacaggacgaggggagacgagccaacggctcggattcgccgggggatgctcgacggcggtggattgcggtggcggcaaccggcggcgggagaagggggaaacggcgatggcgcgacgggagaccgattcgggtgagctagagcatctacgcgactccgggagtccgttgctagcgtcggattgggcggagctacgccgagcgaggccggcgacgagcgggtgctacggagcacgggcggcgacggcggcaacggtcggggcggcgccagctagctacggggaggctactcgtgctactacccgagtctaaggggaggagatggaacgaggagggagaacggagggaggcactaccgtgcggggaatgcaccggctctcccggtgcttggcgatgaacggcggaggcgagacagaggggcggcaatggcgcggtggcggcaagcgaaacgggaggaggaatcgatgggagggcgccttggtttataggacgacgatgtcggtttggaaaccgaccttgggcggtcaaggcgcgagctggcgctcggagctcgcggccaaaacggcgacagaggcggaggatgacgccggcgggaggaaaaagggaaaaagagggagagaaaaggaggagggagagagggcgatgcggcagagggggggaagctctgcctccatcccttggaagcacgcgcgaggaggggcggggccaaggcgatgacgacgacgatgacggccgggcgatttggagcggggcgacgacacgggcggcaggcgcggcaggcgctgacggcggcggcgactggccggtcggccaccatggcgcgcgcgcgcgggaagcaacgggcggcgcggcggttctggcgacgtcggcgggaaacgacagcgagggcggagggcgctcggctcggcgcggctcacgcgcacgcgtgcgcagcgcacgggcagagcgagagagagagagagagccggggagggaggggaagatgggccgagagggattcggcccatcgaacccgagggaggcgaaa

SEQ ID NO: 5237 - DNA, 6024 bp, Oryza sativa
  Clone ID: PAT_MRT4530_12044C.1
atggagcccgagatttccgcggccgattccttcccctccggccgccctctctcactcccgacgctatttaaacgctccccgtgcctctctcctccgtttccgccactcgccgcactctctccccgtcggattcgagctcgcgccgtcgtcctctctctccgccgtcggcgccgagctccggttcgccgccgtcgtcgccccgtacctcctcccgcttcggcatcgcctccttcggcttcgccgcgttctcgtcgacctcgtccactcctccgtttcgcccgccaaccgccggagcaccgccgtcctcgtcgacccgagccgcgccgccgcctctctccgctttggtcgccgttcccgtcatcgccgtcgacccggggtgagccgaggaccgccatttcgtttcccccttccctcccctctctcggccgccgctccgcgtgcctatggccgccgccggcgaccataggggcgcgggcgcgccgcctcccgtcggccgtgccggcgaggccgccttcgggcgcgccccgcggctgccaggtggggcccggccgtcagccgcccgcgcctgcgggtacggctgacgcgtgggacccacggcgccagccggcgtcagccgcgtgcgcccggtccaccgtggacccacctcggccatataaggaccggtcttcgggcctctgttgcaaagcactaccgtactttcacatgtctagtggggcaaatgaaggctacacgagctgcggcccggtagtcgagatgtcatggcacagggccggtgtcctgctgctaggggctcagtcctgcctgcatgtcccgggggttccggccgtaggtgggattgggtcggtactcttgtctatggctaggatgggttggaaactatgtcacgtctttcgtctgtataccgtggtgatggccggcagcgtcacccgtcgcggtttggacatgactggtttcgtcttggagctgcggggcatgtgcgttgtcctggggtatccacatggagtggactaccagggcaggccgcttccggagcaggagggtgacgatggagagccccacgctgcttgggaggtcactgcagtgatcctcgctggctctcccgagcggacttcgctggcagtcaccgcgggtggagattctttccccgccgctagccagagcgccgctctcctcgccatcggcactcttcaccagcgctacccggacgagttgcagcactcgccctaccgctaccaccctcgccgcggaggagcccgcgactacgccaccttccgggatgctagctcggaggatgacgctaccatcgtgcacctggcgcgcatggtggaggcgtacgacgcggctcgtatcgacttccatcagatggtgcgccgtgggatggtcgagaacaacttgaagatcctggagctgcgtcaggagaacctgcagctcaagaaggacctagacgcggtggaggcgcagctgcatcagctcaagatcgcccagggagaggtctgccgccccaagcgtcgccgcgtctgccgcagccagaagatcaccgcccgcaagagcacctccaggcccgagcttgttcgtcagtccctggcgtggacttgcttcgtcgagacccctcgtgccgagcctgcgcccgtggttccccaggagggggaagcctccggcgttggtagcacggaggatgcgctgttgctcaccttccgtcctggcccgtcgcagcggaggagtgctaacaccggtgatggcaaccagcctgaaggaagcaaccaccaccaccagggcagcccacctccacctcctcctccgcctccaccaccaccaccagataccaacgccattctcacccaaatcctcgcccagcaggccaacatgatgactgctttcctccaccacctccaaaatccgccacaacataatgctccaccaccacccccacaacactctaaactcgccgagttcctccgcatccgcccacctaccttctctagctccaataaccccgtggatgcgttggattggttgcatgccgtggggaaaaagctagacactgtgcagtgcagcgatgaggagaaagtcatcttcgccgcccaccagctgcaggggcccgcatctctatggtgggaccatttccaggctacgcagccagaggggcaacctattacatgggcccgtttcaccgccgctttccggagaacccatgtgcccgccggagtcgtggcccttaagaaaagggaattccgagagttgaagcaaggcaaccgctccgtgatggagtatttgcatgagttcaacaacctggcccgttacgccccggaggatgtgcgggaagatgaggagaagcaagagaagttcttggcaggaatggaccctgagctgtccgtccgtctagtctccggggactatccggatttccaacgtctggtggacaaaagcatccgcttggaagccaagcacaaggaactggagtcgcacaagcgccgcttggcgaatttccgcaatcaacagggtgctaaccaaaggatccgctacaccaatccctatccagggggatcttcctcgcagcagcaacaacagcagcagcaacctcgcttcgcgcctcgacctcaattcgtggtgcgcgtcccacagccgcagcagcagcagaatcaacaagggactcgtgcgccccgtcctcctacgccaactgtgcaacctggtcaaggccgcagggacgctcaaggtccgcaacgtctgtgcttcaactgcttcgagcccgggcactttgcggataaatgcccaaagctgaggcgtcagcaaggccaagcgccttcccgctccaacaacggtgagaaggatgtcatttggggtcgggtgaaccacgtgacagccgaggacgtgctgacaactccagacgtcatcgtcggtacgttcctcattcattccatccctgctaccattctgttcgactctggagcttcccactcgtttatatctgtgccattcgtggggagaaatcagttgggggtagaaaggcttaggaaccctctgctcatcaccacccctggaggggttatgacagcaaagtactatagccctgccgtccctatagaaattcaggggattccttttccctcggatctgattctgctagacaccaagaacttggatgtgatccttgggatgaattggttggctcaattccaaggagtagtggattgtgcgagacgcactgtcactctgtaccgagggccggaacaaccggttgttttctttgcacccccaacctctgtcagtagttccgaacttcaccagatagaactgttagaaatccccatcgtcagggagttcggagacgtgtttccggaagaactacccggtatgccgcccaaacgagagattgagttccggatagatcttgctccaggaaccactcctctgtacaagcgaccctaccgtacggcagcaaatgaactggccgaagtcaagaaacagttggaagagttgaaagaaaaggggtatatacgtccgagtacttccccctggggtgctcctgtgatttttgtggagaagaaagacaagacgaagaggatgtgcgttgactacagagctctcaatgaacttaaaggtgctactgtattctccaagatcgatcttcgttccggatatcaccaattacgtattcgtgaagaagacattccgaagaccgcattcaccacgcgatacggactgtatgaattcacggtgatgtcgttcggtttaaccaatgcacctgcctttttcatgaacttaatgaacaaagtgttcatggaatacttggataagtttgttgtggttttcattgatgacattctggtatactcacaatccgaggaagaccatcagcaccatctccgtctggtattgggaaagttgcgggaacatcaattgtatgccaaacttagcaagtgtgagttctggttgtccgaagtcaaattcttagggcacgtgatatctgctaaaggagttgctgtggaccccgaaacagtgaccgccgtcactgattggaagcaacccaagacagtcactcaagtccgcagtttcttaggtttggcaggatactaccgaaggtttatcgagaacttctccaaaatcgctcgacccatgacacagttgttgaagaaagaagagaaatttgtgtggagcccgcaatgcgagaaggcgtttaaaactctcaaagaaaagctggtttcctcgccagtgttaatcttgccggatactcgcaaggatttcatggatggtcatgtggtggcctacgcctcacgccagctacggcctcatgaaggcaactaccctacccatgatttggagttagctgcggtggttcatgctctaaaaatctggcggcactatctcattgggaatcgctgtgaaatatatactgatcataagagtttgaaatacatcttcactcagtccgacctgaatcttcggcaaaggagatggttagaactcatcaaggattatgatgtgggaattcactatcatcctggtaaggccaacgtggtcgccgacgctctaagtcgagaaagccattgcaacactcttaacgttcgtggcattccacccgaacttagtcaacagatggaagccctgaacctaagcatagttggtcgcggattcttggctgcgttggaagccaagcctaccttgctcgatcaaatccgcgaggctcagaagaacgatccggacatgcatggactcctcaagaatatgaaacagggtaaagccgctggtttcacagaggatgaacacggaaccctatggaacggaaatcgagtatgcgttccagataacagagaacttaaacagctgatacttcaggaagctcacgaaagtccttattccatccaccctggcagtacgaagatgtacttagacttgaaggagaaatactggtgggttagtatgaagcgggaaattgcagagttcgtggccctttgtgatgtgtgccagcgtgtcaaggcagagcaccaacgaccggccggacttctccaacctctccaagtacctgaatggaaatgggatgaaattgggatggatttcatcaccggacttccaaagacccaaggtggatatgattctatatgggtagttgtggatcgattaaccaaggtagctcgattcattcctgtgaagaccacctatggagggaacaaactagccgagctctacttcgctaggatcgtgagtctccatggcgttcccaagaaaatcgtatctgacaggggaagccaattcacctctcacttttggaagaagctccaagaagagctgggtacccgattaaacttcagcaccgcataccacccgcagacagatgggcagaccgagcgtctgaatcagatcctagaagatatgcttcgcgcatgtgtcctggatttcgggaagacctgggataagagtctcccctatgccgagttctcctacaataacagctatcaagccagcatacaaatggcaccttatgaagcgttgtatgggcgcaaatgccggacaccgctcttgtgggatcaagttggggaaagccaagtgttcgggactgatatcctgagagaagctgaagctaaagtcagaaccattcgagataatctaaaggtggcacagtcccggtttcggacaaaagggaagctcgcacctcggtatgtgggtcctttccgtatcgttgcccgacgcggagaagtcgcttaccaattggagctgcccgcctccttgggcaacgtgcatgatgtgttccatgtgtcgcaactcaagaaatgccttcgagtgccatccgagcagactgacccagagcaaattgaagttcgcgaagacttgacctacgtggagaggccagtgaaaatcctggacaccatggagcgcaggaccaggaaccgggtaatccgtttttgcaaggtccagtggagcaaccacgccgaagaagaagctacctgggagcgtgaagacgagctgaaggcagcccatcctgatctcttcgccagttcttccgaatctcggggtcgagattccgtttaa

SEQ ID NO: 5238 - DNA, 1346 bp, Oryza sativa
  Clone ID: PAT_MRT4530_12045C.1
atgcgcgcggttcgcggaggacgcggtgcggcgggcccacgcgcagcctcacggctcgcggtggaccgcgcgcgcgaggggcggagggaagcggcggaccggggtctacttgacctggtcgcggccgaggtggcgccgacgtggcgcctacgtggctgccacgcgggccggcgggaggtagacgacgacgccggccggaacggacggcggtcgacagcggcgagcggcggagcaaaccatggcgatacaggcgaaggcgagcacaccgggatgttgcgcaggacgaggggagacgagccaatggctcggattcgccgggggatgctcgacggcggcggattgcggcggcggcaaccggcggagagaaaagggggaaacgacgacgaggtcacgaggggccgattcccggcggtgggagcatctaagcggctacgggaatctaccccttgcgccggattaggaggaatcgcatcgagggaggcccgcgacgagaggcgcttccgagctcgggcggcgacggcggcgagcacacggcgagcgacggcactgtgacgagaggccgacggcacaggagtgatctctccggcctcgggccggggaagaggaagaaggcaagcgcccggagtccccttccgcgtccacgaacacaccggctctcccggtgcttggcgatgaacggcggaggcgagacagaggggcggcaatggcgcggtggcagcgagcgaaacgggaggaggaatcgatgggagggcgccttggtttataggacgacgatgtcggtttggaaaccgaccttgggcggtcaaggcgcgagctggcgctcagcgctcgcggccaaaacggcgacagaggcggatgacgccggcggggaggggaaaaggaaaaaggaagggagaaagggggcttgccccttgccactttgggaaaaggaggaggggatgggggcgacgcggcagagggaggaggagctctgcctccgtcccttggaggctagcgcgaggagaggggaaggccgagtcgatgacgacggcgatgacggcggggcggtttggagcggagcgacgacacgggcggcaggcgcgggcaggcgctgacggcggcggcgaccaggcggtcggccaccatggcgcgcgcgcacgcgggaagcaacgggcggcgcggcgagaagcggcagcgagggcggagggcgctcggctcggcgcggctcacgcgcacgcgtgcgcagcgcacgagcagagcgggggagagggagagagagagagagccggggagggagggggagatgggccgagaggagttcggcccatcgaacccgagggaggcaaaatagacttttgcggagggat

SEQ ID NO: 5239 - DNA, 5274 bp, Oryza sativa
  Clone ID: PAT_MRT4530_12046C.1
atgtcatggcacagggccggtgtcctgctgctaggggctcagtcctgtctgcctgtcccgggggttccggccgtaggtgggattgggtcggtactcttgtctatggctaggatgggttggaaactatgtcacgtcttccgtctgtataccgtggtgatggccggcagcgtcagccgccgtggtttggacatgactggtttcgtcttggagctgcggggcatgtgcgttgtcctggggtatccacatggagtggactaccagcgcaggccgcttccggagcaggagggtgacgatgcagagcccctcgccgcttgggaggtcactgcagtgatcctcgctggctctcccgagcggacttcgttggcagtcaccgcgggtggagattctttccccgctgcttgccagagcgccgctctcctcgccatcggcactcttcaccagcgctacccggacgagttgcagcactcgccctaccgctaccaccctcgccgcggaggagcccgcgacttcgccaccttccgggatgctagctcggaggatgacgctaccatcatgcacctggcgcgcatggtggaggcgtacgacgcggctcgtatcgacttccatcagatggtgcgccgtgggatggtcgagaacaacatgaagatcctggagctgcgtcaggagaacctgcagctcaagaaggacctagacgcggtggaggcgcagctgcatcagctcaagatcgcccagggagaggtctgctgccccaagcgccgccgcgtctgccgcagccagaagatcaccgctcgcaagagcacctccaggcccgagcttattcgtcagtccctggcgtggacctgcttcatggagacccctcgtgccgagcccacgctcgtggttccccaggagggggaagcctccggcgttggtagcacggaggatgcgctgttgctcaccttccgccctggcccgtcgcagcggagaagtgctaataccggtgatggcaaccaacctgaaggcagcaaccacaaccaccagggcagcccacctccacctcctcctccgcctccaccaccaccaccagacaccaacgccattctcacccaaatcctcgcccagcaggccaacatgatgactgctttcctccaccacctccaaaatccgccacaacataatgctccaccaccacccccacaacactctaaactcgccgagttcctccgcatccgcccacctaccttctctagctccaacaaccccgtggatgcgttggattggttgcatgccgtggggaaaaagctagacactgtgcagtgcagcgatgaggagaaagtcatcttcgccgcccaccagctgcaggggcccgcatctctatggtgggaccatttccaggctacgcagccagaggggcagcctattacttgggcccgtttcaccgccgctttccggaggacccatgtgcccgccggagtcgtggcccttaagaaaagagaattccgagagttgaagcaaggcaaccgctccgtgatggagtatttgcatgagttcaacaacctggcccgttacgccccggaggatgtgcgggaagatgaggagaagcaagagaagttcttggcaggaattgaccctgagctgtccgtccgtctagtctccggggactatccggatttccaacgtctggtggacaagagcctccgcttggaagccaagcacaaggaactggagtcgcacaagcgccgcttggcgaatttccgcaatcaacagggcgctaaccaaaggcagcaacaacagcagccgcaacctcgctctgcgccccgacctcaattcgtggtgcgcgtcccacagccgcaacaacagcagagtcagcaagggactcgtgtgccccgtcctcctatgccagacgggcagcctagtcaaggccacagggacgctcaaggtccgcagcgtctgtgcttcaactgcttcgagccagggcactttgcggataaatgcccgaagccaaggcgtcagcaaggccaagcgcctccccgctccaacaacggtgggaaggatgtcattcggggtcgtgtgaaccacgtgacggccgaggacgtgctgacaactccagacgtcatcgttggtacgttcctcatacattccatccctgctactattttgttcgactctggagcttcccactcgtttatatctgtgccatttgtggggagaaatcaattgggggtagaaaggcttaggaaccctctgctcatcaccacccctggaggggttatgacagcaaagtattatagccccgccgtccctatagaaattcaggggattccttttccctcggatctgattctgctagacaccaagaacttggatgtgatccttgggatgaattggttggctcaattccaaggagtagtggattgcgcgagacgcactgtcactctgtaccgagggccggaacaaccggttgttttctttgcacccccaacctctgtcagtagctcagaactttatcagataggactgtcagaaatccccatcgtcagggagttcggagatgtgtttccggaagaactacccggtatgccgcccaagcgagagattgagttccggatagatcttgctccaggaactactcctctatacaagcgaccctaccgtatggcagcaaatgaattggccgaagtcaagaaacagttggaagagttgaaagaaaaggggtatatacatccgagtacttccccctggggtgctcctgtgatttttgtggagaagaaagacaagacgaagaggatgtgcgttgactacagagctctcaatgaagttaccatcaaaaacaagtaccctcttccccggatcgatgatctgttcgatcagcttaaaggtgccactgtattctccaagatcgatcttcgttccggatatcaccaattacgtattcatgaagaagatattctgaagaccgcattcaccacgcgatacggactgtatgaattcacggtgatgtcgttcggtttaaccaatgcacctgccttcttcatgaacttaatgaacaaagtgttcatggaatacttggataagtttgttgtggtgttcattgatgacattctgatatactcacaatcagaggaagaccatcagcaccatctccgtctggtgttgggaaagttgcgggaacatcaattgtatgccaaacttagcaagtgtgagttctggttgtccgaagtcaaattcttagggcacgtgatatctgctaaaggagttgctgtggaccccgaaacagtgaccgccgtcactgattggaagcaacccaagacagtcactcaagtccgcagtttcttaggtttggcaggatactaccggaggttcatcgagaacttctccaaaatcgctcgacccatgacacagttgttgaagaaagaagagaaatttgtgtggagcccgcaatgcgagaaggcgtttcaaactctcaaagaaaagctggtttcctcgccagtgttagtcttgccagatactcgcaaggatttcatggtgtattgtgacttcgcgccaaggattgggctacggcctcatgacggcaactaccctacccatgatttggagttagccgcggtggttcacgctctaaaaatctggcggcactatctcattgggaatcgctgtgaaatatatactgatcataagagtttgaaatacatcttcacccagtcggatctgaatcttcggcaaaggagatggttagaactcgtcaaggattacgatgtgggaattcactatcatcctggtaaggccaacgtggtcgccgacactctaagtcgaaaaagccattgcaacactcttaacgtccgtggcattccacccgaacttaacaaacagatggaagccctgaacctaagcatagttggtcgcggattcttggctgcgttggaagccaagcctaccttgctcgatcaaatccgcgaggctcagaggaatgatccggacatgcatggactcctcaagaatatgaaacagggtaaagtcgctggtttcacagaggatgaacacggaaccctatggaacggaaatcgggtatgcgttccagataatagagaacttaaacagctgatacttcaggaagctcacaaaagtccttattccatccaccctggcagtacgaagatgtacttagacttgaaggagaaatactgcgtgtcaaggcagagcaccaacgaccggccggacttctccaacctctccaagtaccagaatggaaatgagatgaaattgggatggatttcatcaccggacttccaaaaacccaaggtagctcgatttattcctgtgaagaccacctatggagggaacaaactagccgagctctacttcgctaggatcgtgagtctccatggcgttcccaagaaaatcgtatcggataggggaagccagttcacctctcacttttggaagaagctccaagaagagctgggtactcgattaaatttcagcaccgcgtatcacccgcagacagatggacagaccgagcgtctaaatcagatcctagaagatatgcttcgcgcatgtgtcctagatttcgggaagacctgggataagagtttcccctatgccgagttctcctacaataacagctaccaagccagtatacaaatggcaccttatgaagcgttgtatgggcgcaagtgccggacaccgctattgtgggaccaagttggggaaagccaagtgttcgggattgatatcctgagagaagctgaagctaaagtcagagccattcgggataatctaaaggtggcccagtcccggcagaaaagttatgcagataaccgtcgccgtgacctggaattcgcagttgacgattttgtataccttcgggtcacgccattgcggggtgtacaaaggtttcggacaaaagggaagctcgcacctcggttcgtggatcctttccgtatcattgctcggcgcggagaagtcgcttaccagttggagctgcccgcctccttgggcaacgtgcatgatgtgttccatgtgtcgcaactcaagaaatgccttcgagtgccatccgagcaggctgactcagagcaaattgaagttcgtgaagacttgacctacgtggagaggccagtgaaaatcctggacaccatggagcgcaggaccaggaaccgggtaatccgtttttgcaaggtccagtggagcaaccacgccgaagaagaagctacctgggagcgtgaagacgagctgaaggcagcccatcccgatctcttcgccagttcctccgaatctcggggtcgagattccgtttaa

SEQ ID NO: 5240 - DNA, 813 bp, Oryza sativa
  Clone ID: PAT_MRT4530_12047C.1
atttctactactgtaaaagcaaacgctaaatttaatcatgtttattagattagataaaacatgttaatgtatgcgcaagaggttcagaacagcactagcacattcccttctatccaacgttcacccctagtcatataaaatcctataaacctcacgtcggtactgttcactattcattcgcccacgcggccacgtcgccccaacaatcagcaccgtccgatctcctgcccagccacgcgcttgcatcgtatcgggccaggccgattgagcccaccacccagtcactcacgacaggaagaggaggaccagccacgaacctgccgattccccattctctcgagtcttgaccgcgtcgtcacctacgacgccgccgccgttccccttttgtctcgagctcggccacgcagctcccgttgctcgccgtcgtcgcttcccggcgaggccatccacggccgccgtcgcttctccccggagaccaccaccgtctttccacccccgcgcggcaccccgtctcaccctctccctctagggttttctcggcctcgaatcgctctgtaagcccctcggcgacttctctggttgttttgcttggatctccagctcacgggagcgctgctttgattgaatcgcccccagtgcgtccctcctcacaccacggcaccttcgcctgcagtgcacaaggccgacctgctcaggcgcgctacccaggcgaccatgcctatgcccctgtgcttgtattatctccaccaaggaggccgttgcatcccagatctccctatcggccaggctcgggaggatgctacatcgagccat

SEQ ID NO: 5241 - DNA, 1217 bp, Oryza sativa
  Clone ID: PAT_MRT4530_12048C.1
gcgagcgcgagggggcggagggaagcggcagaccggggtctgcttgacccggtcgcggccgaggtggcgccgacgtggcgcctacgtggctgccacgcgggccggcgggaggtagacgacgacgccggccggaacggacggcggacgacagcggcggagtgaaccatggcgatacaggcgaaggcgagcacaccaggatgttgcataggacgaggggagacgagccaatggctcggattcgccgggggatgctcgacggcggcagattgcggcggcggcaaccgacggcgggagaagggggaaacggcgatgaggtcacgaggggccgattcccggcggcgagagcatctacgcggctacgggaacccaccccttgcgccggattaggaggaatcgcatcgaggaaggacggcgacgagaggcgcttccgagctcgggcggcgacggcggcgaggacacggcgagcgacagcagcaaggaagaagacgagcgcccggagtccccttccgcgtcctaacgcgcaccggctcctccggcacacgcgacggcggcggccggcaagagagacagcaatggcgcgggcgagaaacggggaagattgggaggggaaagaggaagggaggcgcttgggtttatagggcggcgatgttggtttggaaccgaccttgggcggtcaagggagcgagatggcgctcggcgctcgcggccaaaacggcgacaggaggggggaggatgacgccggcgggagggaaaagggaaaaagggggagagaaagagggcttgcctccttgccgctttggggaaaaggaggagggagagagggcgactcggcagaggggggggagctctgcctccgtcccttggaggcacgcgcggggagaggcggggccgagtcgatgatgacggtgatgacggcggggcggtttggagtggagcggcgacacgggtggcagacgcggggcaggcgcggcaggcgctgacggcggcggcgactggccggtcggccaccacggcgcgcgcgcgcgcgcgggcggcgcggcgatttgggcggcatcggagggaacggccgcgagagtggagagggagagctcgacgcggcttacgggctaagcggggagagagagagagagagagccggggagggagggggagatgggccgagagggattcggcccatcgaactcgagggaggctaaatagacttttgcggagggatt

SEQ ID NO: 5242 - DNA, 2754 bp, Oryza sativa
  Clone ID: PAT_MRT4530_12049C.1
atggacatctctaggacaaatgaaggctacacgagctatggcccggtagtcgagatgtcatggcacagggccggtgtcctgctgctaggggctcagtcctgtctacctgtcccgggggttccggccatggccggcagcatcaactgtcgtggtctggacctgactggcttcgttttggagctgcggggcatgtgcgttgtcctggggtatccgcatggagtggactaccagggcaagcagctcccggagcaggagggtgacgatgcagagccccacgctgcttgggaggttactgcagtgatcctcactggctcacccgagaggacttcgttggcagtcaccgcgggagcccgtgactacgccaccttccgggatgctggctcggaggatgactctacaatcatgcacctggcgcgcatggtggaggcgtacgacgcggcccgtatcgacttccatcagatggtgcgtcgcgggttggtcgagaacaacatgaagatcctggagctgcgtcaggagaatctgcagttgaagaaggacctagacgcagtggaggcgcagctgcgtcagctcaaggtcgcccagggagaggtctgccgtcccaagcgccgccgcgtctgccgcagccagaagatcaccgcccgcaagagtacctccaggcccgagcttgttcgtcagtccctagcgtggacctgcttcgtcgagacccctcgtgccgagcccgtgctcgtgatggtgacgaccaggagaagtgctgctaccggtgaaggcagtcaccccgaaggcagcaaccacaacaaccatggcagcctacctccacctcctcccccgcctccaccaccaccaccagacaccaacgccattctcacccaaatcctcgcccagcaggccaacatgatggctgctttcctccaccacatccaaaatccgccacaacataatgctccaccaccgcccccacaacactctaaactcgccgagttcctccgcatccgtccacctaccttctctagctccaataaccccgtggatgcgttggattggttgcatgccgtggggaaaaagttagacaccgtgcagtgcagcgatgaggagaaagtcatcttcaccgcccaccaactgcaggggcccgcatctctatggtgggaccatttccaggctacgcagccagaagggcagcctactacttgggcccgcttcaccgccgctttctggagaacccatgtgcccgccggagtcatggcccttaagaaaagggaattccgagagttgaaacaaggcaactgctctgtgatggagtatttgcatgagtttaacaacctggcccgatacgccccggaggatgtacgggaagatgaggagaagcaagagaagttcttggcaggaatggaccctgagctgtccgtgcgtctggtctccggggactatccggatttccaacatctggtggacaagagcatccgcttggaagccaagcacaaggaacgggagtcgcacaagcgtcgtttggcgaatttccgcaaccaacagggggctaaccaaaggcagcaacagcagcagcaacctcgctccgcgccccgacctcaattcgtggtgcgcgtcccacagccgcagcaacagcagagtcaacaagggactcgtgcgccccgtcctcctacgccagccgtgcagcctagtcaaggccgcagggacgttcaaggtcagcagcgtctgtgcttcaactgcttcgagcctgggcactttgcggataaatgcccaaagccgaggcgccagcaaggccaagcgcctccccactccaacaatggtggtaaggatgtcattcggggtcgggtgaaccacgtgacggccgaggatgtgctgacaactccagacgtcatcgttggtacgttcctcattcattccatccctgctaccattttgttcgactctggagcttcccactcatttatatatgtgccattcgtggggagaaatcagttgggggtagaaaggcttaggaaccctctgctcatcaccacccctggaggggttatgacagcaaagtattatagccctgtcgttcctatagaaattcagggaattccttttccctcggatctgattcttttagacaccaagaacttggatgtgatccttgggatgaattggttagctcaattccaaggagtagtggattgtgcaagacgcactgtcactctgtaccgagggccggaacaaccggttgttttctttgctcccccaacctctgtcggtagttcagaacttcatcagataggactgtcagaaatccccatcgtcagagggttcggagacgtgtttccggaagaactacccggtatgccaccgaagcgagagattgagttccggatagatcttgctccaggaaccactccccagtacaagcgaccctaccgtatggcagcaaatgaactggccaaagtcaagaaacagttggaagagttgaaagaaaaggggtatatacggccgagtacttccccctggggtgctcctgtgatttttgtggagaagaaagacaagacgaagaggatgtgcattgactacagagctctcaatgaagttaccatcaaaaacaagtaccctcttccccggatcgatgatctgttcgatcagcttaaaggtgccattgtattctccaagattgatcttcgttctggatatcacaattacgtattcgtgaagaagatatccctaagaccgcattcaccacgcgatacggactgtatgaattcacggtga

SEQ ID NO: 5243 - DNA, 2088 bp, Oryza sativa
  Clone ID: PAT_MRT4530_1204C.1
atggaggcgagcggcgaggagctcctgaagaagatccgggagctggaggtggggcaagcgcagctcaagcaggagatgtccaagctcggcggcgccgccgccgccgcggagcggaggcggttcgcagtcggtctcgccgcggcgcgccaggcgccgccgccgccgcaccagccgccgctgccggcgaggcggctctccggggggaatcgatctgcagagaaactgtatggttatccagcatcagaagcacttggtcaggatggcctcatgctgctgattgattcctgtgatatccacgtgatcaatgatatattgcgacagatatctctggacgagaaagggacctgaaagttttcaaatgggaacagagctggtggtagtgttgcagatgttgccaccaacactccgtttttgcatggggatggcagtttcttcaccatttctgcccacttatttgatttcggcataaaaaatgatccaatctgtgggttgttaagcactgcaatgtcaaatttgcagattttggtctttcacgtctcaagcgtgaaacattcctgacaacaaaaactggaaaaggaacacagaagcccatttgactctcagcaacctttgcagtctactatagcctccaagataacaaatttggctacgaaggtcacaaataaagttcgttctagagtcagggcagatgaaaatggcattgagcgggaaggtggtagcggtgagagtcattgttctgatcgtgatgccaaggaggagccaacgtctagtggaacaactacgccaagaggggacgcaccacgcggagcctttgctacagaagagagttcccctgggaaaactgccaaaatgaacagtgatgaatcagaaggaaaagtagggttccacaggatcttgagttcaaaggcagaggcactgctgaacaagaaagggatatcatggccttggaaggggcgggataacgatggacctgatgtgaagaaccaagcaacctggccgtggttgcatggggagcaagatggcagccagaatcatcagaaaatttctgattctgccataactcaagatggtcaaggtgctgaatataaccaacctaacaaaaatgaggcatcaggttcctggtcctctttcaacaataacagcacaagcagtgcaagcagcacgggtagtactaatagtagtgctctttacaaagtagatcatgaagcagattgtttggattatgaaatcctgtgggaagaccttgtcattggagaacaaattggtcaaggctcgtgtggaacagtatatcatgctttgtggtatggctcggatgtggctgttaaagttttctctaagcaagaatattcagaagaagtgatacagaccttccgacaagaggtatcccttatgaagaaactacgccatcctaatatacttctcttcatgggtgcggttacatctccacaacgcctctgtatcgtaacagagttcctcccacgtggaagtttgtttcgcttacttcaaaggaacaataccaagttggattggagacgacgtgttcacatggctttagatattgcaagggggatgaactatcttcaccatttcagcccacttattattcatcgggatttaaaatcatccaatcttttggttgataagaactggactgtcaaggttgcagattttggtctttcacgtctcaagcgtgaaacattcctgacaacaaaaactggaaaaggaacaccacaatggatggctccagaggtgttgcgcaatgagccttctgacgagaagtctgatgtttatagttatggggtcatcctgtgggagcttgttactcagaagataccctgggaaaatcttaattcgatgcaggtcattggtgcagttggtttcatgaaccacaggttggagattcctagtgaaacagatcctcagtggacatcacttatcctgagttgttgggaaactgactcacaactccgtccatcgttccaacaacttctggagagacttcgagagctgcaaaggcagtacaatgtccagactcagatgcagcgaaatgcatccgctgctgcaaaaaatagcagcattgaggaatga

SEQ ID NO: 5244 - DNA, 563 bp, Oryza sativa
  Clone ID: PAT_MRT4530_12050C.1
agattttggccagataaatggttagggaacttgcttttcaagataagcatccatccttatatgctattatcagaaggaaaaattcttcaattgctagtgttatgggctctgttccgcttaatgtttcgttcaggagagcattggttggtcataatcttgtatcttggcatgatttgtgtgcttctattgtacatgttcagttgaatcaatcttttgattgttttatttggaaatttaatcagagtggacgattctcggttaggtcgatgcatctagccttgattaataatggcaacattgagagaaacaagataatttgaaagcttaagatgctgcttaagatcaagatctttatgtggtacttgcttaaagtggtagtgctaactaaagataatttgactaaacaaaattggaatgacagtttaagatgctgtttctgtatgaaaaatgagtctatttaacatctatttatgaattgtcatcatgcaaaagatcttctaaaggttgcatgtcgtaaacttgagacgacggttatacaactttttaccaactatggatggaga

SEQ ID NO: 5245 - DNA, 5367 bp, Oryza sativa
  Clone ID: PAT_MRT4530_12051C.1
atgtcatggcacagggccggtgtcctgctgctaggggctcagtcctgcctgcctgtcccgggggttccggccgtaggcgggattgggtctgtactcttgtctatggctaggatgggttggaaactatgtcacgtcttccgtctgtataccgtggtgatggccggcagcgtcacccgtcgtggtttggacatgactggcttcgtcttggagctgcggggcatgtgcgtggtcttggggtatccacatggagtggattaccaggccaggccgctcccggagcaggagggtgaggacgcggagccccacgctggttgggaggtcactgcagtgatcctttctggctctcccgagcggacctcgctggcagtcaccgcgggtggagattccttccccgccgcttgccagaacgccgctctcctcgccatcggtacccttcaccagcgctacccggacgagttgcagcactcgccctaccgctaccaccctcatcgcggaggagcccgcgactacgccaccttccgggatgctagctcggaggatgacgctaccatcgtgcacctggcacgcatggtggaggcgtacgacgcggctcgtatcgacttccatcagatggtgcgccgcgggatggtcgagaacaacttgaagatcctggagctgcgtcaggagaacctgcagcttaagaaggacctagacgcggtggaggcgcagctgcatcagctcaagatcgcccagggagaggactgccgccccaagcgtcgccgcgtctgccgcagccagaagatcaccgcccgcaagagcacctccaggcccgagcttgttcgtcagtccctggcatggacctgcttcgtcgagacccctcatgccgagcctgcgcccgtggttccccaggagggggaagcctccggcgtaggtagcacggaggatgcgctgttgctcaccttccgtcctggcccgtcgcagcggagaaatgttaacaccggtgatggcaatcaacctgaaggcagcaaccacaaccaccagggcaacccacctccacctccccctccgcctccaccaccaccaccagacaccaacgccattctcacccagatcctcgcccagcaggccaacatgatgactgctttcctccaccacctccaaaatccgccacaacagaatgctccaccaccacctccacaacactctaaactcgccgaattcctccgcatccgcccacctaccttctcgagctccaacaaccccgtggatgcgttggattggttgcatgccgtggggaaaaagctagacacggtgcagtgcagcgaagaggagaaagtcatcttcgccgcccaccagctgcaggggcccgcatctctatggtgggaccacttccaggctacgcagccagaggggcaacctatcacttgggctcgcttcaccgctgctttccggagaacccatgtgcccgcgggagtcgtggctcttaagaaaagggaattccgagagttgaagcaaggcaaccgctccgtgatggagtatttgcatgagttcaacaacctggcccgttatgccccggaggatgtgcgggaagatgaggagaagcaagagaagttcttggcaggaatggaccctgagctgtccgttcgtctagtctctggggactacccggacttccaacgtctggtggacaagagcatccgcttggaagccaagcacaaggagctggagtcgcacaagcgccgcttggcgaacttccacaatcaacagggtgctaaccaaagggtccgctacaccaatctctacccagggggatcctcctcacagcagcaacaacagcagcagcaacctcgctccgcgcctcgacctcaattcgtggtgcgcgtcccacagccgcagcagcagcagaatcaacaagggactcgtgcgccccgtcctcctacgccaactgtgcagcctggtcaaggccgcagggacgctcaaggccagcagcgtctgtgcttcaactgcttcgagcctgggcactttgtggataaatgcccaaagccgaggcgtcagcaaggccaagcgcctccccgctccaacaacggtgggaaggacgtcatacgaggtcgtgtgaaccacgtgacggccgaggacgtgctgacaactccagacgtcatcgttggtacgttcctcatccattccatccctgctaccattttgttcgactctggagcttcccactcgtttatatctgtgccattcgtggggagaaatcagttgggggtagaaaggcttagaaaccctctgctaatcaccacccctggaggggttatgacagcaaagtactatagtcctgccgtccctatagaaatccaggggattccttttccctcggacctgattctgctagacaccaagaacttggatgtgatccttggaatgaattggttggctcaattccaaggagtagtggattgcgcgggacgcacggtcactctgtaccgagggccggaacaaccggttgttttctttgcacccccaacctctgtcagaagttcagaagtgcatcagatagggctgtcagaaatccccatagtcagagagttcggagacgtgtttccggaagaactacctggtatgccgcccaagcgagagattgagttccggatagatcttgctccaggaaccactcctctgtacaagcgaccctaccgaatggcagcaaatgaactggccgaagtaaagaaacagttggaagagttgaaggaaaaggggtatatacgtctgagtactttcccatggggtgctcctgtgatttttgtggagaagaaagacaagacgaagaggatgtgcgttgactacagagctctcaatgaagtcaccatcaagaacaagtaccctcttccccggatcgatgatctgttcgatcagcttaaaggtgccactgtattctccaagatcgatcttcgttccggatatcaccaattacgtatttgtgaagaagatattccgaagaccgcattcaccacgcgatacgggctgtatgaattcacggtgatgtcgttcggtctaaccaatgcacctgccttcttcatgaacttaatgaacaaagtgttcatggaatacttggacaagtttgttgtggttttcatcgatgacattctgatatactcacaatcagaggaagaccatcagcaccatctccgtctggtgttgggaaagttgcgggaacatcaattgtatgccaagcttagcaagtgtgagttctggttgcccgaagtcaaattcttggggcatgtgatatctgctaagggagttgctgtggaccccgaaacagtgaccgccgtcaccgattggaagcaacccaagacagttactcaagtccgcagtttcttaggtttggcaggatactaccggagattcatcgagaacttctccaaaatcgctcgacccatgacacagttgttgaagaaagaagagaaatttgtgtggagcccgcaatgcgagaaggcgttccagactctcaaagaaaagctggtttcctcgccggtgttaatcttgccggatactcgcaaggatttcatggtgtactgtgatgcttcgcgccaaggattcgggtgcgtgctcatgcaggatggtcatgtggtggcctatgcctcacgccagctacggcctcatgaaggcaactatcctacccatgatttggagttagccgcggtggtgcatgctctaaaaatctggcggcactatctcattgggaatcgctgtgaaatatatactgatcataagagtttgaaatacatcttcactcagtcggacctgaatcttcggcaaaggagatggttagaactcatcaaggattatgatgtgggaattcactatcatcctggtaaggccaacgtggttgccgacgctctaagtcggaaaagccattgcaacactcttaacgtccgtgacatcccacccgaacttaatcaacagatggaagccctgaacctaagcatagttggtcgtggattcttggctgcgttggaagccaagcctaccttgctcgaccaaatccgcgaggctcagaagaatgacccggacatgcatggactcctcaagaatatgaaacagggtaaagccgctggtttcacagaggatgaacacggaaccctatggaacggaaagcgggtatgcgttcccgataacagagaacttaaacagctgatacttcaggaagctcacgagagcccttattccattcacccgggcagtacaaagatgtacctagacttgaaggagaaatactgcgtgtcaaggcagagcactagcgaccggccggacttctccaacctctccaagtaccagaatggaaatgggatgaaattgggatggatttcatcaccggacttccaaaaacccaaggtagctcaatttattcctgtgaagaccacctatggagggaacaaactagccgagctctacttcgctaggatcgtgagtctacatggcgttcccaagaaaatcgtatctgataggggaagccaattcacctctcacttttggaagaagctccaagaagagctgggtacccgattaaatttcagcaccgcgtatcacccgcaaacagatggacagaccgagcgtctaaatcagatcctagaagatatgcttcgcgcatgtgtactagatttcgggaagacctgggataagagtctcccctatgccgagttctcctacaataacagctatcaagccagcatacaaatggcaccttatgaagcgttgtacgggcgcaaatgccggacaccgctcttgtgggaccaagttggagaaagccaagtgttcgggactgatatcctgagagaagctgaagctaaagtcagaatctttcgggataatctaaaggtggcacagtcccggcagaaaagttatgcagataaccgtcgccgtgacctggaattcgcagtgggtgattttgtataccttcgggtcacgccattgcgaggtgtacacaggtttcagacgaaagggaagcttgcacctcggtatgtgggtcctttccgtatccttgctcggcgcggagaggtcacttaccagctggagctgcccgcctccttgggcaacgtgcatgatgtgttccatgtgtcgcaacttaagaaatgtcttcgagtgccatccgagcaggccgactcagagcaaattgaagttcgcgaagatttgacctacgtggagaggccagtgaaaatcctggacaccatggagcgctggaccaggaaccgggtaatccgtttttgcaaggtccagtggagcaaccacgctgaagaagaagctacctgggagcgtgaagacgagctgaaggcagcccatcccgatctcttcgccagttcttccgaatctcggggtcgagattccgtttaa

SEQ ID NO: 5246 - DNA, 546 bp, Oryza sativa
  Clone ID: PAT_MRT4530_12052C.1
atggccaaccgtcatgtgcttgctttctgcctcccccattatccatggcggcatggcatctctgctgctggcagctgccacgccggcggcagcggctatgcctactccacggaaacgagacgaggtgcccggtgccccaagggaagcccggactgctgcgtcgtcggcaagcgctacccgcggttcatgtggctcacagccggtatcggacatgcgccggcgatcccgacgctgcatatgtgcttccgccggaacatggagctggtcgtcgagctgtactccgggtctgggtggctgtgcctcgacgacggcggtggtggcgcacgctgccgccgctgcaacgggaggatccgcgtcgtcgtcgccgccgccgtgaatggacggtctgtcgttgtcagggtggtggacgagtgtgactacgtgaacgggtgctgcaacgaggacggcttcgcgcccccgtgccaggacaacgttggcggcgagtcgctgactgtgtggaagaagcttggctcaaagagaacaggggcaaatagtggtaaattgtag

SEQ ID NO: 5247 - DNA, 639 bp, Oryza sativa
  Clone ID: PAT_MRT4530_12053C.1
gcacgagggtagaagtgtgtcgacctatactacgaccatgcctacgacaagtgtttggaaggcgagcgtgattaagccagaggaaatggatcttgtctccttcgctatcgagtccctcaactccagctcaagggaaaagcgacttgctgggctacgtattctgcacggctttctgcgatatagagaagggatgcccgattcaggcagttcagaagcagaggtcgcctcaaaggtcatcgcctccgagaaggcggtgcccagattaatcggcatgctaggttggacgattaaggctgacgaagagaccagactgtttgcctccaaggtcgtcgctgtgcttgctggtaggatcagggttgctgggatccccggtgcagttcagttgatttcttcactccttgatgcacaggatcaaccaataatgcaagccgccattgcactggaaagagctagggagagggacgggagctgttgggcacactggttctcgattccagaagaggagccctcggccaatcaagatttgctccctgaaatcggcatgaaaattcttggcaggcttacctatgatattcacaactgtgcagaaatcagcaaagctacggacctcatctcaaaaattataggctacaccaatct

SEQ ID NO: 5248 - DNA, 198 bp, Oryza sativa
  Clone ID: PAT_MRT4530_12054C.1
atggacgacgtgctctgcgcggtgttccccatcgggtggttcagcggcgagcttctacgagcgaccgctgcagggcgtgacgctggtggtggacctcaacaaggaggaaagaagcgaagggtcggcgggaggaagtggagggcgcgcactcaccggctggcgaggaaggatggtggacggggaggagtcagcgtttag

SEQ ID NO: 5249 - DNA, 1383 bp, Oryza sativa
  Clone ID: PAT_MRT4530_12055C.1
gcgcgggcggggaggagagagagagagccgggtttggggaggggaggcgcggcgcatgcgcgcggttcgaggaggacgcggatacggcgggcccacgcgcagcctcatggctcaccgcggaccatgcgcacgggggggaacggagggagcagctggccgggtcagctcgacccggtcttagccgagctggcgccgacgtggcgcctatgtggctgccacgcggaccggcgggaggttgaagaagacgccggccggaacggacggcggacggtggctgcgaacggcggggcgaaccacggcgatacaggcgaaagcgagcacaccggaaggttgcacgggatgaggggagacgagccaacgactcggatttgccgggggatgctcgacggcggcggattgtggtggcggcaaccggtggcgagagaagggggaaacggcgacggcacgacgggagaccgattcgggcgagctagagcatctacgcgactccgggagttcgttgctagcgtcggattgggcggagctacgccgagcgaggccggcaacgagcgggtgctacggagcacgggcggcgatggcggcgagcacacggcgagcggcagcaacggtcggggcggcgccagctagctacggggaggctactcgtgctactacccgagtctaaggggaggagatggaacgaggagggagaacgaagggaggcactaccgtgcggggcgcgcactggctcctccggcacacgcgacggcggcggtcggcgagagggacggcaatggcgtgggtgaaaaacggggaagattgggaggggaaaaaaggaagggagggcgcctgggtttataggacggcaatgtcggtttggaaaccgaccttgggcggtcaagggagcgagccagcgctcggcggtcgcggcccaaacggcgaccggggggggaggatgacgccggcgggagggaaaagggaaaagggggggagagaaaggaggagggagagagggcgatgcggcagagggggggaagctctgcctccgtcccttggaagcacgcgcgaggagaggcggggccaagtcgatgacgacggcgatgacggccgggcggtttggagcggagcaacgacacgggcggcaggcacaggcaggcgcggcaggcgctgacggcggcggcgactggccggtcggccaccatggcgcgcgcgcgcgcgggaagcaacgggcggcgcggcgatttgggcggcgtcgacgggaaacggcagcgagggcggagggcgctcggctcggcgcagctcacgggggagagggagagagagagagagagagagagggggatggggagggagggggagatgggccgagaggaattcggcccatcgaacctgagggaggcgaaa

SEQ ID NO: 5250 - DNA, 5094 bp, Oryza sativa
  Clone ID: PAT_MRT4530_12056C.1
atggccggcagcgtcacccgtcgtggcttggacatgactggcttcatcttggagctgcggggcatgtgcgtggtcctggggtatccacatggagtggactaccaggccaggccgctcccggagcaggagggtgacgatgcagagccccacgctgcttgggaggttactgcagtgatcctctctggctctcccgagcggacttcgctggcagtcaccgcgggtggagattctttccccgccgcttgccagaacgccgctctcctcgccatcggcacccttcaccagcgctacccggacgagttgcagcactcgccctaccgctaccaccctcgtcgcggaggagcccgcgactacgccaccttccgggatgctagctcggaggatgacgctaccatcgtgcacctggcgcgcatggtggaggcgtacgacgcggctcgtatcgacttccatcagatggtgcgccgtgggatggtcgagaacaacttgaagatcctggagctgcgtcaggagaacctgcagctcaagaaggacctagacgcggtggaggcgcagctgcatcagctcaagatcgcccagggagaggtctgctgccccaagcgtcgccgcgtctgccgcagccagaagatcaccgcccgcaagagcacctccaggcccgagcttgttcgtcagtccctggcgtggacctgcttcgtcgagacccctcgtgccgagcccgcgcccgtggttccccaggagggggaagcctccggcgttggtagcacggaggatgcgctgttgctcaccttccgtcctggcccgtcgcagcggagaaatgctgccaccggtgatggcaaccaacctgaaggcagcaaccacaaccaccagggcaacccacctccacctcctcctccgcctccaccaccaccacccgataccaacgccattctcacccaaatcctcgcccagcaggccaacatgatgacggctttcctccaccacctccaaaatccgccacaacagaatgctccaccaccacccccacaacactctaaactcgccgagttcctccgcatccgcccacctaccttctctagctccaacaaccccgtggatgcgttggattggttgcatgccgtggggaaaaagctagacactgtgcagtgcagcgatgaggagaaagtcatcttcgccgcccaccagctgcaggggcccgcatctctatggtgggaccatttccaggctacgcagccagaggggcagcctattacttgggcccggttcaccgccgctttccggaggacccatgtgcccgccggagtcgtagcccttaagaaaagagaattccgagagttgaagcaaggcaaccgctccgtgatggagtatttgcatgagttcaacaacctggcccgttacgctccggaggatgtgcgggaagatgaggagaagcaagaaaagttcttggcgggaatggaccctgagctgtccgtccgtctagtctccggggactatccggatttccaacgtctggtggacaagagcatccgcttggaagccaagcacaaggaactggagtcgcacaagcgccgcttggcaaatttccgcaatcaacagggtgctaaccaaagggtccgctacaccaacccctatccagggggatcctcctcgcaacagcaacaacagcagcagcaacctcgctccgcgccgcgacctcaattcgtggtgcgcgtcccacagccgcagcagcagcagaatcagcaagggactcgtgcgccccgtcctcctacgccaaccgtgcagtctggtcaaggccgcagggacgctcaaggtcagcagcgtctgtgcttcaactgcttcgagcccgggcactttgcggataaatgcccgaagccaaggcgtcagcaaggccaagcgcctccccactccaacaacggtgggaaggatgtcattcggggtcgtgtgaatcacgtgacggccgaggacgtgctgacaactccagacgtcatcgttggtacgttcctcgttcattccatccctgctaccattttgttcgactctggagcttcccactggtttatatctgtgccattcgtggggagaaatcagttgggggtagaaaggcttaggaaccctctgctcatcaccacccctggaggggttatgacagcaaagtattatagccctgccgtccctatagaaattcaggggattccttttccctcggatctgattctgctagacaccaagaacttggatgtgatccttgggatgaattggttggctcaattccaaggagtagtggattgcgcgaggcgcactgtcactctgtaccgagggccggaacaaccggttgttttctttgcacccccaacctctgtcagtagttcagaactgcatcagataggactgtcagaaatccccatcgtcagggagttcggagatgtgtttccggaagaactacccggtatgccgcccaagcgagagattgagttccggatagatcttgctccaggaaccactcctctgcacaagcgaccctaccgtatggcagcaaatgaactggccgaagtaaagaaacagttggaagagttgaaagaaaaggggtatatacgtccgagtacttccccctggggtgctcctgtgatttttgtggagaagaaagacaagactaagaggatgtgcgttgactacagagctctcaatgaagtcaccatcaaaaacaagtaccctcttccccggatcgatgatctgttcgatcagcttaaaggtgccactgtattctccaagattgatcttcgttccggatatcaccaattacgtattcgtgaagaagatattccgaagaccgcattcaccacgcgatacgggctgtatgaattcacggtgatgtcattcggcctaaccaatgcacctgccttcttcatgaacttaatgaacaaagtgttcatggaatacttggataagtttgttgtggttttcattgatgacattctggtatactcacaatcagaggaagaccatcagcaccatctccgtctggtgttgggaaagctgcgggaacatcaattgtatgccaaacttagcaagtgtgagttctggctgtccgaagtcaaattcttaggacacgtgatatctgctaaaggagtttctgtggaccccgaaacagtgaccaccgtcaccgattggaagcaacccaagacagttactcaagtccgcagtttcttaggtttggcaggatactaccggagattcatcgagaacttctccaaaatcgctcgacccatgacacagttgttgaagaaagaagagaaatttgtgtggagcccgcaatgcgagaaggcgttccagactctcaaagaaaagctggtttcctcgccggtgttaatcttgccggatactcgcaaggatttcatggtgtactgtgatgcttcgcgccaaggattcgggtgcgtgctcatgcaggatggtcatgtggtggcctatgcctcacgccagctacggcctcatgaaggcaactatcctacccatgatttggagttagccgcggtggtgcatgctctaaaaatctggcggcactatctcattgggaatcgctgtgaaatatatactgatcataagagtttgaaatacatcttcactcagtcggacctgaatcttcggcaaaggagatggttagaactcatcaaggattatgatgtgggaattcactatcatcctgatatgagacagggtaaagccgctggtttcacggaggatgaacacggaaccctatggaacggaaagcgggtatgcgttccagatagcagagaacttaaacagttgatacttcaggaagctcacgaaagtccttattccattcacccgggcagtacgaagatgtacctagacttgaaggagaaatactggtgggttagcatgaagcgggaaattgcagagttcgtggctctatgtgatgtgtgccagcgtgtcaaggcagaacaccaacgaccggccggacttctccaacctctccaagtaccagaatggaaatgggatgaaattgggatggatttcatcaccggacttccaaaaacccaaggtggatatgattctatatgggtaattgtggatcgactaacaaaggtagctcgatttattcctgtgaagaccacctatggagggaacaaactagcggaactctacttcgctaggatcgtgagtctccatggtatccccaagaaaatcgtatctgataggggaagccaattcacctctcacttttggaagaagctccaagaagagctgggtacccgtttaaatttcagcaccgcctatcacccgcagacagatggacagaccgagcgtctaaatcagatcctagaagatatgcttcgcgcgtgtgtcctagattttgggaagacttgggataagagtctcccctatgccgagttctcctacaacaacagctatcaagccagcatacaaatggcaccttatgaagcgttgtacgggcgcaaatgccggacaccgctattgtgggaccaagtcggagaaagccaagtgttcggaactgatatcctgagggaagctgaagctaaagtcagaatcattcgggataatctaaaggtggcacagtcccggcagaaaagttatgcagataaccgacgccgtgacctggaattcgcagtggacgattttgtgtaccttcgggtcacgccattgcgaggggtacacaggtttcagacaaaagggaagctcgcacctcggtatgtgggtcccttccgtatcatcgctcgacgcggagaagtcgcttatcagctagagttgcccgcctccttgggtaacgtgcacgatgtgttccatgtgtcgcaactcaagagatgtcttcgagtgccatccgagcaggccgactcagagcaaattgaagttcgcgaagatttgacctacgtggagaggccagtgaaaatcctggacaccagggagcgcaggaccaggaaccgggtaatccgtttttgcaaggtccagtggagcaaccatgccgaagaagaagctacttgggagcgtgaagacgagctgaaggcagcccatcccgacctcttcgccagttcttccgaatctcggggtcgagattccgtttaa

SEQ ID NO: 5251 - DNA, 1277 bp, Oryza sativa
  Clone ID: PAT_MRT4530_12057C.1
atgcgcgcggttcgtggaggacgtggtgcggcgggcccacgctcagcctcatggctcgcggtggaccgcacgcgcgagggggcggagggaagcggcggaccggggtctgcttgacccggtcgcggccgaggtggcgccgacgtggcgcctacgtggctgtcacgcgggccggcgggaggtagatgacgacgccggccggaacggacggcggacgacagcggcgagcggcggagcgaaccatggcgatacaggcgaaggcgagcacaccgggatgttgcacaggacgaggggagacgagccaatggctcggattcgctggggaatgctcgacggcggcggattgcggtggcagcaaccgacagcgggagaagggggaaacggcgatgaggtcacgaggggccgattcccgacggcgagagcatctacgcagctacgggaacccaccccttgcgccggattaggaggaatcgcatcgagggaggccggcgacgagaggcgcttccaagctcgggcggcgacggcggcgagcacacggcgagcgacggcaccatgacgatgggccgacggcacgggagcgatctctccctcctcgggccgggggagaggaagaagacgagcgcccggagtcaccttccgcgtcctaacgcgcactggctcctccggcacacgcgacggcggcggccggcgagagagacagcaatggcgcgggcgagaaacagggaagattgggaggggaaagaggaagggaggcgcttgggaaaccgaccttgggcggtcaagggagcgagctggcgctcggcgctcgcggccaaaacggcgacaggatggggggaggatgatgacggtgggagggaaaagggaaaaagggggagagaaagagggcttgcctccttgccgctttggggaaaaggaggagggagagaaggcgacgcggcagagggggggagctctgcctccgtcccttggaggcacgcgcggggagaggcggggccgagtcgatgacgacggcgatgacggcggggcggtttggagcggcgcgacgacacgggcgacaggcgcgggctggcgcggtagagggtgacggcggcggcgaccaggcggtcggccactcggcacgcgcgcgcgggatacaacgggcggcgcggctgggcacgcgcgctggctcgccgggccgagcggctgcgcggctgtgggcgcggcaggaggatggtgaggggccgccgggagagatgatgaggcctagcgaggaacctcgtggcgcggcggcgaggggatag

SEQ ID NO: 5252 - DNA, 6849 bp, Oryza sativa
  Clone ID: PAT_MRT4530_12058C.1
aatcctcttcctcctttgggccaagcccagcccaaagtctccctctcctccctctctttccctcctctcccgggcctctcctccccctcccggcccagctccctcccctcccctctctctcccgggcctcccctccctccactcctcctgggccggccgcccggcccaagccgcgcccaagccaggccgagccgagccagccgcgtgcgcacgcgcgacgcgcgtgcgctgaccgcgcgccctcccgcgctctcccgtggccgccccgcctctccccgccttctccttctctctctccggcgccggccggcctccagccgcacctcccgcctcgcccgtgcaccgtccggctgcaccgtcacctctcccggcgtcgcagctgcctcctcttccccagcttcgcctccgtttcatggggaaatcaccggagacgcgtcctcgccgacgactagtggtgtcgccaccactccaccgtctccagccatccctgccgcctcgcctgagcgccggccgacgtcgctgccacctctgtcggtgctgcagcgccatcctcttctccggcccggctgcggcgtcgcccgaagttcgccggaacgccgccgccgcgccaaccacccattcctcctcgtcggctcgtcgccccgctgcaccaccaccttcttcgtcaccgttcgtcctcgccgatcgacgtcccatcgttcgcccggctcgtcgtctcacggcgccgcctccgtcgtcggattcacagcagcgtgttccacgccgtcctcgcctctgtgcagctgctgccggctgccatcgtcgtctcctcatcggccccggtcatcgtcgtcgtcgtcgtcctctcgtcgttcccggtcgtcgtggcgttcgtccctccgtcgagccgttctcgtccgtcgtccgcgttcgtcaagtgtgccgctgcagcccccgtcctcgtcttcgtcctcggctccgcgtcgtcaagcctcgtgccggccgcgtctcgcccatgtaccggtgtcggtagtcgttcacgcgtgcgggtggtgaccgtgtagtgtccgtgttagtgtgcccgctcggtagccgcgtggtttccacgtgtgcaggccgtgtggtgtttagtggagtccgtttgtcggccactcgcctcggttgacacacggggtctgcttccgtcgacccggggaccgcctctgtgtactcggttttctttttatgtattgttattgcttctttataggcttgtagctttgcttgtgtgcttcgcgtagcttctgtcgttccggaggttcccgaagcgtggttcgtggtcgtcgccgaaggttcggaaggccgttctctctctcttcctctttcaaaacccctaaaacctgttttcggtggggtttgggtgcatgccagtcgtgggaagtagcaccccggccactataaggattaagctcgggcctctgttgcaaagcactaccgtacttccacatgtctagtggggcaaatgaaggctacacgagctgcggcccgatggccggcagcgttacccgtcgtggtttggacatgaccggcttcgtcttggagctgcgaggcatgtgcgtggtcttgggatatccacatggagtggattaccaggccaggccgctcccggagcaggagggtgaggatgcagagcctcacgctggatgggaggtcactgcagtgatcctctccggctctcccgagcggacttcgctggcagtcaccgcgggcggagactccttccccgccgcttgccagaacgccgctctcctcgccatcggcactcttcaccagcgctacccggacgagttgcagcactcgccctaccgctaccaccctcgtcgcggaggagcccgcgaccacgccaccttccgagacgccagctcggaggatgacgctaccgtcgtgcacctggcacgcatggtggaggcgtacgacgcggctcgtatcgacttccatcagatggtgcgtcgtggcatggtggagaacaacatgaagatcctggagctgcgtcaggagaatctgcagctcaagaaggacctcgatgcgttggaggcgcagctgcatcagctcaagatcgcccagggagagggcagccgccccaagcgtcgccgcgtctgccgcagccagaagatcaccgcccgcaagagcacctccaggcctgagcttgtccgtcagtccttggcgtggacttgcttcgtcgagacccctcgtgccgagcctgcgcccgtggttccccaggagggggaagcctccggcgttggtagctcggagggtgcgctgttgctcaccttccgtcctggcccgtcgcagcgctctccttctctgtttgctggttctgtgtggggttttcagatggtgacgaccaggagaaatgttaacaccggtgaaggcaaccaacccgagggcagcaaccccaacccccaaggcaacccacctccaccaccaccaccagacaccaacgccattctcacccaaatcctcgcccaacaagccaacatgatgaatgctttcctccaccacctccaaaacccgccacaacagaatgctccaccaccacctccccaacactctaaactcgccgagttcctccgcatccgcccacctaccttctctagctccaacaaccctgtggatgctttggattggttgcatgccgtggggaagaagttagacacggtgcagtgcagcgacgaagagaaagtcgtcttcgccgcccatcagctgcagggacccgcgtctctctggtgggaccacttccaagctacgcagcccgaggggcaaccgattacttggactcgcttcaccgccgctttccggagaacccatgtgcccgccggagtcgtggccctcaagaaaagagaattccgggagctgaagcaaggcaaccgctccgtgatggagtatttgcatgagttcaacaatctagcccgttacgccccagaggatgtgcgggaagatgaggagaagcaggagaagttcttggcaggaatggaccctgagctgtctgttcgtctagtctctggagactatccggatttccaacgactggtggacaagagcatccgcttggaggccaagcacaaggaactggaatcgcacaagcgccgcctggcgaatttccgcaatcaacagggtgctaaccagagggtccgctacaccaatccctacccagggggatcctcctcgcagcagcagcagcagcaacctcgcccagcgccccgacctcaattcgtggtgcgcgtcccacagcagcaacagcagcagaatcaacaagggactcgtgcaccccgtcctcctacgccagcggtgcagcccgttcaaggccgcagggacgcttcaggtccgcagcggctgtgcttcaactgcttcgagcccgggcactttgcggataaatgcccgaagccaaggcgtcagcaaggccaagcgcctccccgctccaacaacggcgggaaggatgtcattcggggtcgtgtgaatcacgtgacggccgaggacgtgctgacaactccagacgtcatcgttggtacgttcctcgttcattccatccctgctacaattttgttcgactctggagcttcccactcgtttatatctgtgccattcgtggggaaaaatcagttgggggtagaaaggcttagaaaccctctgctcatcaccacccctggcggggttatgacagcaaagtattatagccctgccgtccctatagaaattcaggggattccttttccttcggacctgattcttctagacacaaagaacttggatgtgattcttgggatgaattggttggcacaattccaaggagtagtggactgcgcgagacgcactgttactctgtaccgagggccagaacaaccagttgttttctttgcacctccaacctctgtcagaagttcagaactgcatcagataagtctgtcagaaatccccatagtcagagagttcggagacgtgtttccggaagaactacctggtatgccgcccaagcgagagattgagttccggatagatcttgctccaggaaccactcctctgcacaagcgaccctaccgtatggcagcaaatgaactggccgaagtaaagaaacagttggaagagttgaaagaaaaggggtatatacgtccgagtacttccccatggggtgctcctgtgatttttgtagaaaagaaagacaagacgaagaggatgtgcgtcgactacagagctctcaatgaggtcaccatcaaaaacaagtaccctcttccccggatcgatgatctgttcgatcagcttaaaggtgccactgtattctccaagattgatcttcgttccggatatcaccaattacgtattcgtgaagaagatattccgaagaccgcattcactacgcgatatggactgtatgaattcacggtgatgtcgttcggcttaaccaatgctcctgccttcttcatgaacttgatgaacaaagtgttcatggaatacttggataagttcgttgtggttttcattgatgacattctgatatactcacaaacagaggaagaccatcagcaccatctccgtctggtgttgggaaagttgcgggaacatcaattgtatgccaagcttagcaagtgtgagttctggttgtccgaagtcaaattcttggggcacgtgatatctgctaaaggagttgctgtggaccccgaaacagtgaccgccgtcaccgaatggaagcaacccaagacagttactcagattcgcagtttcttgggtttggcaggatactatcggagattcatcgagaacttctccaaaatcgctcgacccatgacacagttgttgaagaaagaagagaagtttgtgtggagcccgcaatgcgagaaggcgttccaaactctcaaagaaaagctggtttcctcgcccgtgttaatcttgccggatactcgcaaggatttcatggtgtactgtgatgcttcgcgccaaggattggggtgcgtgctcatgcaggacggtcatgtggtagcctatgcctcacgccagctacgtcctcatgaaggcaactaccctacacatgacttggagttagcagcggtggttcatgctctaaaaatctggcggcactatctcattgggaaccgctgtgaaatatatactgatcataagagtttgaaatacatcttcacccagtcggatctgaatcttcggcaaaggagatggttagaactcatcaaggattatgatgtgggaattcactatcaccctggtaaggccaatgtggttgccgacgctctaagtcgaaagagccactgcaacactctcaatgtccgaggcattccacccgagcttaatcaacagatggaagccctgaacctaagcatagttggtcgcggatttttggccgcgttggaagccaagcccaccttgctcgatcaaatccgcgaggctcagaagaatgatccggacatgcatggactcctcaagaatatgaaacagggtaaagccgctggtttcacagaggatgaacacggaaccttatggaacggaaagcgggtatgcgttccagaaagcagagagcttaaacagctgatacttcaggaagctcatgaaagtccttattccattcacccgggtagtacaaagatgtacttagacttgaaggagaaatactggtgggttagcatgaagcgggaaattgcagagtttgtggctctatgtgatgtgtgccagcgtgtcaaggcagagcaccagcgaccggctggacttctccagcctctccaagtgccggaatggaaatgggatgaaattgggatggatttcatcaccggccttccaaaaacccaaggtggatatgattctatatgggtagtcgtggatcgattaaccaaggtagctcgattcattcctgtgaagaccacttatggagggaacaaactagcggagctctacttcgctaggatcgtgagtctccatggtattcccaagaaaatcgtatctgataggggaagccaattcacctctcacttttggaagaagctccaagaagagctgggtactcgattgaattttagcaccgcctatcacccgcagacagatggacagaccgagcgtctaaatcagatcctagaagatctgctccgcgcatgtgtactagatttcgggaagacttgggataagagtctcccctatgccgagttctcctacaataacagctatcaagccagcatacaaatggcaccttatgaagcgttgtacgggcgcaaatgccgaacaccgctattgtgggaccaagttggagaaagccaagtgttcgggactgatatcctgagagaagctgaagctaaagtcagaatcattcgggataatctaaaggtggcacagtctcggcagaaaagttatgcagataaccgtcgccgtgatctggaattcgcagtggatgattttgtgtaccttcgggtcacgccattgcgaggtgtgcacaggtttcagacaaaagggaagctcgcacctcggtatgtgggtcccttccgtatcatcgctcgacgtggagaagttgcttaccagctggagctgcccgcctccttgggtaacgtgcatgatgtgttccatgtgtcgcaactcaagaaatgtcttcgagtgccatccgagcaggccgactcagagcaaattgaagttcgcgaagacttgacctacgtggagaggccagtgaaaatcctggacaccatggagcgcaggaccaggaaccgggtaatccgtttttgcaaggtccagtggagcaaccacgccgaagaagaagctacttgggagcgcgaagacgagctgaaggcagcccatcccgatctcttcgccagttcttccgaatctcggggtcgagattccgtttaa

SEQ ID NO: 5253 - DNA, 684 bp, Oryza sativa
  Clone ID: PAT_MRT4530_12059C.1
atggcacgcgcgcgggcggggaggggagagagagagccggtgggccgggtccatccccgcgtggtcccgggtgggacccgcttgtcgggggctcggctcaccgtgcggagggagcacgcggcgcatgcgcgcggttcgcggaggacgcggtgcggcgggcccacgtgcagcctcacggctcgcggtggacctcgcgcgcgagggggcggaggggagcggcagaccggggtctacttgacccggtcgcggccaaggtggcgccgacgtggcgccttcgtgggtgccacgcgggccggcgggaggttgaagaagacgcctgccggaacagacggcggacggcggtggcgagcggcggagcgaatcacggcgatacaggcgaaagcgagcacaccgggaagttgcacgggacgaggggagtcgagccaaaggctcggatttgccggggaatgctcgatggcggtggattgcggcggcggcaaccggcggcgggagaagggggaaacggcgacgaggtcacgaggggccgattcccggcggcgagagcatctacgcggctacgggaatccgttgccagcgtcggattgggcggagctgcgccgagcgaggccggcgacgagcgggtgctacggcgacggcggcgagcacacagcgggcggcggcaacggtcggggcggcgcctgctag

SEQ ID NO: 5254 - DNA, 1980 bp, Oryza sativa
  Clone ID: PAT_MRT4530_1205C.1
ctacgccaggcactccaagtcggcgagggtgctctgagccgtggcaagttggctggccaactccgcgccaccggacggcccgctcgctgccaagtctttctcccgggcctccagttcagaggtctttgccgctatcgccgcgcgctcggcgcgggcgctctctagatgacgagcttcgcgcccggcaacagcctcctcgcatctcgcgagttgctcgctcagccagcgcgaggctatctcgcggcggctcacttcagcttcacgctcggcaagcgcggcatcccgttcccggcatgcctcctctcgcagccgtagttcttccgcgtggcgatctgcgtaagctttcgcggcaagggtgatctggtcacgctcggacgcggcctcttcacagaggcgaagggaagcctcgacctccatcgctgttctctcgtgagcggccagggtggactcccactggtctagcaggcgtgctcgctcctccagctcctgggcccgccgtgcctgttcccccgcttcggggcctcgggtggattcggcctcggcctcagcctctggttccgggccgccctcggcctcagcctcggcctcggactcaggaccgccctcagcctcagcctcgggctcgaggccactcctggtttcagcgcttgggccacgtcctccttcgccccctgattttaggggacgctccacgtgggctccggtcccggggccgccctcgggaggagcgtcaccacccctatcgcccacggcagattgggtcccgccgcgaggctgcgaagaccccgcggccttagattggccgagcccagactgcccgtgcgaggggttagaccctgggattccctgggaaggaatctcacggctcctgccggcaccaatggcggacatcacagccaggatgctctcccggtcgcggtcgcagcagaggggaagaatcccgtcagggattagtgttggctcggcggagtccaggcccagcaccccccgaatcaccctctttgcgtcttcctcgccccagtcccagcgctcgcccacatgggtccgcatggggtcgttgggaccggtgtattcccacgctccacgggatcgttcctgaagaggtgcgatgcggcgacggaagtaatcgccaaagaccatcgcccctgtgaggcccaggctccacaggcccctaaggcgatcccacactgcgtcatattcctcacctagctccgacgttgccagccatgcggcagacctttcgggagggccagcgggaactcgaagtcgcggatggtccggcaaggcggtgtagaaccagtccttcttccaatcctcccatttcttgcggaggtggctctcgatgtattggcccgctgtgcccggtcggggctggaaatagcatccccccaccactacgccttgcagcagctgcgggatgaagaaggcttggaacagccgcatcgtcggtcgcaccccaatgaacatctcgtacaaatgcgtgaagatggccagcgtcatcacggcattaggcgcgagatgcaaggcgtgaatctcgtagaaatccaggacttcatggaagaatttggagaacggcgggatcaagcccaccatggcaaaggacaagaggtgtacggatcgctccaaatatcgcggccgtggcagcgactctccctcccgcacgacggcctcttccggcataatcttgcgaggaaggctaaggtgcttgtctaccgtgatgcgggaggaaaggagcactgcgtcgccggcgtcttgggccatagcaaacgccacgcgtatcatagaagcagcagggggggcctcggggtacgatgtcgccccctcggggtatggcatcgccccctcgagccctaccgcaccttcgccccgaggccctcgcctggccgccacgcggcagaggggagcataggctgacaggcagggcacaatgagtactgatgagcccatgatgcagggcctggattggccagttcctgccat

SEQ ID NO: 5255 - DNA, 2781 bp, Oryza sativa
  Clone ID: PAT_MRT4530_12060C.1
atgccgcccaaccgggagattgagttccggatagatcttgctccaggaaccactccgctgtacaagcgaccctaccgtatggcagcaaatgaactggccgaagtcaagaaacagttggaagagttgaaagaaaagggagctctcaatgaggtcaccatcaaaaacaagtaccctcttccccggatcgatgatctgttcgatcagcttaaaggtgccacggtattctccaagatcgatcttcgttccggatatcaccaattacgcattcgtgaagaagatattccgaagaccgcattcaccacgcgatacgggctgtatgaattcacggtgatgtcattcggtttaaccaatgctcctgccttcttcatgaacttaatgaacaaagtgttcatggaatacttggataagtttgttgtggttttcattgatgacattctggtatactcacaatcagaggaagaccatcagcaccatctccgtctggtgttgggaaagttgcgggaacatcaattgtatgccaaacttagcaagtgtgagttctggttgtccgaagacaaattcttagggcacgtgatatctgctaaaggagttgctgtggaccccgaaacagtgaccgccgtcaccgattggaagcaacccaagacagtcactcaaattcgcagtttcttaggtttggcaggatactaccggaggatcatcgagaacttctccaaaatcgctcgacccatgacacagttgttgaagaaagaagagaaatttgtatggagcccgcaatgcgagaaggcgttccaaactctcaaagaaaagctggtttcctcgccagtgttaatcttaccggatactcgcaaggacttcatggtgtattgtgacgcttcgcgccaaggactggggtgcgtgctcatgcaggaaggacatgtggtagcctatgcctcacgccagctatggcctcatgaaggcaactaccctacccatgatttggagttagcagcggtggttcatgctctaaaaatctggcggcactatctcattgggaatcgctgtgaaatatatactgatcataagagtttgaaatacatcttcacccagtccgatctgaatcttcagcagaggagatggttagaactcatcaaggattatgatgtgggaattcactatcatcctggtaaggccaacgtggtcgccgacgctctaagtcgaaaaagccattgcaacactcttaacgtccgtggcattccacccgaacttaatcaacagatggaagccctgaacctaagcatagttggtcgcggattcttggctacgctggaagccaagcctaccttgctcgatcaaatccgcgaggctcagaagaatgatccggacatgcgtggactcctcaagaatatgaaacagggtaaagccgctggtttcacagaggatgaacacggaaccctatggaacagaaatcgggtatgcgttccagataacagagaacttaaacagctgatacttcaggaagctcacgaaagtccttattccatccaccctggcagtacgaagatgtacttagacttgaaggagaaatactggttggttagtatgaagcgggaaattgcagggttcgtggccctttgtgatgtgtgccagcgtgtcaaggcagagcaccaacgaccggccggacttctccaacctctccaagtaccagaatggaaatgggatgaaattgggatggatttcatcaccggactcccaaaaacccaaggtggatatgattctatatgggtagttgtggaccgattaaccaaggtagctcggtttattcctatgaagaccacctatggagggaacaaactagccgagctctacttcgctaggatcgtgagtctccatggcgttcctaagaaaattgtatctgataggggaagccaattcacctctcacttttggaagaagctccaagaagagctgggtacccgattaaatttcagcaccgcgtatcacccgcagacagatggacagaccgagcgtctaaatcagatcctagaagatatgcttcgcgcatgtgtcctagatttcgggaagacctgggataagagtctcccctatgccgagttctcctacaataacagctaccaaggcagtatacaaatggcaccttatgaagcgttgtatgggcgcaaatgccggacaccgctcttgtgggaccaagttggggaaagccaagtgttcgggactgatatactaagagaagctgaagcgaaggtcagaaccattcgggataatctaaaggtggcacagtcccggcagaaaagttatgcagataaccgtcgccgtaacctggaattcgcagtggacgattttgtgtaccttcgggtcacgccattgcgaggcgtacacaggtttcagacgaaagggaagctcgcacctcggttcgtgggtcctttccgtatcattgctcggcgcggagaagtcgcttaccagttggagctgcccgcctccttgggcaacgtgcatgatgtgttccatgtgtcgcaactcaagaaatgtcttcgagtgccatccgagcaggccgattcagagcaaattgaagttcgcgaagacttgacctacgtggagaggccagtgaaaatcctggacaccatggagcgcaggaccaggaaccgggtaatccgtttttgcaaggtccaatggagcaaccacgccgaagaagaagctacttgggagcgtgaagacgagctgaaggcagcccatcccgatttcttcgccagttcttccgaatctcgtggtcgagattccgtttaa

SEQ ID NO: 5256 - DNA, 611 bp, Oryza sativa
  Clone ID: PAT_MRT4530_12061C.1
cccacgcgtccgctcatctccatttactgagcatattcctccgctgttctttgcttattgtttattgacgggagtattatatttgagtgggtgatgcaaagaaatcacatgaactagatttctagagagagtacttgattatttgctttctagagtagaaattgtttgaactaggtgtacaatttctagagagtagttgatctatttgctttctagagtggagaaattgtttgaactaggtgtacaacttttagagtgagtacttgatttatttgttttgatgttttctagagtagagaaattgtttgaactatgtagacatgtgaaacattgaaagcctatttggaagatctggcccaattttttgtttgtttggatggcataactgtgatttgttctgcaaccctgccatgcgtatgcgattttgggggaaagtacattgagaaatctctttctggatcactatgattttttgtctccaaaatgttttgatggagcttttgattgtctctaatgttctagtgttgacatcagaggtttgttttgttttgttaaaaaaaaatcggtaatgatgagttcagcttacccaccttgtacagagttagtagtct

SEQ ID NO: 5257 - DNA, 1455 bp, Oryza sativa
  Clone ID: PAT_MRT4530_12062C.1
atgggccggccggcccaagaaggcggcccaaggcacgcgcgcgggcggggaggggagagagagagccggtgggccaggtccatcccgcgtggtcccgggtgggacccgcttgtcggcgactcggctcaccgtgagcgaggtgcatgcggggcgtgctagggtttggggagggaggcgcggcgcatgcgcgcggttcgcggaggacgcggtgcggcgggcccacgtgcaaactcacggctcgcggtggaccgcgcgcacgagggggtggagggaagcggcggaccggggtctacttgacccggtcgcggccgaggtggcgccgacgtggcgcctacgtggctgccacgcgggccggtgggaggtagacgacgacgccggccgaaacggacggcggacgacagcggcgagcggcggagcgaaccatggcgatacaggcgaaggcgagcatatcgggatgttgcacaggacgaggggagacgagccaacggctcggatttgccgggggatgctcgacggcggtggattgcggcggcggcaaccggcggagagaaaagggggaaacggcgatgaggtcacgaggggccgattcccggatacgcggatacgggaacccatcccttgcgccggattaggaggaaacgcatcgagggaggccggcgacgagaggcgcttctgagctcgggcggcgacagcggcgagcacacgacgagcgggggaagtggaagaaggcgagcgcccggagtccccttccgcgtccacgaatgcaccggctctcccggtgcttggcgatgaacggcggaggcgagacagaggggtggcaatggcgcggtggcggcgagcgaaatgggaggaggaatcgatgggagggcgccttggtttataggacgacgatgtcggtttggaaaccgaccttgggcggtcaaggcgcgagctggcgctcggcgctcgcggccaaaacggcgacagaggcggatgacgccggcggggaggggaaaaggaaaaagaagggagaaagggggcttgccccttgccactttgggaaaaggaggaggggatgggggcgacgcggcagagggaggaggagctctgcctccatcccttggaggctagcgcggggagaggcggggccgaggcgatgacgacggcgatgacggccgggcggtttggagcggagcgacgacacgggcggcaggcgcgagcaggtgcggcaggcgctgacggcggcggcgactgaccggtcggccaccatggcgcgcgcgcgcaggaagcaacaggcggcgcggcgatttgggcggcgttggcgggaaacggcagcgagggcggagggcgctcggctcggcgcggctcacgcgcatgcgtgcgcagcgcacgggcagagcgggggagagggagagagagagagagagagagagccggggagggaggggaagatgggccgagagggattcggcccat

SEQ ID NO: 5258 - DNA, 5910 bp, Oryza sativa
  Clone ID: PAT_MRT4530_12063C.1
agaagccaagaacccatttttgtgctttatttcggtttgttatatggagtttagtagagtaaaagccttttcttttccgttggtcgtgtagacgctgcagcttcggaagatctgctcttcgtggaagttgaagccggcgtttgggaaagcgagcaaggcaagtcacatcatcgctccttctattcaaaatccccaaaatggttttaggctgggctcggggtgcatggttttgatagtagcacctcggccatataaggaccggtcttcgggcctctgttgcaaagcactaccgtacttccacatgtctagtgggtaaggcttagtttgtggctcagtctggttataaacaaaagtacacggatggaggtggatgaagtcgggggtcgatggacattctccagggcaaatgaaggctacaygagctgcggcccggtagtcgagatgtcatggcacagggccggtgtcctgctgctaggggctcagtcctgtctgcctgtcccggggrttccgrccgtaggcgggattgggtcggtactcttgtctatggctaggatgggttggaaactatgtcacgtcttccgtctgtataccgtggtgatggccggcagcgtcacccgtcgtggtttggacatgactggcttcgtcttggagctgcgaggcatgtgcgtggtcttggggtatccacatggagtggactaccaggccaggccgcttccggatcaggagggtgatgacgcggagccccacgctggttgggaggtcactgcagtgatcctctctggctctcccgagcggacttcgctggcagtcaccgcgggtggagattccttccccgccgcttgccagaacgccgctctcctcgccatcggcactcttcaccagcgctacccggacgagttgcagcactcgccctaccgctaccaccctcgtcgcggaggagcctgcgaccacgccaccttccgggatgctagctcggaggatgacgctaccatcgtgcacctggcgcgcatggtggaggcgtacgacgcggctcgtatcgacttccaccagatggtgcgccgcgggatggttgagaacaacatgaagatcctggagctgcgtcaggagaacctgcagctcaagaaggacctagacacggtggaggcgcagctgcatcagcttaagatcgcccagggagaggtctgccgccccaagcgtcgccgcatctgccgcagccagaagatcaccgcccgcaagagcacctccaggcccgagcttgttcgtcagtccctggcgtggacctgcttcgtcgagacccctcgtgccgagcccgcgcccgtggttccccaggagggggaagcctccggcgttggtagcacggagggtgcgctgttgctcaccttccgccctggcccgtcgcagcggagaaatgctaacaccggtgatggcaaccaacctgaaggcagcaaccacaaccaccaaggcaacccacctccacctcctcctccgcctccgccaccaccaccagacaccaacgccattctcacccaaatcctcgcccagcaagccaacatgatgactgctttcctccaccacctccaaaatccgccacaacagaatgctccaccaccacctccccaacactctaaactcgccgagttcctccgcatccgtccacctaccttctctagctccaacaaccccgtggatgcgttggattggttgcatgccgtggggaaaaagctagacacggtgcagtgcagcgacgaggagaaagtcatcttcgccgcccaccaactgcaggggcccgcatctctctggtgggaccacttccaggctacgcagccagagggacagcctattacttgggcccgcttcaccgccgctttccggagaacccatgtgcccgccggagtcgtggccctcaagaaaagggaattccgagagttgaagcaaggcaaccgctccgtgatggagtatttgcatgagttcaacaatctggcccgttacgctccggaggatgtgcgggaagatgaggagaagcaagagaagttcctggcaggaatggaccccgagctgtccgtccgtctagtctcgggggactatccggattttcaacgactggtggacaagagcatccgcttggaagccaagcacaaggagctggagtcgcacaagcgccgcttggcgaatttccgcaatcaacagggtgctaaccaaagggtccgctacaccaatccctatccggggggatcctcctcgcagcagcaacaacagcagcagcaacctcgctccgcgcctcgacctcaattcgtggtgcgcgtcccacagccgcagcagcagcagaatcaacaagggactcgtgcgccccgtcctcccacgccaactgtgcagcctggtcaaggccgcagggacgctcaaggtcagcagcgtctgtgcttcaactgcttcgagcccgggcactttgcggataaatgcccgaagccaaggcgtcagcaaggccaagcgcctccccgctccaacaacggcgggaaggatgtcattcggggtcgtgtgaatcacgtgacggccgaggacgtgctgacaactccagacgtcatcgttggtacgttcctcgttcattccatccctgctaccattttgttcgactctggagcttcccactcgtttatatctgtgccattcgtggggagaaatcagttgggggtagaaaggcttaggaaccctctgctcatcaccacccctggaggggttatgacagcaaagtattatagtcctgccgtcccgatagaaattcaggggattccttttccctcggatctgattctgctagacaccaagaatttggatgtgattcttgggatgaattggttggctcaattccaaggagtagtggattgcgcgagacgcactgtcactctgtaccgagggccggaacaaccggttgttttctttgcacccccaacctctgtcagaagttcagaactgcatcagatagaactgtcagaaatccccatcgtcagggagttcggagatgtgtttccggaagaactacccggtatgccgcccaagcgagagattgagttccggatagatcttgctccaggaaccactcctctgcacaagcgaccctaccgtatggcagcaaatgaactggccgaagtaaagaaacagttggaagtgttgaaagaaaaggggtatatacgtccgagtacttccccatggggtgctcctgtgatttttgtagagaagaaagacaagacgaagaggatgtgcgtcgactacagagctctcaatgaagtcaccatcaaaaacaagtaccctcttccccggatcgatgatctgttcgatcagcttaaaggtgccactgtattctccaagattgatcttcgttccggatatcaccaattacgtattcgtaaagaagatattccgaagaccgcattcaccacgcgatacgggctgtatgaattcacggtgatgtcattcggtctaaccaatgcacctgctttcttcatgaacttaatgaacaaagtgttcatggaatacttggataagtttgttgtggttttcattgatgacattctgatatactcacaatcagaggaagaccatcagcaccatctccgtctggtgttgggaaagttgcgggaacatcaattgtatgccaagcttagcaagtgtgagttctggttgtccgaagtcaaattcttggggcacgtgatatctgctaaaggagttgctgtggaccccgaaacagtgaccgccgtcaccgattggaagcaacccaagacagttactcaagtccgtagtttcttaggtttggcaggatactaccggagattcatcgagaacttctccaaaatcgctcgacccatgacacagttgttgaagaaagaagagaaatttgtgtggagcccgcaatgcgagaaggcgtttcaaactctcaaggaaaagctggtttcctcgccagtgttaatcttgccggatactcgcaaggacttcatggtgtattgtgacgcgtcgcgccaaggactggggtgcgtgctcatgcaggacggtcatgtggtagcctatgcctcatgtcagctacgacctcatgaaggcaactaccctacccatgatttggagttagccgcggtggttcatgctctaaaaatctggcggcactatcacattgggaatcgctgtgaaatatataccgaccataagagtttgaagtacatcttcacccagtcggatctgaatcttcggcaaaggagatggttagaactcatcaaggactatgatgtgggaattcactatcatcctggtaaggccaacgtggttgctgacgctctaagtcgaaagagccattgcaacactcttaacgtccgtggcattccacctgaacttagtcaacagatggaagccctgaacctaagcatagttggtcgtgggttcttggctgcgttagaagccaagcctaccttgctcgatcaaatccgcgaggctcagaagaatgatccggacatgcatggactcctcaagaatatgaaacagggtaaagccactggtttcacagaggatgaacacggaaccctatggaacggaaagcgggtatgcgttccagataacagagaacttaaacagctgatacttcaggaagctcacgaaagtccttattccattcacccgggcagtacaaagatgtacttagacttgaaggagaaatactggtgggttagcatgaagcgggaaattgcagagtttgtggccctatgtgatgtgtgccagcgtgtcaaggcagagcaccaacgaccggccggacttctccaacctctccaagtaccagaatggaaatgggatgaaattgggatggatttcatcaccggacttccaaaaacccaaggcggatatgattctatatgggtagttgtggatcgattaaccaaggtagctcgatttattcctgtaaagaccacctatggagggaacaagctagccgagctctacttcgctaggatcgtgagtctccatggcgttcccaagaaaatcgtatctgataggggaagccaattcacctcgcacttttggaagaagctccaagaagagctgggtactcgattgaatttcagcaccgcctatcacccgcagacagatggacagaccgaacgtctaaatcagatcctagaagatatgctccgcgcatgtgtactagatttcgggaagacctgggataagagtctcccctatgccgagttctcctacaataacagttatcaagccagcatacaaatggcaccttatgaagcgttgtacgggcgcaaatgccggacaccgctcttgtgggaccaagttggagaaagccaagtgttcgggactgatatcctgagagaagctgaagctaaagtcagaatcattcgggataatctaaaggtggcacagtcccggcagaaaagttatgcagataaccgtcgccgtgacctggaattcgcagtgggtgattttgtataccttcgggtcacgctattgcgaggtgtacacaggtttcagacaaaagggaagctcgcacctcggtatgtgggtcctttccgtatcaatgctcggcgcggagaagtcgcttaccagttggagctgcccgcctccttgggcaacgtgcatgatgtgttccatgtgtcgcaactcaagaaatgccttcgagtgccatccgagcaggccgactcagagcagattgaagttcgcgaagatttgacctacgtggagaggccaatgaaaatcctggacaccatggagcgcaggaccaggaaccgggtaatccgtttttgcaaggtccagtggagcaaccacgcagaagaagaagctacttgggagcgtgaagacgagctgaaggcagcccatcccgatctcttcgccagttcttccgaatctcggggtcgagattccgtttaa

SEQ ID NO: 5259 - DNA, 6302 bp, Oryza sativa
  Clone ID: PAT_MRT4530_12064C.1
atggcggccggatcttccgcgcccgtttccccctcatccggccgccctctctcactcccaaccctatataaacactccccgtgcctccctccaccgtttccgccactcgccgctccctctctccgccggaatcgagctcgcgccgtcgctctctctctccgccgtcaccgccgagctccggtctgccgccgtcgtcgccccggaccttcttccgcttcggcgccgcctccttcggtttcaccgcaacctcgccgacctcgtccacccctccgtttcgcccgccgacagccggaacgccgccgtccccgtctacccgagccgcgccgccgccttcctccgctccggtcgccgttcccgtcgtcgccgtcgacccggggtgagctgtggaccgccgattcgtttcccccttccctcccctctctcgggcgccgctctaccgcgccggtggtcaccggcggcgaccatcgggggcgcgggtgcgccgcctcccgtcggctgtgccggcgtggccgccttcgggcgcgccccgcggctgccatgtggggcccggccgtcagccgcccgcgccctcgggtgcggctgacgcgtgggacccacggcgccggccggtgtgagccgggtgcacccggtccaccatggacccacctcggccatataaggaccggtcttcgggcctctgttgcaaagcactaccgtacttccacatgtctagtggggcaaatgaaggctacacgagctgcggcccggtagtcgagatgtcatggcacagggccggtgtcctgctgctaggggctcagtcctgcctacctgtcccgggggttccgggcgtaggtgggattgggtcgatgtacacctctgatcagagtataatctattcgaatagccgcgccctcggttatgggcaagccgagcaatgtacccaaatggccggcagcgtcagccgtcgtggtctggacctgactggtttcgtcttggagctgcggggcatgtgcgttgtcctggggtatccgcatggagtggactaccagggcaggccgctcccggagcaggagggtgacgatgcagagccccacgctgcttgggaggttactgcagtgatcctcactggctcacccgagaggacttcgttggcagtcaccgcaggtggagattctttctccgccgcttgccagagcgccgctctcctcgccatcagcactcttcaccagcgctacccggacgagctgcagcactcgccctaccgctaccaccctcgtcgcggaggagcccgcgactacgccaccttccgggatgctagctcggaggatgacgctaccatcatgcacctggcgcgcatggtggaggcgtacgacgcggctcgtatcgacttccatcagatggtgcgccatgggatggtcgagaacaacctgaagatcctgaagctgcgtcaggagaatctgcagctgaagaaggacctagacgcagtggaggcgcagctgcatcagctcaagatcgcccagagagaggtctgtcgcccccagcgtcgccgcgtctgccgcagccagaagatcaccgcccgcaagagcacctccaggcccgagcttgttcgtcagtccctggcgtggacttgcttcgtggagacccctcgtgccgagcccgcgcccgtggttcctcaggagggggaagcctccggcgtcggtagcatggaggatgcgctgttgctcaccttccatggtgacgaccaggagaaatgctgccaccagtgatagcaaccaacctgaaggcagcaaccacaacaaccatggcagcccacctccacctcctccaccgcctccaccaccaccaccagacaccaacgccattctcacccaaatcctcgcccagcaggccaacatgatggctgctttcctccaccacatccaaaatccgccacaacataatgctccaccaccacccccacaacactctaaactcgccgagttcctacgcatccgtccacctaccttctctagctccaacaaccccgtggatgcgttggattggttgcatgccgtggggaaaaagttagacaccgtgcagtgcagcgatgaggagaaagtcatcttcgccgcccaccaactgcaggggcccgcatctctatggtgggaccatttccaggctacgcaactagaggggcaacctattacttgggcccgcttcaccgccgccttccggaggacccatgtgcccgccggagtcatggcccttaagaaaagggagttccgagagttgaagcaaggcaaccgctccgtgatggagtatttgcatgagttcaacaacctggcccggtacgccccggaggatgtacgggaagatgaggaaaagcaggagaagttcttggcaggaatggatcctgagctgtccgtccgtctagtctccggggactatccggatttccaacgtctggtggacaagagcatccgcttggaagccaagcacaaggaactggagtcgcacaagcgtcgcttggcgaattttcgcaaccaacagggtgctaaccaaaggatccgctacaccaatccctatccagggggatcttcctcgcagcagcagcaacctcgctccgcgcctcgacctcaattcgtggtgcgcgtcccacagccgcagcaacagcagagccagcaagggacccgtgcgccccgtcctcctacgccagccgcgcagtctggacaaggccgcagggacgttcaaggtccgcagcgtctgtgcttcaactgcttcgagcccgggcactttgcggataaatgcccgaagccgaggcgccagcaaggccaagcgcctccccactccaacaacggtggtaaggatgtcatttggggtcgtgtgaaccacgtgacggccgaggacgtgctgacaactccagacgtcatcgttggtacgttcctcatccattccatccctgctaccattttgttcgactctggagcttcccactcgtttatatctgtgccattcgtggggagaaatcagttgggggtagaaaggcttaggaaccctctactcatcaccacccctggaggggttatgacagcaaagtattatagtcctgccgtccctatagaaattcaggggattccttttccctcggatctgattcttctagacaccaagaacttggatgtgatccttgggatgaattggttggctcaattccaaggagtagtggattgtgcaagacgcactgtcactctgtaccgagggccggaataaccggttgttttctttgcacccccaacctctgtcagtagttcagaacttcatcagataggactgtcagaaatccccattgtcagagagttcggagacgtgtttccggaagaactacccggtatgccgcccaagcgagagattgagttccggatagatcttgctccaggaaccactcctctgtacaagcgaccctaccgtatggcagcaaatgaactggccgaagttaagaaacagttggaagagttgaaagaaaaggggtatatacgtctgagtacttccccctggggtgctcctgtgatttttgtggagaagaaagacaagacaaagaggatgtgcgttgactacagagctctcaatgaagtcaccatcaaaaacaagtaccctcttccccggatcgatgatctgttcgatcagcttaaaggtgccacggtattctccaagattgatcttcgttctggatatcaccagttgcgcatccgtgaagaagatattccgaagaccgcattcaccattcgatacggactgtatgaattcacggtgatgtcgttcggtttaaccaatgctcctgccttcttcatgaacttaatgaacaaagtgttcatggaatacttggataagtttgttgtggttttcattgatgacattctggtatactcacaatcagaggaagaccatcagcaccatctccgtctggtgttgggaaagttgcgggaacatcaattgtatgccaaacttagcaagtgtgagttctggttgtccgaagtcaccgattggaagcaacccaagacagtcactcaaattcgcagtttcttaggtttggcaggatactaccggaggttcatcgagaacttctccaaaatcactcgacccatgacacagttgttgaagaaagaggagaaatttgtgtggagcccgcaatgcgagaaggcgttcaaaactctcaaagaaaagctggtttcctcgccagtgttaatcttgctggatactcgcaaggacttcatggtgtattgtgacgcttcgcgccaaggattgggcgcgtgctcatgcaggacggtcatgtggtggcctatgcctcacgccagctacggcctcatgaaggcaactaccctacccatgatttggagttagccgcggtggttcatgctctaaaaatctggcggcactatctcattgggaatcgctgtgaaatatatactgatcataagagtttgaaatacatcttcacccagtcggatctgaatcttcggcagaggagatggttagaactcatcaaggattatgatgtgggaattcactatcatcctggtaaggccaacgtggtcgccgacgctctaagtcgaaaaagccattgcaacactcttaacgtccgtggcattccacccgaacttaatcaacagatggaagccctgaatctaagcatagtgggtcgcggattcttggctgcgttggaagccaagcccaccttgctcgatcaaatccgcgaggctcagaagaacgatccggacatgcatggactcctcaagaatatgaaacagggtaaagccactggtttcacagaggatgaacacggaaccctatggaacggaaatcggcgtgtcaaggcagagcaccaacgactggccggacatctccaacctctccaagtaccagaatggaaatgggatgaaattgggatggatttcatcaccggacttccaaaaacccaaggtggatatgattctatatgggtagttgtggatcgattaaccaaggtagctcgatttattcttgtgaaggccacctatggagggaacaaactagccgagctctacttcgctaggatcgtgagtctccatggcgttcctaagaaaattgtatccgataggggaagccaattcacctctcacttttggaagaagctccaagaagagctgggtacccgattaaatttcagcaccgcgtatcacccgcagacagatggacagaccgagcgtctaaatcagatcctagaagatatgcttcgcgcatgtgtcctagatttcgggaagacctgggataagagtctcccctatgccgagttctcctacaataacagctaccaagccagcatacaaatggcaccttatgaagcattgtatgggcgcaaatgtcggacaccgctattgtgggaccaagttggggaaagccaagtgttcgggaccgatatcctgagagaagctgaagctaaagtcagaaccattcgggataatctaaaggttgcccagtctcggcagaagagttatgtagacaaccgacgccgtgacctagaattcgcagtggatgactttgtgtatcttcgggtcacgcccttgcgaggtgtacacaggtttcagacaaaggggaagctcgcacctcggtttgtgggtcctttccgtatcattgcacggcgcggagaagtcgcttaccagttggagctgcctgcctccttgggcaacgtgcatgatgtgttccatgtgtcgcaactcaagaaatgtcttcgagtgccatccgagaaggccgactcagagtaaattgaagttcgcgaagacttgacctacgtggagaggccagtgaaaatcctggacaccatggagcgaaggaccaggaaccgggtaatccgttttttcaaggtccactggagcaaccacgccgaggaagaagctacttgggagcgtgaagacgagcctccccgtgcctccctccaccgtttccgccactcgccgctctctctccccgccggaatcgagctcgcaccgtcgccctctctctccgtcgttgccgccgagctccggtccgccgccgttgtcgccccggaccacctctcccctcggcgccacctccttcggcttcgccgcatccccggcgacctcgtccacccctccgtttcgctcgccgaccgccggagcaccgtcgaccccgtccacccgagccgcgccgccgccttcctccgctccggtcgccgtttccgtcttcgccgtcgacccggggtgagccgtggaccgccgcttcttttcccccttcccttcccctccctcggccgccgctccgccgtgcctatggacgccgccggcgaccat

SEQ ID NO: 5260 - DNA, 4071 bp, Oryza sativa
  Clone ID: PAT_MRT4530_12065C.1
atggctctcctcgcgctccgcctcggccaccaccaccaccacctcggcctctccgccccgcgcgacccccgcctcctcctccgccggaggctcgtggtcgccagctccggtgccgtgaaggcccccgcggccgcggcggtcgtgtggttcaagcatgacctccgcgtcgacgaccacccgggcctcgccgccgcggtggctgccgagccgcgccggcccgtcctgccgctctacgtcttcgaccgccgcatcctcgacgacgctagtaaatggagagaacaactgcttttcagtcccaacttcttgaggagacctgcacctccactatctggtatgtgccagatcatgaaggttttgattggaatggacgagatcaagggttactcagacacgatgctggaactgctactttttgctttggaagatcttaagatggttttgaagtctcaggagtctgatcttctcataggcttgggaaatgctgaagatgttgttctcaagcttgtaaatgaggtacaagcgggcctcattttcacagaagaggaagttgagtacagagtgcgcaatgttctggccagtgttgaatcatctctctctaatgcatcattcctatcgggaaaccctcctgagatagtggtttggagtgcctcattgtatgactacaagaatccgagggaattgtcaacatcacacaaccaatttttgaaggaaaaattaccgatgaacacacctcttgctgccccgtctttacctgctctgaacatagagatagagacaggttctctccccacactggaagaactaaaagggtttcttaaagagagtagaacgtcagagaataattgggttcctctcaagggcacatcagccagatctattcttaaaaagactctcagccagataaatgtcaaaaccggtgttgcatcaagtggcagcgatggaggagaggataccactgcatattatgctatgtcagggaggaagatccaaaattcaatgttcacatcagaaagctcaacagaagttagaggtggaacggaaatcactttggatgctttagctgcatacctgaaatacctagaaggaacagggaaggctagttggcaagagttgcatgataaagtacggttaactgaaactagagatggtgcctcgttttgcactttgtttggtcctgcacttcagcttggagttatatccaagaggagagtttaccatgaaactattcagtatgagagagaccggaatgctggatttatatcaccatttggatactcaacacctacagtgacagcagcagtagatgctatctgttcaatggagtggtattggctcttggccttgaaatcccaagtatgcattgaaggaaattaccctgtcagaatctggagatggaaaggtcatcttatacagtatacctctgttggtcatgagggtccttcggttcttcttgtgcatggatttggagcttccctacagcattttcgtgataatataggtgccattgctgatcagggatgccaagtttgggcaattacccttcttggcttcgggaaatcagagaaaccaaatatcaactattcagaacttttatggtcggaattactgagagacttcattgttgatgttgtgaaggagcctgttcatcttgttggtaactcaatcggaggttatatctgttctattactgccagcttatggccttctcttgcaaggtctctgatccttttgaatacagctggttcagttgtgccaagttactcttttattccattaagtgaagaaggacggacttcatggctttccagtttgcaggcacgcctccttctgctcttcttgaggtcaagagcaggaggcattcttaaggaatactatcctacaagaactgaacgggttgacaagccacttgtggatgagataataagagctgtatcctcagatcacaaatatagcctgcaattctttttccttgacagacaaattcagtcatatgatcctggcgcagcaaccgttattgagagcatattcagtttcaatctttccattcctctcaactttttatttgattcttttggtggaaaaatcttaattgttcagggaatgaaagatccacttacaaaatccaagtcatttgtttccatgcttagggagcattgcagcaaggtccatattagagagctagatgcaggtggcaaaaaggagatgaatattgaacactgtacagaattttgggttgaagtgcgaggccgcaaagaattcaagacatggtccagagcccatatgaatggcccgagagaacaagtagccctcctaactataaggctccactttggggccaagcccatgttttgttgggccaaagcctacgccagtacacgatcatcttcatcgttcggtccccgtctcccagttcgagcccacgccatcacggcctcgccgatgctcccgtcgccaccggcgccgccgccgatctcgccggcgcggctgcacaagctcgtgacctcccagtcggacccgctcctcgcgctcgagctagtcaccgtcaccgcgccgaccaccgcgccccacccgtcgacgctccacgcgctcgcgctccgcctctcccgccgccgcgaacacctcccccacgcgctcgcgctcctgcgccgcctcccgtcgccgccctccccgcggatcctcctcccgctgctcctctccgcgctccgcctccgccggcagcctcacctcttcctctccaccttcaactccctcttcgtctccggccccagcccgttgccgctccaccccgagcttctcctccgcctcctctccgttctctcctccaccgcttcctacttcccgtgcgcgctgcacctcctccgcgacgtctccacccgccttcccctccccgagccgctcgtcctcgcctcgcacaacctgctcatcgaagccgccgcccgctccggccacctcgccgtgtcaatctccctcttccatcgcctccgctccctccatgtgtctcccaacgccgagacataccgcatcctgacccagtcactctgccgcaggggccaggtccgcactgcggccaccctgctcgacgaaatgctccacaggggcatccctgctgacccactggcatacaccaccgtgctgaacgcgctctgccgtaagaagcagcttcgagaggcttaccgcttgctgtgcctcatgcgaggccgtggggtctcacctgacattgtacattacaacacggtcatcgtcggagtgtgccgtgagggacggccactggatgcctgcaaggtgttcggagatatgagggagagtgggtgcgcgccaaatgcggtggcatatactgcggtggtcaatgggttgtgtgtgagtggattatatgacaaggcagaggcataccttgatgatatgttgggcaaagggttactaccacatttctctgtgttacattcagtgattaagggatgctgtgcagttgggaaggttaatgaggctgcagggatgatgactcgaatgcttgatcttgggatggttccacatgctgagacctggagttcagtgatcaggagtgtttgtagtgatgaggataatgtcgaggttaggagatattgtttgacttcaactaagatctgggcggttttaaccggaggcgtggtgttcgcggctgccgaatcaaagcgttactcagacacgatgctggaactgctactttttgctttggaagatcttaagatggttttgaagtctcaggagtctgatcttctcataggcttgggaaatgctgaagatgttgttctcaagcttgtaaatgaggtacaagcgggcctcattttcacagaagaggaagttgagtacagagtgcgcaatgttctggccagtgttgaatcatctctctctaatgcatcatacctatcgggaaaccctcctgagatagtggtttggagtgcctcattgtatgactacaagatttcttgtgctattgatgcctctaaacgcacacacaacacagtgtcaaacttaaacgaaatcctctttagctacacatacaaaaacatcctccttagcaatagcatggtttaa

SEQ ID NO: 5261 - DNA, 204 bp, Oryza sativa
  Clone ID: PAT_MRT4530_12066C.1
atggcttggcttgagatggaccatgtcggccggaacagcgacgacgtcatggcggcggcgcctgatgaagtgctgaaccaaaaactactcattgcaaagcctcaaaagcaacgagactgtcttctggcattccattggagggggaaattctcagatttcaagtatcgtcgacttgagaatggaagacaaagcttggaaatgtag

SEQ ID NO: 5262 - DNA, 156 bp, Oryza sativa
  Clone ID: PAT_MRT4530_12067C.1
atggaggcccttgcttgccgggatgggatgtacaacttgccggccgagagaaactcatgccttagcgaagctgatgacaggctgggtgagtggcattcagtcccagcttgtatcgagcacctagtgactgaaggttgtaattctgcagtttcttga

SEQ ID NO: 5263 - DNA, 338 bp, Oryza sativa
  Clone ID: PAT_MRT4530_12068C.1
ttttgatttttttttttttttttttttttcctgcacgagaaaatggcgtttaccccatgcgcttttattagatcatggggaggatcggatccattaagtccacaaagctacaaaatcccgaggggggcccacaggctgcaacacaaggatgtgattcatgacagcaggggtgggcgtgggccaccattgagcgcggcaaaagatggtgctggtatactccctaaaagccatgaaaaatgaatacgtgggcccacctcgtactacagatccgggggtatgggaaccgatgtttagaaaaatagaaccaccaatccacgaagaaaaaaaccgggctctcc

SEQ ID NO: 5264 - DNA, 914 bp, Oryza sativa
  Clone ID: PAT_MRT4530_12069C.1
aatctcaaaaggtcaccacatatagattaattatgagtattaggaatcatcaactccagaccccaccttgactgttgtgatataaaaatagtaaatagtgaagaaaaagagaaaccagtaggaatgatataaaaacccttaatgttatttcatagtggcttggtaattttaatttatatctcaccgacaagttgaatttggtagtacctttttgtatgcatatggttctcgtggatcccccgggctgcaggtgtgaatattttgatttttttttcaactctataccaaagtttacgagtttgccacccaatatatgatttcccctacatattgaccactaaaatgcctccagtatacatatttcccaccaataagaaaatattatatatagcccacttgtccagtatataagtcttgtatatttgttaattaagtttgtttttttttcattagattttttgttcagcatatgaagagccatcgtttgcagaaatgataatagcaccaaatgtttttgggcagcttatgaaagatgattcatgtacacgaaaaccatgaaaatattttgtgtagcatataagaggccaattatatttcccaaataattatcttgccaaaaatataatatttttctttctaaatgcctttgtatttgattatactgtagatattaatgaatgccaagattctaataattacccttgtcacggagaatatgccataacaaacccggcgattttgattgtttctgccgtgcgggtagccgaggaaatgcaactattcctggaggatgtcggaaggacttcttacctctaaaagcacagctggcaattggaattgctgcatgtgtgttggctggcctgtttgctttccttggatgggaagtgattcggcacaaaaggagcattagaaaa

SEQ ID NO: 5265 - DNA, 186 bp, Oryza sativa
  Clone ID: PAT_MRT4530_1206C.1
ctagtcgtcgacgactccgctgctctccagtctccattcctcaatctgctccttgctcctcagcgtctccatcttcgccacggtgccgatgagcgaggagaagtctgcgatgcgctccctgtcctccacctcctgcaatccctcctgctcctcgggccgtcgacgggtggttcgccgcagcgtcat

SEQ ID NO: 5266 - DNA, 390 bp, Oryza sativa
  Clone ID: PAT_MRT4530_12070C.1
atggcgatgagcgatgagaagccagggcgcaacaatggtgaagcgggcggtgcctggattggggaaaacagctccgacgacggacgggtttcagagaggcacaaaataggctcgccgaacttcggagaactcggcaagtcaaggaggggattctatatttttttgactctgttaggaactcaattgggctgtacatgggctatgttagccatactacaagcccagcccatggaggctgaagaaaggatacaaaaggcagcagcagccctgctcgaggcatcgaacagatcaattggcgaacggcgaaccgcggcggcgacctggtggccagttggcaccttgtcgatttccttcctccctacctaccttccttcttcctctaccttctag

SEQ ID NO: 5267 - DNA, 614 bp, Oryza sativa
  Clone ID: PAT_MRT4530_12071C.1
atgaatgcaaagtttgtattcgtatgtatactaagtttgtatttgtacgtatacaaagtttgtatacacgtataaaaagtttatatacgtggatgcaaagtttgtatacgcgtatataaattttgtatacgttgtgtattttttagtttttttatttttaatacgtatgtatataaagtttgtatttatcgtatacaaagtttgtatatgtcctatataaacttcgtatacgtgtgtgtgtgtgtttttatgcattaaaaatatatatttatatatatatatatgtatgtatatactatatacacacacacgtatagaagtagtagattagatacagagagactagaggaagggggcgactgatcgcgcgctcgcctccccgcgcggctgatcgtgtatcagccgcccccgactatagctggctcggcctgaatatcagtacctcacatgaggaatacaaggtagcacagcacacgagctcaaagacaacaacaatacaaatgagtcccaaactcataatcacaaggcgacttggacacgctttgcaatagtataaatgaaatgaagcgaaggcattaatttatgaaagtgagaatggtaggagttcaccttgg

SEQ ID NO: 5268 - DNA, 906 bp, Oryza sativa
  Clone ID: PAT_MRT4530_12072C.1
atgtatgcaatgctcctcacatagtcaaatgaataatgtaatttacagtttacaatgttgtttacatctacatggttgccgggggcgaaagagaagcagaaaaaccgtcgtgattcctttttttccttccattctactttctagatagatttcatttttggtgtagtctgctattgactttgactcgattcatttggtacagtaggggggctcctcctaaatgcgtgctttctgcaccgttggaaaatgccatcatacagcaaatcaaactgcactccggctctttcacgatttacaatgaaaagaatgtgatcagcctcaattatcttgtaataccatatcccaggctgcaaaggatggcaatcagaatcatccactaccaaacggtttggatgctctgtaggaatgcgagggtgcgtcatggagattgtgttcaaagccccatcattatcttcccaatcttcatccctgtatcctttgtaaggtagaggtgcattttgagggtgcctccacatacacatttggaggactcggaggaagagcatggggtgaattccaaggacgcttgaaggcactgtaattccaaaaagctttcttgttctcttcgtagcataactgaagtagaatgtatttgggaaggtcctcaatgtagagttaagtgttagagatccttgaatcgtaagatcaggcagaatccaatctcctgaggcaaatgggccagtgtgccccagcaacagatcaattagacctgagaggcccactttcctccatgacatctcaaagtggtcaaaaccaaaattgtagtaattcttcagccaaggaatgtctagccaatcatagacgataactccaatccggcagagctgaagaagacagattgatttcatggatcttccgtcttcagcc

SEQ ID NO: 5269 - DNA, 427 bp, Oryza sativa
  Clone ID: PAT_MRT4530_12073C.1
attgcatcctctgcaaacaatttgtagaattgcagtgttctctgattgaatcatgcatctaccttgtgcaattctttttataaagcaaccaggaatactgatgactttatttagattgaacattttacggtacgggtgcacagtagtgggaagcaacaaagagtgcaattgatcagctaaccaatccactcggaaatcctattcctgtgccagctctaattagctgtgtataaggtcaaaacgatgttggcactgtgccttctgcactattggtgttggaaattggccttttgtgcttagcctggctctttgcttggttattcagctagtgttttatcataataaatgtaacactggatggcatcgttgtatcgatttccagttattgtactgatttaagtgttaagttgtcatgttgttacataca

SEQ ID NO: 5270 - DNA, 590 bp, Oryza sativa
  Clone ID: PAT_MRT4530_12074C.1
ccaccaacaccatttcgacagtgttgactcctggtatagatgagagacaattaaaagaagaaagaagatcaactttgatggtgcgagacagaaacaaaattcggaatatacagttctaagagaaagaaagaaagaagaaaaaaagaacagtcaattgattagaccttccatgaggcgtctccaaagaacaaacaaaatcagttaaaaccaaactatcatctcatcatggcctccccctttccctttccgtgcactcatcataccggcagcagcaaacaagacaaatcccaacagcaactaaccggtcaaacaagagtcaaattacccacaggatctccccagctcgccgctccacccttgcggcgccgccgtcgtcttccgccccagcgacgaccttgtcctcgccgccatggcgtccttcgccgccgcgtccttcttgtccttgaagaacccgaacaccggccgcgagcacaccggcacgttcagcaccaccggcgccacgcggacgccggaggagtatgaccggtcgacggcgcgggagcgtggcttcgccgcggcgtggagggtgcacggtgagctggagctgcgct

SEQ ID NO: 5271 - DNA, 491 bp, Oryza sativa
  Clone ID: PAT_MRT4530_12075C.1
catggttgtttttttcttctcatcgaaacaacttttccttttcttccgtgttattgcactgaaatagttgtcatctatataatttagggaagtaagagatctgaacaactggtggagcaagaaaagagtgatgttataagtccagtcgatgccatccgtaagattcctgtgccctttctgttctactacctccccacgtcttcttaaggcttattttgatttgaaaaagtattcaacaataagcacctgcataatatcagtgtgagaactctttgaaatataaatctattggtatgttttatgcactaaatgtaattgtagtttgaccaagttttgggttaaaatctacaaaaaaattacctttagaaatcaaaatgcaccttaatcgtcacagcagcacaagtttgtagtttcatgtggcagttggatgagcttttggcttaatgctcttacaactttaaaatcacaggtcctgctgatgatgtggagct

SEQ ID NO: 5272 - DNA, 623 bp, Oryza sativa
  Clone ID: PAT_MRT4530_12076C.1
ccggccgggcgagggagccgccgcgcgtgtggctccgcgtggccgacgaggacccggagccggaggagttcgacgacgaggcggatgatgatgagccggagatggacgacgacgacgccgacgtcggcgccggcgaggtggacgcgcgcgccgacgacttcatcaacaacttccgccaccagctcaagctgcagcgcatcgactcctacctccgccaccgcgacatgctccgccgcggccacgccgccgccgccgccgccgcggtgggcagcgacttgtgagacgcgtgtgatttccagcaatccgagggggctagccgcaaaactgctgataaaaaaaagaagaagagaaatacagggagaggaggaagaactcgagagagaaaaaaatggtagtttctttctttctccccatctcttctgttttggtttattttctttttttttctcctttcaaaatgcttagtagtagtataatattatcgtagcatccgactttttggatagaatcttgtgtaatgcagcaccatatcatgtgaaaatttcatcctcataagagatttggataaggattaaaaaaaaaaaaaagtttctgtgacgaaaaaaaaaaaaaaaaaagcgggc

SEQ ID NO: 5273 - DNA, 1491 bp, Oryza sativa
  unsure (1)..(1491): unsure at all n locations
  Clone ID: PAT_MRT4530_12077C.1
gcacgagggttcgatcgatcgatcgtgtccatgctgctccggctgaaggccgtcgccgtccatccggcggcgctccttgggcgaccgcgcagccatgacgcaccccagctcgtcggtcgcacgggcgcgtcgacgacgacggcgaggcggaaggcggcgaggagcgccgtgacggtgacgatggcgctcaaggaggagccggaaggcagccgtagcggcttcgccggcggcgttccgagctgggaccccgggctggagatccaagtccctttcgagcaaagaccggtgaacgagtactccgccctcaaggatagcgtactctactcgtgggcagagctgagcccggggtcattcttcctgcgcctaggcagcctgtggctgatcaccttcacggtgctcgccgcgcccattgcagctgcaagtttcagtccaggaaaggatccactcaaattcgtgctagcagctgggattggaactctgctcctcgtctctttggtcgttctccggatttatctgggttggagctacgttggtgataggctgttgtcggcggttgtgccgtacgaagaaaccggatggtacgacggccaaatgtgggtcaagccaccagaggtattggctcgtgacaggctcttgggatcttacaaggtaaagccggtgattaacctgctgaagcagacgctggtgggcaccggcgctctgctggtcggcgcggtgtcgctgttcgcgttcgcggcccccgtcgaggacttcctgcactccgtgaacgcaccaccatccgctgcctcctccaagcccagtctcagaagggaggagctgctgcgtctgcccgtggaggtgaggcaagacgacgacctcgccgctgccgccgcggaggccgccgacggacggccggtctactgcagggaccgctactaccgggcgctcgccggcgggcagtactgcaagtgggacgacctgctcaactgacaaaatacttctgtattacccaacggatacggtgtgcagtgtgtcctgaatcctgatatatgcagattggcatgcgaagcctccgcaactgtgtaatcggaacgaaattttgtgaccattggttgcgttaatgggacagatagataaatgcttaatttataaaaaaaaaaaaaaaaaaaaaaaaaaaaaaaaaaanaaaaaaaaanaaaaaaaaaaaaaaaannnaaaaacttcctcgagggggggcccggaacccaattcgcctattagggagtggaattacgcccccctaattgccggggtttacaacgtcgggctgggaaaaacctgggtttcccaacttaaatggtttggagacaatcccctttccccagttgggtaaaaaccaagaggcccccaccgatgcctttccaacattggccaacctaattggaatggggccccccctttctcggccttaaaccgcggggggtgtgggttaccccagtggacctttacattgcaaggcctaagccccttttt

SEQ ID NO: 5274 - DNA, 1934 bp, Oryza sativa
  Clone ID: PAT_MRT4530_12078C.1
atggcggtagagcttgaattgttccagaaggacagcaaaggcagattcccttgggggcccactaaaatctggcccacgtggaggagaggcgaggcccatctccatgcggcggcgcccctgcctaaccctaaacgcgatgcgataaccaccaccaccatccgcttcttcccccttcggatcgagaaaaaagcgaaaggacctcttgaccccccaaccacaccgaggccgccgcggaggaggaggaagaggaggagatcgaggatgtttttcagccgcttcgatccgtggccggtgttcttccggagggagtggaagcgctgctggcccttcctcaccggcttcgccgtcaccggcgccatcatcaccaagatgaccgccggcttcaccgaggaggacctcaagaactccaagttcgtccaggcgcacaagaagcactgatctgatccgtgcctccatggtgaaggaacagctggtattgcctaagtcttcagtttggcctatttttctgttccaaatgaacctacctgttttttgtttatccatttgggtggacaaccgctccagttgtatctaataagaggcgtttgaatctttggaccaaaaaatttgagcttctggtataaacctgtaatactcttcaagtgccaaaaaaaaaaaaaaaaaaaaaaaaaaaaaaaaaaaaactcacataagcatgttgctcagcccgtctcacgtgaagcacttatctatctccgtaattgtgagaaaatttttgatttggtatatgacgaccttgagaagtaatggtatgttttgttttggattccgtatctacttttgtgcagaaccggagtcaaatgttgccgtttgttttgtgcagaacaggattttatatctcttgctctcgctaatttatctggtgtgtagaattgcagatcaatgatacatggcaaggtcagagcgccaatgaaatactaaaatggtaacagaagctcctgttcctgtaatttcttagtttctctatacaataatccgggctgcaggattcccccccgcggatcgagagaggcaaaaagagcgaaagaaccacttgaccccccaaccgcaccgaggccgccgcggaggagatcgagatcgaggatgtttttcagccgcttcgatccgtggccggtgttcttccggagggagtggaagcgctgctggcccttcctcaccggcttcgccgtcaccggcgccatcatcaccaagatgaccgccggcttcaccgaggaggacctcaagaactccaagttcgtccaggcgcacaagaagcactgatctgatccgtgcctccatggtgaaggaacagagctgggattgcccaagtcttcagtttggcctatttttctgttccaaatgaacctacctgttttttgtttatccatttgggtggacaaccgctccagttgtatctaataagaggcgtttgaatctttggaccgaaaaatttcagcttctggtataaacctgtgatactcttcaagtgccaaaaaaaaaaaaaaaaatttatttattttttttatttaattttcttgatatataaatactatatttctcgggggggggccccggccccaattcgcctttagggaggttgtttacgcccgctcactggccggcgttaacaaacgtcgtactggggaaacccttgctttacccacattaatcgcctggaaaaaaaccctctttccccagttgtggtaattgcaaaagggccccaaccgttcgccctttccaaaagttggctaccctaatggccaatgggaaccccccctttaccgggcccattaacccccgggggttttggtggtttaccctccaagagtaccgttccactttccaagctcctttgacccccgcttcatttgggttttatgtccttatctttttaccacaaattttgcgggctttcg

SEQ ID NO: 5275 - DNA, 222 bp, Oryza sativa
  Clone ID: PAT_MRT4530_12079C.1
atggcttgtgactgtggagaagcaagccaagcagtcggtggcagtgagaaccagagacctccatatggatacggcgctgcctgcggcgtcggaacagcgagaggaccagcaaatgtggcacttgctgttaccacttctttgaaggacatgcgtatggctaataatttctacagcggcagccttgagtgggcagtccatggcactgaaggtgatgatgcataa

SEQ ID NO: 5276 - DNA, 403 bp, Oryza sativa
  Clone ID: PAT_MRT4530_1207C.1
gtggcgcggtccagctccgcggcaacggcggcggctacgaagcggcccgtggcgacggcggcggcgcggctccagtccgcggaggcgccggcggctgggacgctaggccgtggccactgcggacgtgcggatccagtccgcgggggcaccggcacatgcaaccctgcccgtagcgacgggggaaggcccagatacctgtgcttgaggcttactgcatgcaggacgatggaagtcgcaacagaatttgggcggttccagagcatatcgatgatacagaatactatgttaatatttaactacgacaaccagcgcaaataacttatgcagcttcagctaacactgactctcgcattccttcgacatagctgacaacaccttcatagctggagcttttgccattaac

SEQ ID NO: 5277 - DNA, 300 bp, Oryza sativa
  Clone ID: PAT_MRT4530_12080C.1
agatctcccaggcctcgtgttacgtcaacaaatacccaccaaccatcattggggagtcatctcagccgtccaggagaaacctggatcaaacggcgctgcggggggttcggccgaacccaatggttcggccaaaccatgggctgggccgacctggcccaatttcggcaggcagcctcctcttttgctctcatacatagacttgtgaattttggcccaattcatcgtaccaattctgagttcttggcccattcatgcataagtctgattctagacatcgtccgattgatttatcgtttgtgt

SEQ ID NO: 5278 - DNA, 437 bp, Oryza sativa
  Clone ID: PAT_MRT4530_12081C.1
tgccaaacttaatttttcttcctgtccttggctgctgtttggtgggccatgagtagtagaaatgtggagtggttaaaattgggaagaagggtgaaaaatgagtctctctctggcaagaagttactgcgagcctcagtcccatacgcctgaaataaccatagtcttataattaagcctagtcccatcttacatcttccccattccggtgtgcaaagcatatgcaatgcattgctctctcttctcttctgttcacctcaccacctgcaaaagttacattttgcagcagcagcagcagcagcaaaggccagcacacacagtcatcacctctgatgaaaaaaggccatctctctttttgacagcggtaaacaaacaatagcccttgtgtcctgctctccattataattaaccagtaaaaacttctgatcaccacataaaat

SEQ ID NO: 5279 - DNA, 342 bp, Oryza sativa
  Clone ID: PAT_MRT4530_12082C.1
atggtgacgccgccaccccttccatcgccaccgcatcatcctcccagacgacttctttttgtccgcctccatctcctccccttccccatccacctccactccccctccccctcccccatcccctctaccaccccgcgcgccaccttctgcacctcctccctccctcctgcctccatcccctcctccttcgtttccgtctccgcctcctccaactccctccaccaccacccactccctctcggcatccttcgtctccgcctcattccggctccctctcggagttcactgctcccaccatttgcgcgccgccgtggacggtcacggcgtgaccacctcccatag

SEQ ID NO: 5280 - DNA, 1407 bp, Oryza sativa
  Clone ID: PAT_MRT4530_12083C.1
atggccctggctgcggcggcagcgggagaggagctgcacaacctcggccccgccgccgccgactccttctgcgcggctgcgtcgcggccttcttggtcctctacggcgcgcgtcggcgccgcatcctctccttctcgacggcatcctccgtcagggcacacggagtccccggcagcggcggcggcgagagcggaggcggaattgggggaggtgcggcggaagctgaatcggcggaggcgggcagtctccgcaagttacaggcgaaagatgccggcgagagggagcgcggggcagcgaccggcggtggatgacgatcttgacgccgtcgaacacgaccgactccttgggtatgtacaccaagaactcgtcataccgcttcgggggcaggtgccagccgtattgccgcggtaccgcctcgccgtggcgtcctcgaagaacacggcgaggatggcgtcgaacatcgagcgccgcatcggcttgtcccccgaatgggcagaagcagccaaatctaacatgtgttatgaaaaatccacacgaacaagatggcgtgtgttcacatggacatgtgacagtgtcctcgaagaacactgggacatgccgccagagcagttcatgaagacgcatgcatcgatgcggttggcgcactcggagaggaggaagaaggaaaggccacccgcctcggcgggtgccggggagaaggacaggcgcggtgaaggaacgcggccgggtccatcccgcgtggtcccgggtgggacccgcttgtcggcgactcggctcaccgtgagcgaggtgcacgcggggcgtgctagggtttggggagggaggcgcggcgcatgcgcgcggttcgcggaggacgcggtgcggcgggcccacgcgcagcctcacagctcgcggtggaccgcgtgcgcgagggaggggaaacggagggagcggctagccgggtcagccgatccggtcgcggccgaggtggcgccgacgtggcgcctacgtggcagccacgcgggccggcgggaggttgaagaagacgccggccggaacggacggcggacggcggtggcgagcagcggagcgaaccatggcgatacaagcgaaggcgagcacaccgggatgttgcacaggacgaggggagacgagccaacggctcggattcgccaggggatgctcgacggcggcggattgcggcggcggcaaccggcggcgagagaagggggaaacggcgacggcgcgacgagagaccgattcgggcgagctagagcatctacgcgactccgggagtccgttgctggcgtcggattgggtggagctacgccgagcgaggccggcgacgagcgggtgctacggagcacgggcggcgacggcggcgagcacacagcgggcggcggcaatggtcggggcggcgctagctag

SEQ ID NO: 5281 - DNA, 564 bp, Oryza sativa
  Clone ID: PAT_MRT4530_12084C.1
atgggccgacggcacgggagtgatctctttggcctcgggccggggaagaggaggaagtcgagctcccggagtccccttccgcgtccacgaacgcaccggctctcccggtgcttggcgatgaacggcggaggcgagacagaggggcggcaatggcgtggtggcggcgagcgaaacgggaggaggaatggatgggaaggcgccttggtttataggacgacgatgtcggtttggaaaccgaccttgggcggtcaaggcgcgagctggcgctcggcgctcgcagccaaaacggtgacagaggcggatgacgccggcggggaggggaaaaggaaaaaggaagggagaaagggagcttgccccttgccactttgggaaaaggaggagggagcgggggcgacgcggcagagggaggaggagctctgcctccgtcccttggaggctagcgcgtggagtggcgggggccgggtcgtgatgacggcgatgacggtggggcggtgtggagcggagcggcgacatgggcggcaggcgcgggcaggcgcggcagatgctgacggcggcagcgactag

SEQ ID NO: 5282 - DNA, 1439 bp, Oryza sativa
  Clone ID: PAT_MRT4530_12085C.1
atagatctcgagatttgagggcgcggcccgagagaatggggcggctcgggtgcggaggggagagagagagccggtgggccgggtccatcccgcgtggtccccggttggacccgcttgtcggcgactcggctcaccgtgagcgaggtgcacgcggggcgtgctagggtttagggagggaggcgcggcgcatgcgcgcggttcgcggaggacgcggtgcggcgggcccacgcggagcctcacggctcgcgatggaccacgcccgcgagggggcggagggaagcggcggaccggggtctacttgacccggtcgcggctgaggtggcgccgacgtggcgcctacgtggctgccacgcgggccggcgggaggaagacgacgacgccggctggaacggacggcggtcgacagcggcaagcggcggagcaaaccatggtgatacaggcgaaggcgagcacaccgggatgttcgacggcggcggattacggcggcggcaaccggcggagagaaaagggggaaacagcgacaaggtcacgaggggccgattcccggcggtgagagcatctacgcggctacgggaatccaccccttgcgccggattaggaggaatcgcatcgagggaggccggcgatgagaggcgcttccgagctcgggcggcaacggcggcgagcacacggcgagcgggggaagaggaagaaggcgagcgcccggagtccccttccgcgtccacgaacgcactggctctcccggtgcttggcgatgaacggcggaggtgagacagaggggcggcaatggcgcggtggcggcgagcgaaacgggaggaggaatggatgggagggcgccttggtttataggacgacgatgtcggtttggaaaccgaccttgggcggtcaaggcgctagctggcgctcggcgctcgcggccaaaacggcgacagaggcggatgacgccggcggggaggggaaaaggaaaaaggaagggagaaagggggcttgccccttgccactttgggaaaaggaggaggggatggggcgacgcggcagagggaggaggagctctgcctccgtcccttggaggctagcgcggggagaggcggggccgagtcgatgacgacggcgatgacggcggggcggtttggagcggagcgacgacacgggcggctggcgcgggcaggcgctgacggcggcggcgaccaggcggtcggccaccatggcgcgcgcgcgcgggaagcaacgggcggcgcggcgagaagcggcagcgagggcggaggacgctcggctcggcgcggctcatgcgcacgcgtgcgcagcgcacgggcagagcgggggagagggagagagagagagagagagagccggggagggagtaggagatgggccgagaggagtttggcccatcgttcatcccaagggaggaagatagagaatctcaggaaggcttttca

SEQ ID NO: 5283 - DNA, 6573 bp, Oryza sativa
  Clone ID: PAT_MRT4530_12086C.1
ttagtatggtgacatgccgatgggtgtgttataagcagtcctatattcccaaagtgcatcaggtagccttttcttccatgccttccccatctcattgacagtcttctgcagaatattcttgatttgtctgttgctcgtttctacctgtctacttgtctggggatgatatagagtggcaatattgtgttgagccccaagtttttgcaaaaagtttcggaaggtcttattgatgaaatgggaccctccgtcacttatcaccatccccagagttccaaaacgagggaagataatctcatggaacatctgacgggcgtgcttggcgtctgcggccctgcatggcattgcctctacccacttggacacatagtcaacggccaccagaatatactcgcagtcataggactttgggaaaggtcccatgaagtcgatgcagatctttgcgtatgtcctaaatgctccatagtgacctccatatggggcagcatgacacttctcaatgatcttcatgccttcatctaccggaacgcatctccgtagtagaccatctgaacaaactctgtacaagtaaggtgcatcccacaagtgcctgcggctctcgtagatcaacctcttcttattttctcccggtggtacatgcctcacaaggataaagttgacgatggctgcataccacgggtcaaagtctgtgactttcaacagcatgtcgtctcgcagatagtcatttatcagtagctctcctctctctccgccgtcgccgccgagctccgttccgccgccgccgccgctccggacttcctcccgactcggcgacacctccgtccgcttcgccgtgttgccgtcgaccccgtccgccgctccgcttcgcccgtcgactgccggagcgccgtcgccatcgtcatcccgagccgcgccgccgtcttcctccgctccgtccgccgtttccaccgccttcgccgtcttggggtgagccgaagaccgccgttcgccttccccctttcctcctctctctcgggtgccactccgccgcgccattggtcgccggcggcgaccatcggggcgcgggtgcgcgccactcccgtcggccgcgccggcgaggccgccctcgggtgcgccctcgcggctgccaagtggggcccggccgtcagccgcccgcgcccgggggggtgcggctgacgcgcgggacccacggcgccgaccgccgccagccgcgtgcgccccggtccaccgtggaccgagcggctgacgcgtgggccccacttcccgtggacccgggcaaatgaaggctacacgagctgcggcccggtagtcgagatgtcatggcacagggccggtgtcctgctgctaggggctcagtcctgcctacctgtcccgggggtttcggccgtaggtggggttgggtcggtactcttgtctatggctaggatgggttggaaactatgtcacgtcttccgtccgtataccgtggtgatggccggcagcatcaaccgtcgtggtctggacctgactggcttcgctttggagctgcggggcatgtgcgttgtcctggggtatccgcatggggtggactaccagggcaagcagctcccggagcaggagggtgacgatgcagagccccacgctacttgggaggttactgtagtgatcctcactggctcacccgagaggacttcgttggcagtcaccgcggatggtgcgtcgtgggttggtcgagaacaacaagcagatcctggagctgcattaggagaatctgcagctgaagaaggacctagacgcagtggaggcgcagctgcgtcagctcaagatcgcccagggagaggtctgtcgccccaagcgtcgccgcgtctgccgcagcctgaagatcaccgcccgcaagagtacctccaggcccgagcttgttcgtcagtccctggcgtggacctgcttcgtcgagacccctcgtgccgagcccgcgcccatggttcctcaggaggatggagcctccggcgttggcagcacggaggatgcgctgctgctcaccttccgccctggcccgtcgcagcagtagacgagcagttagtaggattgcgtatggtgacaaccaggagaagtgctgttaccggtgaaggcagtcaccccgaaggcagcaaccacaacaaccatggcagcccacatccacctcctcctccgcctccaccaccaccaccagacaccaacgccattctcactcaaatcctcgcccagcaggccaacatgatggctgctttcctccaccacatccaaaatctgccacaacataatgctccaccaccacccccacaacactctaaactcgccgagttcctccgcatccgtccacctaccttcgctagctccaataaccccgtggatgcgttggattggttgcatgccgtggggaaaaagttagacaccgtgcagtgcagcgatgaggagaaagtcatcttcgccgctcaccaactgcaggggcccgcatctctatggtgggaccatttccaggctacgcagccagaagggcagcctattacttgggcccgcttcaccgccgctttccggagaacccatgtgcctgccggagtcatggcccttaagaaaagggaattccgagagctgaagcaaggcaaccgctccgtgatggagtatttgcatgagtttaacaacctggcccggtatgccccggaggatgtacgggaagatgaggagaagcaagagaagtttttggcaggaatggaccctgagctgtccgtgcgcctggtcttcggggactattcggatttccaacgtctggtggacaagagcatccgcttggaagtcaagcacaaggaactggagtcgcacaagcgtcgcttggcgactttccgcaatcaacagggggctaaccaaagggtccgctacaccaatccctatccagggggatcgtccttgcagcagcaacctcgctccgcgccccgacctcaattcgtggtgcgcgtcccacagccgcagcaacagcagagtcagcaagggactcgtgcgccccgtcctcctacgccagccatgcagcctggtcaaggccgcggggacgttcaaggtcagcagcgtctgtgcttcaactgcttcgagcctgggcactttgcggataaatgcccaaagccgcggcgccagcaaggccaagcgcctccccgccccaacaacggtggtaaggatgtcattcggggtcgggtgaaccacgtgacggccgaggacgtgctgacaactccagacatcatcgttggtacgttcctcattcattccatccctgctaccattttgttcgactctggagcttcccactcgtttatatctgtgccattcgtggggagaaatcagttgggggtagaaaggcttaggaaccctctgctcatcaccacccctggaggggttatgacagcaaagtattatagccctgccgttcctatagaagttcagggaattccttttccctcggatctgattcttctagacaccaagaacttggatgtgatccttgggatgaattggttggctcaattccaaggagtagtggattgtgcaagacgcaccgtcactctgtaccgagggccggaacaaccagttgttttctttgcacccccaacctctgtcggtagttcagaacttcatcagataagactgtcgaaaatccccatcgtcagagagttcggagacgtgtttccggaagaactacctggtatgccgccgaagcgagagattgagttccggatagatcttgctccaggaaccactccccagtacaagcgaccctaccgtatggcatcaaatgaactggccgaagtcaagaaacagttggaagagttgaaagaaaaggggtatatacggccgagtacttccccctggggtgctcctgtgatttttgtggagaagaaagacaagacaaagaggatgtgcgttgactacagagctctcaatgaagttaccatcaaaaacaagtaccctcttccccggatcgatgatctgttcgatcagcttaaaggtgccactgtattctccaagattgatcttcattccggatatcaccaattacgtattcgtgaagaagatatccctaagaccgcattcaccacgcgatacggactgtatgaattcacggtgatgtcgttcggtttaaccaatgctcctgccttcttcatgaacttaatgaacaaagtgttcatggaatacttggataagtttgttgtggtttttattgacgacattctggtgtactcacaatcagaggaagaccatcagcaccatctccgtctggtgttgggaaagttgcgggaacatcaattgtatgacaaacttagcaagtgtgagttttggttgtccgaagtcaaattcttagggcacatgatatctgctaaaggagtcgctgtggaccccgaaacagtgaccgccgtcactgattggaagcaacccaagacagtcactcaaattcgcagcttcttgggtttggcaggatactaccggaggttcatcgagaacttctccaaaatcgctcgacccatgacacagttgttgaagaaagaagagaaatttgtgtggagcccgcaatgcgagaaagcgttccaaactctcaaagaaaagctggtttcctcgccagtgttaatcttaccggatactcgcaaggacttcattgtgtattgtgacgcttcgcgccaaggattggggtgcgtgctcatgcaggaaggtcaggtggtagcctatgcctcacgccaactacggccccatgaaggcaattaccctacccatgatttggagttagccgctgtggttcatgctctaaagatctggcagcactatctcattgggaatcgctgtgaaatatatactgatcataagagtttgaaatacatcttcactcagtcggatctgaatcttcggcagaggagatggttagaactcatcaaggattatgatgtgggaattcactatcatcctggtaaggccaacgtggtcgccgacgctctaattcgaaaaagccattacaacactcttgacgtccgtggcattccacccgaacttaatcaacagatggaagccctgaacctaagcatagttggtcgtggattcttggctacgctggaagccaagcttaccttgctcgatcaaatccgcgaggctcagaagaatgatccggatatgcgtggactcctcaagaatatgaaacagggtaaagccgctggtttcacagaggatgaacacggaaccctatggaacggaaatcgggtatgtgttccagacgacagagaacttaaacagctgatacttcaggaagctcacgaaagtccttattccatccaccctggcagtacgaagatgtacttagacttgaaagagaaatactggtgggttagtatgaagcgggaaattgcagagttcgtggccctttgtgatgtgtgccagcgtgtcaaggcagagcaccaacgaccggccggacttctccaacctctccaagtaccagaatggaaatgggatgaaattgggatggatttcatcaccggacttccaaaaacccaaggtggatatgattctatatgggtagttgttgaccgattaaccaaggtagctcggttgattcctgtgaagaccacctatggagggaacaaactagccgagctctacttcgctaggatcgtgagtctccatggcgttcctaagaaaattgtatctgataggggaagccaattcacctctcacttttggaagaagctccaagaagagctgggtacccgattaaatttcagcaccgcgtatcacccgcagacagatggacagaccgagcgtctaaatcagatcctagaagatatgcttcgtgcatgtgtcctagatttcgggaagacctgggataagagtctcccctatgccgagttctcttacaataacagctaccaagccagcatacaaatggcaccctatgaagcgttgtatggacgcaaatgccggacaccgctattgtgggaccaagttggggaaagccaagtgttcaggactgatatcctgagagaagctgaagctaaagtcagaaccattcgggataatctaaaggtggcacagttccggcagaagagttatgcagataaccgacgccgtaatctgaaatttgcagtggacgattttgtgtaccttcgggtcacgccattgcgaggtgtacacaggtttcagacgaaagggaagctcacacctcggtttgtaggtcctttccgtatcattgctcgacgcggggaagtcgcttaccagttggagctgcccacctccttgggcaacgtgcatgatgtgttccatgtgtcgcaactcaagaaatgtcttcgagtgccatccgagcaggccgattcagagcaaattgaagttcgcgaagacttgacctacgtggagaggccagtgaaaatcctggacaccatggaacgcaggaccaggaaccgggtaatccctttttgcaaggtccaatggagcaaccacgctgaggaagaagctacttgggagcgtgaagacgagatgaaagcagcccatcccgatcttttcgccagttcttccgaatctcggggtcgagattccgtttaa

SEQ ID NO: 5284 - DNA, 1417 bp, Oryza sativa
  Clone ID: PAT_MRT4530_12087C.1
atgaagttgcagtatacacgggcagttcttgccagccttttttgtgtctgtctgtcggctgtctgggtggcggcagcaacggccgatataccggcagggcaacgccccggttgcccggagaggtgtggcgacgtcgagatcccgttcccgttcggcatcggcaagcactgcgcgatgcagacgaagtatccgtttgatctcgactgcttggacgtgaatggcaccaagaagcctttctacaacaataacgaggttaccaagatttcggtgcaggagggcaaggcatggatgaagttgggcatatccagtcagtgttatgaccacgtgacaggccatatcctgtacgacagcaacgcaacggcagaattcgcctcacggctcgcggtggaccgcgcgcgcgagggggcggagggaagcggcggaccggggtctgcttgacccggtcgcggccgaggtggcgccgacgtggcgcctacgtggctgccacgcgagccggcgggaggtagacgacgacgccggccggaacggacggcggacgacagcggcgagcggcggagcgaaccatggcgatacaggcgaaggcgagcacaccgggatgttgcacaggacgaggggagacgagccaatggctcggattcgccgggggatgctcgacggcggcggattgcggcggcggcaaccggcggcgggagaagggggaaacggcgatgaggtcacgaggggccgattcccggcggcgagagcatctacgcggctacgggaacccaccccttgcgccggattaggaggaatcgcatcgagggaggccggcgacgagtggcgcttccgagctcgggcggcgacggcggcgagcacacggtgagcgacggcagcagtcggggcggggtgcgtccggagtccccttccgcgtcctaacgcgcaccgactcctttggcacacgtgacggcggcggtcggcgatcggcgagacagaggggacggcaatggtgcgggcgaaaaaggggaagattgggaggggaaaaggaagggagggcgcctgggtttatagggcggcgatgtcggtttggaaaggctcagcctccgtcccttgtaagctagcgcgcggcggtggcggggccgggtcgatgacgacggcgatgacggtggaccggtttggagtggagcggcgacacgggcggcagacgcggggcaggcttggcaggcgctgacggcggcggcgactagccagtcggccaccacggcgcgcgcgcgcgcgggcggcgcggcgatttgggcggcatcggcgggaatggcagcgagagcgggagggagggctcggcgcggctcacggcagagcggggagagagagagagagagccggggagggaggggggatgggccgagagggattcagcccatcgaacccgagggaggcaaaa

SEQ ID NO: 5285 - DNA, 4995 bp, Oryza sativa
  Clone ID: PAT_MRT4530_12088C.1
atggacatctctagggcaaatgaaggctacacgagctgcggcccgatggccggcagcatcaaccgtcgtggtctggacctgactggctttgttttggagctgcggggcatgtgtgttgtcctggggtatccgcatggagtggactaccagggcaggcagctcccggagcaggagggtgacgatgcagagccccacgctgcttgggaggttactgcagtgatcctcactggctctcccgagaggacttcgttggcagtcaccgcgggtggagattctttctccgccgcttgccagaacgccgctctcctcgccatcggcactcttcaccagcgctacccggacgagttgcagcactcgccctaccgctaccaccctcgccgcggaggagcccgcgaccacgccacctttcgggatgctagctcggaggatgacgctaccatcatgcatctggcgcgcatggtggaggcgtacgacgcggcccgtatcgacttccatcagatggtgcgccgtgggatggtcgagaacagcatgaagatcctggagctgcgtcaggagaatctgcagctgaagaaggacctagacgcagtggaggcgcagctgcatcagctcaagatcgcccagggagagatggtgacgaccaggagaagtgctaacaccggtgatggcaaccaacctgaaggcagcaaccacaacaaccatggcagcccacctccacctcctcctccgcctccaccaccaccactagacaccaatgccatcctcacccaaatcctagcccagcaggccaacatgatggctgctttcctccaccacatccaaaatccgccacaacataatgctccaccaccacccccacaacactctaaactcgccgagttcctccgcatccgtccacctaccttctctagctccaataaccccgtggatgcattggattggttgcatgccgtggggaaaaagttagacaccgtgcagtgcagcgatgaggagaaagtcgtcttcgccgcccaccagctgcaggggcccgcatctctatggtgggaccatttccaggctacgcagccagaggggcagcctattacttgggcccgcttcaccgccgccttccggaggacccatgtgcccgccggagtcatggcccttaagaaaagggaattccgagagttgaagcaaggcaaccgctccgtgatggagtatttgcatgagtttaacaacctggcccggtacgccccggaggatgtacgggaagatgaggaaaagcaggagaagttcttggcaggaatggaccctgagctgtccgtgcgtctagtctccggtgactatccggatttccaacgtctggtggacaagagcatccgcttggaagccaagcacaaggaactggagtcgcacaagcgccgcttggcgaatttccgcaatcaacagggagctaaccaaaggatccgctacaccaatccctatccagggggatcgtcctcgcaacagcaacagcagcagcaacctcgctccgcgccccgacctcaattcgtggtgcgcgtcccacagccgcagcaacagcagagccagcaagggacccgtgcgccccgtcctcctacgccagccgcgcagtctggtcaaggccgcagggacgttcaaggtccgcagcgtctgtgcttcaactgcttcgagcctgggcactttgcggataaatgcccaaagccgaggcgccagcaaggccaagcgcctccccgctcaaacaacggtggtaaggatgtcattcggggtcgtgtgaaccacgtgacggccgaggacgtgctgacgactccagacgtcatcgttggtacgttcctcattcattccatccctgctaccattttgttcgactctggagcttcccactcgtttatatctgtgccattcgtggggagaaatcagttgggggtagaaaggtttaggaaccctctcctcatcaccacccctggaggggttatgacagcaaagtattatagtcctgccgtccctatagaaattcaggggatcccttttccctcggatctgattcttctagacaccaagaacttggatgtgatccttgggatgaattggttggctcaattccaaggagtagtggattgtgcaagacgcactgtcactctgtaccgagggccggaacaaccggttgttttctttgcacctccaacctctgtcagtagttcagaacttcatcagataggactgtcagaaatccccatcgtcagagagttcggagacgtgtttccggaagaactacccgatatgccgcccaagcgagagattgagttccggatagatcttgctccaggaaccactcctctgtacaaacgaccctaccgtatggcagcaaatgaactggccgaagttaagaaacagttggaagagttgaaagaaaaggggtatatacggccgagtactttcccctggggtgctcctatgatttttgtggagaagaaagacaagacgaagaggatgtgcgttgactacagagctctcaataaagtcaccatcaaaaacaagtaccctcttccccggatcgatgatctgttcgatcagcttaaaggtgccacggtattctccaagattgatcttcgttccggatatcaccagttgcgcatccgtgaagaagatattccgaagaccgcattcaccacacgatacggactccatggtcacatcattctggtatactcacaatcagaggaagaccatcagcaccatctccgtctggtgttgggaaagttgcgggaacatcaattgtatgccaaacttagcaagtgtgagttctggttgtccgaagtcaaattcttagggcacgtgatatctgctaaaggagttgctgtggaccccgaaacagtgaccccgtcccgattggaagcaacccaagacagtcactcaaatccgcagtttcttaggtttggcaggatactaccggagttgttgaagaaaaaatataaatttgtgtggagcccgcaatgcgagaaggcgttcaaaactctcaaagaaaagctggtttcctcgccagtgttaatcttgccggatactcgcaaggacttcatggtgtattgtgacgcttcgcgccaaggattggggtgcgtgctcatgcaggaaggtcatgtggtggcctatgcctcacgccagctacggcctcatgaaggcaactaccctacccatgatttggagttagccgcggtggttcatgctctaaaaatctggcggcattatctcattgggaatcgctgtgaaatatatactgatcataagagtttgaaatacatcttcacccagtcggatctgaatcttcggcagagaagatggttagagctcatcaaggattatgatgtgggaatccactatcatcccggtaaggccaacgtggtcgtcgacgctctaagtcaaaaaagccattgcaacactcttaacgtccgtggcattccacccgaacttaatcaacagatggaagccctgaacctaagcatagttggtcgcggattcttggctgcgttggaggccaagcctaccttgctcgatcaaatccgcgaggctcagaagaatgatccggacatgcgtggactcctcaagaatatgaaacagggtaaagccgctggtttcacagaggatgaatacggaaccctatggaacggaaatcgggtatgcgttccagataacagagaacttaaacagctgatacttcaggaagctcacgaaagtccttattccatccaccctggcagtacgaagatgtacttagacttgaaggagaaatactggtgggttagtatgaagcgggaaattgcagagttcgtggccctttgtgatgtgtgccagcgtgtcaaggcagagcaccaacgaccggccggactcctccaacctctccaagtaccagaatggaaatgggatgaaattgggatggatttcatcaccggacttccaaaaacccaaggtggatatgattctatatgggtagttgtggaccgactaaccaaagtagctcggtttattcctgtgaagaccacctatggagggaacaaactagccgagctctacttcgctaggatcgtgagtctccatggcgttcctaagaaaattgtatctgataggggaagccaattcacctctcacttttggaagaagctccaagaagagctgggtacccgattaaatttcagcaccgcgtatcacccgcagacagatggacagaccgagcgtctgaatcagatcctagaagatatgcttcgcgcatgtgtcctagatttcgggaagacctgggataagagtctcccctatgccgagttctcctacaataacagctaccaagccagcatacaaatggcaccctatgaagcgttgtatggacgcaaatgccggacatcgctattgtgggaccaagttggggaaagccaagtgttcgggactgatatcctgagagaagctgaagctaaagtcagaaccattcgggataatctaaaggtggcacagtcctggcagaaaagttatgcagataaccgtcgccgtaacctggaattcgcagtggacgattttgtgtaccttcgggtcacgccattgcgaggtgtacacaggtttcagacgaaagggaagctcgcacctcggtatgtgggtcctttccgtatcgttgcccgacgcggagaagtcgcttaccagttggagctgcccgcctccttgggcaacgtgcatgatgtgttccatgtgtcgcaactcaagaaatgtcttcgagtgccatccgagcaggccgactcagagcaaattgaagttcgcgaagacttgacctacgtggagaggccagtgaaaatcctggacaccatggagcgcaggaccaggaaccgggtaatccgtttttgcaaggtccaatggagcaaccacgccgaggaagaagctacctgggagcgtgaagacgagctgaaggcagcccatcccgatctcttcgccagttcttccgaatctcggggtcgagattccgtttaa

SEQ ID NO: 5286 - DNA, 1788 bp, Oryza sativa
  Clone ID: PAT_MRT4530_12089C.1
atgggccggccggcccaagaaagcggcccaaggcgcgcgcgcgggcggggaggggagagagagagagccggtgggccgggtccatcccgcgtggtcccgggtgggacccgcttgtcggcgactcggctctccgtgagcgaggtgcacgcggggcgtgctagggtttggggagggaggcacggcgcatgcgcgcggttcgcggaggacgcggtgcggcggacccatgcgcagcctcacggctcaccgcggaccatgcgcacggggggtaaacggagggagcggctggccgggtcagccgatccggtcacggccgaggtggcgccgacgtggcgcctacgtggctgccacgcgggccggcgggaggtagacgacgacgccggccggaacggacggcggacgacagcggcgagcggcggagcgaaccatggcgatacaggcgaaggcgagcacaccgggatgttgcacaggacgaggggagacgagccaacggctcggattcgccggagggagctcgacagcggcggattgcggcggcggcaaccggtggtgagggaagggggaaatggcgatgaggtcacgaggggccgattcccggtggtgagagcatctacgcggctatgggaatccgttgctagcgtcggattgggcggagctacgccgagcgaggccggcgatgagcgggcgctacggagcacgggcggcgacggcggcgagcacacagcgagcggcggcaacggaagaagacgagcgcccggagtccccttccgtgtccttgctcgtgccggctcctccgacatgagcgacggcgaacggcgacagcgaacagagcacgggaggcggcgacaatggagtggaggcgaatgggagaggaaaggaaagggggaaaagcttgggtttatatgggcgacgatgtcggtttgggaaccgaccttgggcggtcaagggagcgagctggcgctcggcggtcgcggccccaacggcgacaggggggaggatgacgccggcgggaggaaaaagggaaaaagagggagagaaagggggctttccccctttccactttgggaaaaggaggaggggatgggggcgacgtggcagagggaggaggagctctgcctccgtcccttggaagcacgcgcgagcaggggcggggccaaggcgatgacgacggcgataacggccgggcggtttggagcggagcgacgacacgggcggcaggcgcgggtaggcgcggcaggcgctgacggcggtggcgactggccggtcggccaccatggcgcgcgcgcgcgggaagcaacgggcggcgtggcgatttgggcggcgtcggcgggaaacggcagcgagggcggagggcgctcggctaggcgcggctcacgcgcacgctcgaggtcgaggtcgtcactgtcgtgcggatccgacgagctcgagatcagtcggtgggagagaagaagcgcgacggcgcatcggtccggtcgtcaccgcgtcgagaccggccgctgcctcgtcgatcccggccgtcgccgcatggatccgcgtccgccgcgtcgatcccggccgccgccgccacgtcgatttgcggccgccgcgtcgatccgccaccgccgctgcttgatccgccgccgatgcatcgatccgccaccgccgccgctcgatccggcggtggggagagagggctgggccagggagaggcggcgcctccgggaaggggaggcgtggggagagagagtcgatgccgggaaagagaccgctggagagagaagaggcgctagagagattgggttggggagatgg

SEQ ID NO: 5287 - DNA, 282 bp, Oryza sativa
  Clone ID: PAT_MRT4530_1208C.1
atgggcctcggcctcaacctcgggctcgggaccgccctcagcctcggcctcgacctcaggctcgggaccggcctcggcctcaacctccgcctcgggctcgggaccgccctcggcctcagcctttgcctcgggctcggggccacctctggcttcggctcccgggccgcgtcttccttcaccccccgatcctgggtggtgctccgcgtgggccctggtcctggagctgccctcgagacgagcgtcgccactcctgtcgcccgcggtgggtcggattcctcctaa

SEQ ID NO: 5288 - DNA, 5355 bp, Oryza sativa
  Clone ID: PAT_MRT4530_12090C.1
atggatgaagtcgggggtcgatggacattctccagggcaaatgaaggctacacgagctgcggcccgatggccggcagcgttacccgtcgtggtttggacatgactggcttcgtcttggagctgcggggcatgtgcgtggtcttggggtatccacatggagtggattaccaggccaggccgctcccggagcaggagggtgaggatgcagagcctcacgctggttgggaggtcactgccgtgatcctctccggctctcccgagcggacttcgctggcagtcaccgcgggtggagattccttccccgccgcttgccagaacgctgctctcctcgccatcggcacccttcaccagcgctacccggacgagttgcagcactcgccctaccgctaccaccctcgtcgtggaggcgcccgcgaccacgccaccttccgagatgccagctcggaggatgacgctaccgtcgtgcatctggcacgcatggtggaggcatacgacgcggctcgtatcgacttccaccagatggtgcgccgtggcatggtggagaacaacatgaagatcctggagctgcgtcaggagaatctgcagctcaagaaggacctcgacgcgttggaggcgcagctgcatcagctcaaggtcgcccaaggagaggacagccgccccaagcgccgccgcgtctgccgcagccagaagatcaccgcccgcaagagcacctccaggcccgagcttgttcgtcagtccctggcgtggacctgcttcgtcgagacccctcgtgccgagcctgcgcccgtggttccccaggagggggaagcatccggcgttggtagcacggaggatgcgctgttgctcaccttccgccctggcccgtcgcagcggagaaatgttagcaccggtgaaggcaaccaacccgaaggcagcaaccccaacccccaaggcaacccacctccaccaccaccacctgacaccaacgccattctcacccaaatcctcgcccagcaagccaacctgatgaccgctttcctccaccacctccaaaatccgccacaacagaatgctccaccactacctccccaacactccaaactcgccgaattcctccgcatccgcccacccaccttctctagctccaacaatcccgtggatgcgttggattggttgcatgccgtggggaagaagctagacacggtgcagtgcagcgacgaagagaaagtcaccttcgccgcccaccaactgcaagggcccgcatctctatggtgggaccacttccaggctacgcagcccgaggggcaaccgatcacttgggctcgcttcaccgccgctttccggagaacccatgtgcccgccggagtagtggctctcaagaagagggagttccgggagttgaaacaaggcaaccgctccgtgatggagtacttgcacgagttcaacaatctggcccggtacgctccggaggatgtgcgggaagatgaggagaagcaggagaagtttctggcaggaatggaccctgagctgtctgttcgtctggtctctggggactatccagacttccaacgtctggtggacaagagcatccgcttggaggccaagcacaaggagctggagtcgcacaagcgccgcttggcgaacttccgcaatcagcagggtgctaaccagagggtccgctacaccaatccctatccagggggatcctcctcgcagcagcagcagcagcaacctcgttccgcgccccgacctcaattcgtggtgcgcgtcccacagccgcagcagcagcagaaccaacaagggactcgtgcaccccgtcctcctacgccagccgtgcagcccgttcaaggccgcagggacgcttcaggtccgcagcgtctgtgcttcaactgcttcgagcccgggcactttgcggataaatgcccaaagccgaggcgccagcaaggccaagcgcctccccgctccaacaacggtggcaaggacgtcatccggggtcgtgtgaaccacgtggcggccgaggacgtgctgacaactccagacgtcattgttggtacgttcctcattcattccatccctgctaccattttgttcgactctggagcttcccactcgttcatatctgtgccattcgtggggaaaaatcagttgggggtagaaaggcttagaaaccctctgctcatcaccacccctggaggggttatgacagcaaagtattatagccctgccgtccctatagaaatccaggggattccttttccctcggatctgattctgctagacaccaagaatttggatgtgatccttgggatgaattggttggctcaattccaaggagtagtggattgcgcgagacgcactgtcactctgtaccgagggccagaacaaccggttgttttctttgcaccaccaacctctgtcaggagttcagaacttcatcagatagaactgtcagaaatccccgttgtcagagaattcggagatgtgtttccggaagaactacccggtatgccgcccaagcgagagattgagttccggatagatcttgctccaggaaccactcctctgcacaagcgaccctaccgtatggcagcaaatgaactggccgaagttaagaaacagttggaagagttgaaagaaaaggggtacatacgtccgagtacttccccttggggtgctcctgtgatttttgtggagaagaaagacaaaacgaagaggatgtgcgttgactacagagctctcaatgaagtcaccatcaaaaacaagtaccctcttccccggatcgatgatctgttcgatcagcttaaaggtgccactgtattctccaagattgatcttcgttccggatatcaccaattacgtatccgtgaggaagatattccgaagaccgcattcaccacgcgatatgggttatatgaattcacggtgatgtcgttcggcttgaccaatgcacctgcattcttcatgaacttaatgaataaagtgttcatggaatacttggacaagtttgttgtggttttcattgatgacattctgatatactcacagtcagaagaagaccatcagcaccatctccgtctggtgttgggaaagttgcgggaacatcaattgtatgccaagcttagcaagtgtgagttctggttgtccgaagtcaaattcttggggcacgtgatatctgctaaaggagttgccgtggaccccgaaacagtgaccgccgtcaccgattggaagcaacccaagacagttacccaagtccgcagtttcttgggtttggcaggatactaccggagattcatcgagaacttctccaaaatcgctcgacccatgacacagttgttgaagaaagaagagaaatttgtgtggagcccgcaatgcgagaaggcgttccaaactctcaaagaaaagctggtttcctcgccagtgttaatcttgccggatactcgcaaggatttcatggtgtactgtgatgcttcgcgccaaggattggggtgcgtactcatgcaggacggtcatgtggtagcctatgcctcgcgtcagctgcgacctcatgaaggcaactaccctacacatgacctggagttagcagcggtggttcacgctctgaaaatctggcggcactatctcattgggaatcgctgtgaaatatataccgatcataagagtttgaaatacatcttcacccagtcggatctgaatcttcggcaaagaagatggttagaactcatcaaggattatgatgtgggaattcactaccatcctggtaaggccaatgtggttgccgacgctctaagtcgaaagagccactgcaacactctcaacgcccgagacatcccacccgagcttaatcaacagatggaagccttgaacctaagcatagtcggtcgtggattcttagctgcgttggaagctaagcctaccttgctcgatcaaatccgcgaggctcagaagaatgatccggacatgcatggactcctgaagaatatgaaacagggtaaagccgctggtttcacggaggatgaacacggaaccctatggaacggaaaccgggtatgcgttccagctgacaaagaacttaaacagctgatacttcaggaagctcacgaaagtccttactcaatccacccgggcagtaccaagatgtacttagacttgaaggggaaatactggtgggtcagcatgaagcgggaaattgcagagttcgtggctctttgtgatgtgtgccagcgtgtcaaggcagaacaccagcgaccggccggacttctccaacctctccaagtgccagaatggaagtgggatgaaattgggatggatttcatcaccggccttccaaaaacccaaggtggatatgattctatatgggtaattgtggatcgattaacaaaggtagctcgatttattcctgtgaagaccacctatggagggaacaaactagcggaactctacttcgctaggatcgtgagtctccatggtattcccaagaaaatcgtatctgataggggaagccaattcacctctcacttttggaagaagctccaagaagagctgggtactcgattgaatttcagcactgcctatcacccgcagacagatggacagaccgagcgtctaaatcagatcctagaagatatgcttcgcgcatgtgtcctagatttcgggaagacttgggataagagtctcccctatgccgagttctcctacaataacagctaccaagccagcatacaaatggcaccttatgaagcgttgtacgggcgcaaatgccggacaccgcttttgtgggaccaagttggggaaagccaagtgttcgggactgatatcttgagagaagctgaagctaaagtcagaatcattcgggataatttaaaggtggcacagtcccggcagaaaagctatgcagacaaccgtcgccgtgacctggaattcgcggtggatgattttgtgtacctccgggtcacaccattgcgaggtgtgcacaggtttcagacaaaagggaagcttgcacctcggtatgtgggtcccttccgtgtcatcgctcgacgcggagaagtcgcttaccagctggagttgcccgcctccttgggcaacgtgcatgatgtgttccatgtgtcgcaactcaagaaatgtctccgagtgccatccgagcaggccgactcagagcagattgaagttcgcgaagacctgacttatgtggagaggccagtgaaaatcctggacaccatggagcgcaggaccaggaaccgggtaatccgtttttgcaaggtccagtggagcaaccacgccgaagaagaagctacgtgggagcgcgaagacgagctgaaggccgcccatcccgatctcttcgccagttcctccgaatctcggggtcgagattccgtttaa

SEQ ID NO: 5289 - DNA, 1648 bp, Oryza sativa
  Clone ID: PAT_MRT4530_12091C.1
aagaatcctaccgccattaatggcattcccagccttcttctttttctttgacccagcaagcaagagcgtctagtcacctcaaccacgaacttgaatccgctgctctgctgctgctgctgcaactgttgcgctttgagtgtgactacagtgtctgctactcctactactctgctttgccactacttggttcacaggagggtggcgagagggagagtgtgaggagctgagagagggagagggattgggatggagttcttggtggctcaagcgctcctcctcctcgtcgtcgtctccaactccctcctcctcccttccttgggtcttgctgtttcaggtcaagaagcacacgaggtggccatggctggcctccatgatcagcagccgccatctccggcagcggtggctgcgcgtgtatcggtcgctcacgcggacctccccatggtggcctcctcggttcttggggcggagtcctggctcagggcccatgtcctggctcactacccctccaaccacgtcaccgccatcgccgtcgccgtcgcctgcgcccgcggcggaagccgccatggccaagacctccgagcctcgcgcgccgccaagaacctgcaccacgccctcgtgcgctggggcctcgtcgacgaaatcaagatcgacgcctcctccgccccgtgcgccgaggaggtgggaggaggggctctgaagcggaggctgtacggcatgcaccacctgccgccgccgctgccgccgacgtcggtggcgagtccgccgccgcccggcgtgccgttgtccttcgcgccgaacgcgccaccggaggttgtcccgtcggttccgcccgccgctgcgccgccgagcacgcccgtcgtcgtcgtgcctgcgcctgctacaagcccacccatgtcaatgccggctactccgcctgaggcggcggctggcggcatggcgccgtgctcggctccaccgacggcggcgatgtcgccgcagccgtgttccggtgagggagggaacggtggtgggcaatggtgcgtggccaagcccactgtccctctggacaggttgcaggaggcaatggattacgcctgcagccaggatggggtggattgccaggagatttcgggcgggggaagctgcttctacccggacaacatcgcggcgcatgcgtcgtatgcgttcaatagctactggcagaagatgaagcatattggtgggagctgcagctttggtggtactgctgtgcttatcaattctgacccaagttatctccagtgtcgcttcatgatgagttgaaaaatgctgaacttgaatcttctatttgggttcgttgagcgaagcgaagatctggatctcttgatggccgatggttgcattgtgctgcgaaacatcaagtctcattttttttgcccatccggggtcctctgttaggacgccgtgctgatgtaggattgctatatgttaaaagtcagattagatgcatagtttcgtctgattactgttagagcacaatttctctgcttggctcatggtggcctggaggtactcagcatcttgctgctggccacacgatgattatgtaaggcagaaaagatacctcaattggaacctgcatgctgatgttatgtccagtttattctgaagtattgtttcatttttggga

SEQ ID NO: 5290 - DNA, 402 bp, Oryza sativa
  Clone ID: PAT_MRT4530_12092C.1
atgactgcatgcacatggaccacgaatgaactatggcaatttactgctaaagaacaatatgttttcacgaaattggctaagcgtttcaataaaggttgccaggcacagctagatgccggagagggtacctgcataccagggcgtgctggaagtgggtggttgtgttgtcccatagtggacttggaactggaggggggcgcaggcggaaggcataactggcttcgtcaacagaatggacacggtgggcttggagtgcggctgtggaggtctcgacgcttccacctgtgtggaggtggtccgcaacagtttcaggcgatcgatcttattattttatctgccgatgcaactggagagaaggtgatacagcttcagctcgccgatctccttatcccttctatatga

SEQ ID NO: 5291 - DNA, 2242 bp, Oryza sativa
  Clone ID: PAT_MRT4530_12093C.1
agatgtaaagaacccatttttgtgctttgtttctgctgttatgtggagttatttagtgttaaagcctttttcttttccgtcggtcgtgtagacgctgcagcttcggaagatccgctcttcgttgaagtcgaagccgtcgattgggaaaacgagcaaggcaagacacatcatctcttcctctttcaaaacccctaaaacctgttttcggtggggtttgggtgcatgccagttgtgggaagtagcaccccggccactataaggactaaagctcgggcctctgttgcaaagcactaccgtacttccacatgtctaatgggtaaggcttagtttgtggctcagtcttgcctcctgggacaaggaataatacacgcacgtcaggaacgcctgttgggtgatttccggtcgtgacactcatgaaggcaactaccctacccatgatttggagttagtcgcggtggttcatgctctaaaaatctggcggcactatctcattgggaatcgctgtgaaaaatatactgatcataagagtttgaaatacatcttcatccagtcggatctgaatcttcggcagagaagatggttagagctcatcaaggattatgatgtgggaatccactatcatcccggtaaggccaacgtggtcgccgacgctctaagtcgaaaaagccattgcaacactcttaacgtccgtggcattccatccgaacttaatcaacagatggaagccctgaacctaagcatagttggtcgcggattcttggctgcgttggaagccaagcctaccttgctcgatcaaatccgcgaggctcagaagaatgatccggacatgcgtggactcctcaagaatatgaaacagggtaaagccgctggtttcacagaggatgaacacggcaccctatggaacggaaatcgggtatgcgttccagataacagagaacttaaacagctgatacttcaggaagctcacgaaagtccttattccatccaccctggcagtacgaagatgtacttagacttgaaggagaaatactggtgggttagtatgaagcgggaaattgcagagttcgtggccctttgtgatgtgtgccagcgtgtcaaggcaaagcaccaacgaccagccggacttctccaacctcttcaagtaccagaatggaaatgggatgaaattgggatggatttcatcaccggacttccaaaaacccaaggtggatatgattctatatgggtagttgtggaccgattaaccaaggtagctcggtttattcctgtgaagaccacctatggagggaacaaactagccgagctctagttcgctaggatcgtgagtctccatggcgttcctaagaaaattgtatccgataggggaagccaattcacctctcacttttggaagaagctccaagaagagctgggtacccgattaaatttcagcaccgcgtatcacccgcagacagatggacagaccgagcgtctaaatcagatcctagaagatatgcttcgcgcatgtgtcctagatttcgggaagacctgggataagagtctcccctatgccgagttctcctacaataacaactaccaagccagcatacaaatggcaccttatgaagcgttgtatgggcgcaaatgccggacaccgctattgtgggatcaagttggggaaagccaagtgttcgggactgatatactgagagaagctgaagcgaaggtcagaaccatttgggataatctaaaggtggcacagtcccggcagaaaagttatgcagataaccgtcgccgtaacctggaattcgcagtggacgattttgtgtaccttcgggtcacgccattgcgaggtgtacacaggtttcagacgaaaggaaagctcgcacctcggttcgtcggtcctttccgtatcattgctcggcgcggagaagtcgcttaccagttggagctgcccgcctccttgggcaacgtgcatgatgtgttccatgtgtcgcaactcaagaaatgtcttcgagtgctatccgagcaggccgactcagagcaaattgaagttcgcgaagacttgacctacgtggagaggccagtgaaaatcctggacaccatggagcgcaagactaggaaccgggtaatccgtttttgcaaggtccaatggagcaaccacgccgaggaagaagctacctgggagcgtgaagacgagctgaaggcagcccatcccgatcacttcgccagttcttccgaatctcggggtcgagattccgtt

SEQ ID NO: 5292 - DNA, 174 bp, Oryza sativa
  Clone ID: PAT_MRT4530_12094C.1
tgattgctgtgggataatcggtattttccgccttttgaagttaagcctgaaaaccgcttagccggcaagccgaaacgatccaaaacgcatccaagtccagtgaagcgagtaaagcggaaagagcgccctaatacgctaaaccgccttctccccgggcgttggccgattcattaa

SEQ ID NO: 5293 - DNA, 5044 bp, Oryza sativa
  Clone ID: PAT_MRT4530_12095C.1
ttattctgcacttgtgggtgtgtcttgttgagtacggtggttgtacttagtcttgctcaatttttcccaaacccagaagaggagcccctcgatgatgaaggctttggtgtctagctcgtgcctgccgtcaagcgcctgtggtagtcgccctagtcttccgctgtttctcgtttgtctctgtgtgtgctgggccttcgctgcccatatggccggcagcgtcagccgtcgtggtttggacatgactggcttcgtcttggagctacggggcatgtgcgttgtcctggggtatccgcctggagtggactaccaggccaggccgcttccggagcaggagggtgacgatgcagagccccacgctgcgtgggaggttactgcagtgatcctcactggctctcccgagcggacttcgctggcagtcaccgcgggtggagattccttccccgccgcttgccagaacgccgctctcctcgccatcggcactcttcaccagcgctacccggacgagttgcagcactcgccctaccgctaccaccctcgctgcggaggagcccgcgacttcgccaccttccgggatgctagctcggaggatgacgctaccatcgtgcacctggcgcgcatggtggaggcgtacgacgcggctcgtatcgacttccaacagatggtgcgccgtgggatggtcgagaacaacatgaagatcctggagctgcgtcaggagaatctgcagctgaagaaggacctacacgcgttggaggcgcagctgtgtcagcttaaggtcgcccagggtgagatggtgatgaccaggagaagtgctaataccggtgatggcaaccaacctgagggcagcaaccacaacaaccatggcagcccacccccacctcctcctccgcctccaccaccaccaccagataccaacgctattctcacccaaatcctcgcccagcaggccaacatgatgactgctttcctccaccacctccaaaatccgccacaacataatgctccaccaccacctccccaacactcaaaactcgctgagttcctccgcatccgcccacctaccttctccagctccaacaaccccgtggatgcgttggattggttgcatgccgtggggaaaaagctagacactgtgcagtgcagcgatgaggagaaagtcgtcttcgccgcccaccagctgcaggggcccgcatctctatggtgggaccatttgcaggctacgcagccagagaggcagcctattacttgggcccgtttcaccgccgatttccggaggacccatgtgcccgccggagtcgtggcccttaagaaaagagaattccgagagttgaagcaaggcaaccgctccgatgtgcgggaagatgaggagaagcaagagaagttcttggcaggaatggaccctgagctgtccgtccgtctagtctccggggactatccggatttccaacgtctggtggacaagagcatccgcttggaagccaagcacaaggaactggagtcgcacaagcgccgcttggcgaatttccgcaatcaacagggtgctaaccaaagggtccgctacaccaatccctatccagggggatcctcctcgcagcagcaacaacagcagcagcaacctcgctccgcgcctcgacctcaattcgtggtgcgcgtcccacagccgcagcagcagcagaatcaacaagggactcgtgcgccccgtcctcctacgccaactgtgcagcctggtcaaggccgcagggacgctcaaggtccgcagcgtctgtgcttcaactgctacgagcccgggcactttgcggataaatgcccaaagccgaggcgccagcaaggcaaagcgcctccccgctccaacaatggtggtaacgatgtcattcggggtcgtgtgaaccacgtgacggccgagaacgtgctgacaactccagacgtcatcgttggtacgttcctcattcattccatccctgctaccattttgttcgactctggagcttcccactcgtttatatctgtgccattcgtggggagaaatcagttgggggtagaaaggcttaggaaccctctgctcatcaccacccctggagtggttatgacagcaaagtattatagccctgccgtccctatagaaattcaggggattccttttccctcggatcttattctgctagacaccaagaacttggatgtgatccttgggatgaattggttggctcaattccaaggagtagtggattgcgcgagacgcactgtcactctgtaccgagggccggaacaaccggttgttttctttgcgcccccaacctctgtcagtagttcagaacttcatcagataggactgtcagaaatccccatcgtcagagagttcggagacgtgtttccggaagaactactcggtatgccacccaagcgagagattgagttccggatagatcttgctccaggaaccactcctctgtacaagcgaccctaccgtatggcagcaaatgaactggctgaagtcaagaaacagttggaagagttgaaaggaaaggggtatatacgtccgagtacttcccccaggggtgctcctgtgatttttgtggagaagaaagacaagacgaagaggatgtgcgttgactacagaactctcaatgaagtcaccatcaaaaacaagtaccctcttccccggatcgatgatctgttcgatcagcttaaaggtgccactgtattctccaagattgatcttcgttccggatatcaccaattacgtattcgtgaagaagatattccgaagaccgcattcaccacacgatacggactcaattgtgagttctggttgtccgaagtcaaattcttagggcacatgatatctgctaaaggagctgctgtggaccccgaaacagtgaccgccgtcactgattggaagcaacccaagaccgtcactcaaattcgcagtttcttaggtttggcaggatactatcggaggttcatcgagaacttctcccaaatcgctcgacccatgacacagttgttgaagaaagaagagaaatttgtgtggagcccgcaatgcgagaaggcgtttcaaactctcaaggaaatgctggtttcctcgccagtgttagtcttgccagatactcgtaaggatttcatggtgtattgtgacgcttcgcgccaaggactgaggtgcgtgctcatgcaggaaggacatgtggtagcctatgcctcacgccagttacggccccatgaaggcaactaccctacccatgatttggagttagccgcggtggttcatgctctaaaaatctggcggcactatctcattgggaatcgctgtgaaatatatactgatcataagagtttgaaatacatcttcacccagtcggatctgaatcttcggcagaggagatggttagaactcatcaaggattatgatgtgggaattcactatcatcctggtagggctaacgtggttgccaacgctctaagccgaaaaagccattgcaacactcttaacatccgtggcattccacccgaacttaatcaacagatggcagccctgaaactaagcatagttagccgtggattcttggctgcgttggaagccaagcctaccttgctcgatcaaatccgcgaggctcagaagaatgatccggacatgcatggactcctcaagaatatgaaacagggtaaagccgctggtttcacagaggatgaacatggaaccctatggaacggaaatcgggtatgcgttccagataacagagaacttaaacagctgatacttcaggaagcccacgaaagtccttattccatccaccctggcagtacgaagatgtacttagacttgaaggagaaatactggtgggtcagtatgaagcgggaaattgcagagttcgtggccctttgtgatgtgtgccagcgtgtcaaggcagagcaccaacgaccggccggacttctccaacctctccaagtaccagaatggaaatgggatgaaattgggatggatttcatcaccggacttccaaaaacccaaggtggatatgattctatatgggtagttgtggatcggttaaccaaggtagctcgatttattcctgtgaagaccacctatggagggaacaaattagccgagctctacttcgctaggatcgtgagtctccatggcgttcccaagaaaatcgtatctgattggggaagccaattcacctctcacttttggaagaagctccaagaagagctgggtacccgattaaatttcagcaccgcatatcacccgcagacggatggacagaccgagtgtctaaatcagatcctagaagatatgcttcgcgcatgtgtcctagatttcgggaagacctgggataagagtctcccctacgccgagttctcctacaataacagctaccaagccagtatacaaatggcaccttatgaagcgttgtatgggcgcaaatgccggacaccgctcttgtgggaccaagttggggaaagccaagtgttcgggactgatatcttgagagaagctgaagcgaaggtcagaaccattcgggataatcttaaggtggcacagtcccggcagaaaagttatgcatataaccgtcgccgtgacctggaattcgcaatggatgactttgtgtatcttcgggtcacgccattgcgaggtgtacacaggtttcagacaaaagggaagctcgcacctcggttcgtgggtcctttccgtatcattgctcggcgcggagaagtcgcttaccagctggagctgcccgcctctttgggcaacgtgcatgatgtgttccatgtgtcgcaactcaagaaatgccttcgagtgccatccgagcaggccgactcagagcaaattgaagttcgcgaagacttgacctacgtggagaggccagtgaaaatcctggacaccatggaacgcaggaccaggaaccgggtaatccgtttttgcaaggtccagtggagcaaccacgccgaggaagaagctacttgggagcgtgaagacgagctgaaggcagcccatcccgatctcttcgccagttcttccgaatctcggggtcgagattccgtttaa

SEQ ID NO: 5294 - DNA, 5595 bp, Oryza sativa
  Clone ID: PAT_MRT4530_12096C.1
atggatgaagtcgggggtcgatggacattctccagggcaaatgaaggctacacgagctgcggcccggtagtcgagatgtcatggcagagggttggtgccctgctgctaggggctcagtcttgcctgcctgtcccgggggttccggccgtaggcgggattgggtcgatgtacacctctgatcagagtataatctattcgaatagccgagccctcggttatgggcaagccgagcaatgtacccaaatggccggcagcgtcacccgtcgtggtttggacatgactggcttcgtcttggagctgcggggcatgtgcgtggtcttagggtatccacacggagtggactaccaggccaggacgcttccggatcaggagggagacgacgcggagccccacgctggttgggaggtcaccgcagtgatcctctccggctctcccgagcggacttcgctggcagtcaccgcgggtggagactccttccccgccgcttgccagaacgccgctctcctcgccatcggcacccttcaccagcgctacccggatgagttgcagcactcgccctatcgctaccaccctcgtcgcggaggagcctgcgaccacgccaccttccgggatgctagctcggaggatgacgctaccatcgtgcacctggcgcgcatggtggaggcgtacgacgcggctcgtatcgacttccatcagatggtgcgccgcgggatggtcgagaacaacatgaagatcctggagctgcgtcaggagaacctgcagctcaagaaggacctcgacgcagtggaggcgcagctgcatcagctcaagatcgcccagggagagatctgccgccccaagcgtcgccgcgtctgccgcagtcagaagatcaccgcccgcaagagcacctccaggcccgagcttgttcgtcagtccctggcgtggacttgcttcgtcgagacccctcgtgccgagcctgcgcccgtggttccccaggagggggaagccttccggcgttggtagcacggagggtgcgctgttgctcaccttccgtcctggcccgtcgcagcagtagacgagcagttagtaggcttgcgcatggtgacgaccaggagaaacgctgctaccggtgatggcaatcaacctgaaggcagcaaccacaaccaccaaggcaatccacctccacctcctcctccgcctccaccaccaccaccagacaccaatgccattctcacccaaatcctcgcccagcaagccaacatgatgaccgctttcctccaccacctccaaaatccgccacaacagaatgctccaccaccacctccccaacactctaaactcgccgagttcctccgcatccgcccacctaccttctccagctccaacaaccccgtggatgctttggattggttgcatgccgtggggaagaagttagacacggtgcagtgcagcgatgaggagaaagtcgtcttcgccgcccaccagctgcggggacccgcatctctatggtgggaccatttccaggctacgcagccaggggagcaacctattacttgggctcgcttcaccgccgctttccggagaacccatgtgcccgctggagtcgtggctcttaagaaaagggaattccgagagttgaagcaaggcaaccgctccgtgatggagtatttgcacgagttcaacaacttggcccgttacgccccagaggatgtgcgggaagatgaggagaagcaagagaagttcctggcaggaatggaccccgagctgtccgtccgcctagtctctggggactatccggattttcaacgattggtggacaagagcatccgcttggaagccaagcacaaggagctggaatcgcacaagcgccgcttggcgaatttccgcaatcaacagggtgctaaccagagggttcgctacaccaatccctatccagggggatcctcctcgcagcagcaacaacagcagcagcaacctcgctccgcgcctcgacctcaattcgtggtgcgcgtcccacagccgcagcagcagcagaatcagcaagggactcgtgcgccccgtcctcttacgccaacggtgcagcctggtcaaggccgcagggacgcttcaggtccgcagcgtctgtgcttcaactgcttcgagcccgggcactttgcggataaatgcccaaagccaaggcgtcagcaaggccaagcgcctccccgctccaacaacggcgggaaggatgtcattcggggtcgtgtgaatcacgtgacggccgaggacgtgctgacaactccggacgtcatcgttggtacgttcctcgttcattccatccctgctacaattttgttcgactctggagcttcccactcgtttatatctgtgccattcgtggggagaaatcagttgggggtagaaaggcttaggaaccctctgctcatcaccacccctggaggggttatgacagcaaagtattatagtcctgccgtccctatagaaattcaggggattccttttccctcggatctgattctgctagacaccaagaacttggatgtgattcttgggatgaattggttggctcaattccaaggagtagtggattgcgcaagacgcactgtcactctgtaccgagggccagaacaaccggttgttttctttgcacccccaacctctgtcagaagttcagaacttcatcagatagaactgtcagaaatccccatcgtcagagagttcggagacgtgtttccggaagaactacctggtatgccgcccaagcgagagattgagttccgaatagatcttgctccaggaaccactcctctgcacaagcgaccctaccgtatggcagcaaatgaactagccgaagtaaagaaacagttggaagaattgaaagaaaaggggtatatacgtccgagtacttccccatggggtgctcctgtgatttttgtagagaagaaagacaagacgaagaggatgtgcgtcgactacagagctctcaatgaagtcaccatcaagaacaagtaccctcttccccggatcgatgatctgttcgaccaactcaaaggtgccactgtattctccaagattgatctccgttccggatatcaccaactacgtattcgtgaagaagatattccaaagaccgcattcaccacgcgatacaggctgtatgaattcacggtgatgtcgttcggtttgaccaatgcgcctgccttcttcatgaacttgatgaacaaagtgttcatggaatacttggataagtttgttgtggttttcattgatgacattctgatatactcacaatcagaggaagaccatcaacaccatctccgtctggtgttgggaaagttgcgggaacatcaattgtatgccaagcttagcaagtgtgagttctggttgtccgaagtcaaattcttagggcacgtgatatctgctaaaggagttgctgtggatcccgaaacagtgaccgccgtcaccgattggaagcaacccaagacagttactcaagtccgcagtttcttaggtttggcaggatactatcggagattcatcgagaacttctccaaaatcgctcgacccatgacacagttgttgaagaaagaagagaaatttgtgtggagcccgcaatgcgagaaggcgtttcaaactctcaaggaaaagctggtttcctcgccggtgttaatcttgccggatactcgcaaggacttcatggtgtattgtgatgcttcgcgccaaggattggggtgcgtgctcatgcaggacggttatgtggtagcctatgcctcacgccagctacgtcctcatgaaggcaactaccctacacatgatttggagttagccgcagtagttcatgctctaaaaatctggcggcactatctcattgggaatcgctgtgaaatctataccgaccataagagtctgaaatacatcttcactcagtcggacctgaatcttcggcaaaggagatggttagaactcatcaaggattatgatgtgggaattcactatcatcctggtaaggccaacgtggttgccgacgctctaagtcgaaagggccattgcaacactcttaacgtccgaggcattccacccgaacttaaccaacagatggaagccctgaatctaagcatagtgggtcgtggattcttagctgcattggaagccaagcccaccttgctcgatcaaatccgcgaggctcagaagaatgatccggacatgcatggactcctcaagaatatgaaacagggtaaggccgctggtttcacagaggatgaacacggaaccctatggaacggaaagcgggtatgcgttccagataacagagaacttaaacagctgatacttcaggaagctcacgaaagtccttattccattcacccgggcagtacaaagatgtacttagacttaagggagaaatactggtgggttagcatgaagcgggaaattgcagagtatgtggccctatgtgatgtgtgccagcgtgtcaaggcagaacaccaacgaccggccggacttctccaacctctccaagtacctgaatggaaatgggatgaaattgggatggatttcatcaccggacttccaaagacccaaggtggatatgattctatatgggtagttgtggatcgattaaccaaggtagctcgatttattcctgtgaagaccacctatggagggaacaagctagctgaactctacttcgccaggatcgtgagtctccatggcgttcccaagaaaatcgtatctgatcggggaagccaattcacctctcacttttggaagaagctccaagaagagttgggtacccgattaaatttcagcaccgcctatcacccgcagacagatggacagaccgagcgtctaaatcagatcctagaagatatgcttcgcgcatgtgtactagatttcgggaagacctgggataagagtctcccctatgccgagttctcctacaataacagctatcaagccagcatacaaatggcaccatatgaagcgttgtatgggcgcaaatgtcggacaccgctattgtgggaccaagttggagaaagtcaagtgttcgggactgatatcctgagagaagctgaagctaaagtcagaatcattcgggataatctaaaggtggcacagtcccggcagaaaagttatgcagataaccgtcgccgtgacctggaattcgcagtggatgattttgtgtatcttcgagtcacgccattgcgaggtgtacacaggtttcagacgaaagggaagcttgcacctcggtatgtgggtcctttccgtatcgttgctcgacgcggagaagtcgcttaccagttggagctacccgcctccttgggcaacgtgcatgatgtgttccatgtgtcgcaactcaagaaatgccttcgagtgccatccgagcaggccgactcagagcaaattgaagttcgtgaagatttgacctacgtggagaggccagtgaaaatcctggacatcatggagcgcaggaccaggaaccgggtaatccgtttttgcaaggtccagtggagtaatcacgccgaagaagaagctacttgggagcgtgaagacgagctgaaggcagcccatcccggtctcttcgccagttcttccgaatctcggggtcgagattccgtt

SEQ ID NO: 5295 - DNA, 5989 bp, Oryza sativa
  Clone ID: PAT_MRT4530_12097C.1
tcagagcaaattgacgttcgcgaagacttgacctatgtagagagaccagtaaaaatcctggacaccatggagcgcaggaccaagaaccgggtaatccgtttttgcaaggtctaatggagcaaccacgctgaggaagaaggtacttgggaacgtgaagacgagcgcctcccacctcggcgccgcctcctttggcttcaccgcatcctcgccgacctcgtccacctctccgtttcggtcgccaaccgccggagcgccgtcgtccccgtcgacccgatccgcgccaccgcctccctccgctccggccgcctcccccgtcgccgccgtcgccccgggatgagctgtggaccgtcgcctcctttccccttcccttccctctctcggccgccgctccgccgcgccggtggtcgccggctccgaccatcggagcgtgggcgcgccgcctcccgccgaccgcgcaagcatggccgccctcgggcgtgccgagtggctaccgcgtggggcctggctgtcagccgcccgcgcccttgggtgcggctgacgtgtggggcccacagcgccgaccggtgtgagccccggggtgcatggttttgatggtagcacctcggccatatatggaccggtcttcgggcctctgttgcaaagcactaccgtacttccacatgtctagtggggcaaatgaaggctacacgagctgcggcccggtagtcgagatgtcatggcacagggccggtgtcctgctgctaggggctcagtcctgcctgcctgtcccgggggttccggccgtaggtgggattgggtcgatgtacacctctgatcagagtataatttattcgaatagccgcgccctcggttatgggcaagccgagcaatgtacccaaatggccggcagcgtcagccgtcgtggtctggacatgactggtttcgtcttggagctgcggggcatgtgcgttgtcctggggtatccgcatggagtggactaccagggcaggccgcttccggagcaggagggtgacgatgcagagccccacgctgcttgggaggttactgcagtgatcctcactggctctcccgagcggacttcgctggcagtcaccgcgggtggagattctttctccgccgcttgccagagcgccgctctcctcgccatctgcactcttcaccagcgctacccggacgagttgcagcactcgccctaccgctaccaccctcgccgcggaggagcccgcgactacgccaccttccgggatgctagctcggaggatgacgctaccatcatgcacctggcgcgcatggtggaggcgtacgacgcggctcgtatcgacttccatcagatggtgcgccgtgggatggtcgagaacaatctgaagatcctggagctgcgtcaagagaacctgcagctcaagaaagacctagacgcagtggaggcgcagctgcatcagctcaagatcgcccagggagaggtctgccgccccaagcgtcgccgcgtctgccgcagccagaagatcaccgcccgcaagagcacctccaggcccgagcttgttcgtcagtccctggcatggacttgcttcgtcgagaaccctcgtgccgagcccgcgcccgtggttccccaggagggggaagcctccggcgttggcagcacggaagatgcgctgttgctcaccttccatggtgatgaccaggagaagtgctagtaccggtgatggcaaccaacctgaaggcagcaaccacaaccaccagggcagcccacctccacctcctcctccgcctccaccaccaccaccagataccaacgccattctcacccaaatcctcgcccagcaggccaacatgatgattgctttcctccaccacctccaaaatccgccacaacataatgctccaccaccacccccacaacactctaaactcgccgagttcctccgcatccgtccacccaccttctttagctccaacaaccccgtggatgcgttggattggttgcatgccgtggggaaaaagctagacactgtgcagtgcagcgatgaggagaaagtcatcttcgccgcccaccagctgcaggggcccgcatctctatggtgggaccatttccaggctacgcagccagaggggcagcctattacttgggctcgcttcactgccgctttccggagaacccatgtgcccgccggagtcgtggcccttaagaaaagggaattccgagagttgaagcaaggcaaccgctccgtgatggagtatttgcatgagttcaacaacctggcccgttacgccccggaggatgtgcggagatgaggagaagcaagagaagttcttggcaggaatggaccctgagctgtccgtccgtctagtttccggggactatccggatttccaacgtctggtggacaagagcatccgcttggaagccaagcacaaggaactggagtcgcacaagcgccgcttggcgaatttccgcaatcaacagggtgctaaccaaagggtccgctacaccaatccctatccagggggatcgtcctcgcagcagcaacctcgctccgcgccccgacctcaattcgtggtgcgcgtcccacagccgcagcaacagcagagtcagcaagggactcgtgcgccccgtcctcctacaccaactgtgcagcctggtcaaggccgcagggacgctcaaggtccgcagcgtctgtgcttcaactgcttcgagcctgggcactttgcggataaatgcccgaagccgaggcgccagcaaggccaagcgcctccccgctccaacaacggtggtaaggatgtcattcggggtcgtgtgaaccacgtgacggccgaggacgtgctgacaactccagacgtcatcgttggtacgttcctcattcattccatccctgctaccattttgttcgactctggagcatcccactcgttcatatctgtgccattcgtggggagaaatcagttgggggtagaaaggcttaggaaccctctgctcatcaccacccctggaggggttatgacagcaaagtattatagtcctgccgtccctatagaaattcaggggattccttttccctcggatctgattcttctagacaccaagaacttggatgtgatccttgggatgaattggttggctcaattccaaggagtagtggattgcgcgagacgcactgttactctgtaccgagggccggaacaaccggttgttttctttgcacccccaacctctgtcagaagttcagaacttcatcagatagtactgtcagaaatccccatcgtcagggagttcggagatgtgtttccggaagaactacccggtatgccgcccaagcgagagattgagttccggatagatcttgctccaggaaccactcctctgtacaagcgaccctaccgtatggcagcaaatgaactggccgaatttaagaaacagttggaagagttaaaagaaaaggggtatatacgtccgagtacttccccctggggtgctcctgtgatttttgtggagaagaaagacaagacgaagaggatgtgcgttgactacagagctctcaatgaagtcaccatcaaaaacaagtaccctcttccccggatcgatgatctgttcgattagcttaaaagtgccacggtattctccaagatcgatcttcgttccggaaatcaccagttgcgcattagggaagaagatattccgaagaccgcattcaccacgcgatacggactgtatgaattcacggtgatgtcattcggtctaaccaatgctcctgccttcttcatgaacttaatgaacaaagtgttcatggaatacttggataagtttgttgtggtgttcattgatgacattctgatatactcacaatcagaggaagaccatcagcaccatctccgtctggtgttgggaaagttgcgggaacatcaattgtatgccaaacttagcaagtgtgagttctggttgtccgaagtcaaattcttagggcacgtgatatctgctaaaggagttgctatggaccccgaaacagtgaccgccgtcactgattggaagcaacccaagacagtcactcaagtccgcagtttcttaggtttggcgggatactaccggaggttcatcgagaacttctccaaaatcgctcgacccatgacacagttgttgaagaaagaagagaaatttgtgtggagcccgcaatgcgagaaggcgtttcaaactctcaaagaaaagctggtttcctcgctagtgttagtcttgccagatactcgcaaggatttcatggtgtattgtgacgcttcgcgccaaggattggggtgcgtgctcatgcaggacggtcatgtggtggcctatgcctcacgccagctacggcctcatgaaggcaactaccctacccatgatttggagttagccgcggtggttcatgctctaaaaatctggcggcactatctcattgggaatcgctgtgaaatatatactgatcataagagtttgaaatacatcttcacccagtcggatctgaatcttcggcaaaggagatggttagaactcatcaaggattatgatgtgggaattcactatcatcctggtaaggccaacgtggtcgccgacgctctaagtcgaaagagccattgcaacactcttaacgtccgtggcattccacccgaacttaaccaacagatggaagccctgaatctgagcatagtgggtcgtggattcttggctacgctggaagccaagcccaccttgctcgatcaaatccgcgaggctcagaagaacgacccggacatgcgtggactcctcaaaaatatgaaacagggtaaagccgcgggtttcacagaggatgaacacggagccctatggaacggaaatcggcgtgtcaaggcagagcaccaacgaccggccggacttctccaacctctccaagtaccagaatggaaatgggatgaaattgggatggacttcatcaccggacttccaaaaacccaaggtggatatgattctatatgggtagttgtggaccggttaaccaaggtagctcgatttattcctgtgaagaccacctatggagggaacaaactagccgagctctacttcgctaggatcgtgagtctccatggcgttcccaagaaaatcgtatctgataggggaagccaattcacctctcacttttggaagaagctccaagaagagctgggtacccgattaaatttcagcaccgcgtatcacccgcagacagatggacagaccgagcgtctaaatcagatcctagaagatatgcttcgcgcatgtgtcctagatttcgggaagacctgggataagagtctcccctatgccgagttctcctacaataacagctaccaagccagcatacaaatggcaccttatgaagcgttgtatgggcgcaaatgccggacaccgctcttgtgggaccaagttggggaaagtcaagtgttcgggactgatatcctgagagaagctgaagcgaaggtcagaaccattcgggataatttaaaggtggcacagccacggcagaaaagttatgcagataaccgtcgccgtaacctggaattcgcggtggacgattttgtgtaccttcgaatcacgccattgcggggtgtacacaggtttcggacaaaagggaagctcgcacctcggttcgtgggtcctttccgtatcattgctcggcgcggagaagtcgcttaccagttggagctgcccgcctccttgggcaacgtgcatgatgtgttccatgtgtcgcaactcaagaaatgtctccgagtgccatccgagcaggccgactcagagcaaattgaagttcgcgaagacttgacctacgtggagaggccagtgaaaatcctggacaccatggagcgcaggaccaggaaccgggtaatccgtttttgcaaggtccagtggagcaaccacgccgaagaagaagctacctgggagcgtgaagacgagctgaaggcagcccatcccgatctcttcgccagttcttccgaatctcggggtcgagattccgtt

SEQ ID NO: 5296 - DNA, 2069 bp, Oryza sativa
  Clone ID: PAT_MRT4530_12098C.1
gatggagccgcgatctccgcggccgattcctctctctccggccgctctctctctctcccggcgctatataaacgttccccgtgcctctgtcctacgtttccaccgtccgccgctcgctctccccgtcggaatcgtgctcgcgccgtcgcatcttctctccgccgtcgccgccgagctccggttcaccgccgtcgtcgctccggacttcctcccgtctcggcgtcacgtccatcggcttcgccgcgtcgtcgtcgacctcgtccgcccctccgcttcgctcgccgaccgccggagctccgtcgccctcgccgtcccgaaccgcgccgccgctttcctccgcttcggtcgtcgtttccgccgtcctcgttgtcccggggtgagccgtggaccgtccctctcgcttcccccttccctcctctctctcgggtgccactccgccgcgccggtggtcgccggcggtgaccatcggggcgcgagcgcgcgtctcccgtcggccgtgccggcgaggccgccttcgggcgcgccccgcggctgccaggtggggcccggccgtcagccgcccgcgcccgcgggtgcggctgacgcgtgggacccacggcgccggccgccgccagccgcgtgcccccggtccaccgtggacccacctcggccatataaggaccggtcttcgggcctctgttgcaaagcactaccgtacttccacatgtctagtggggcaaatgaaggctacacgagctgcggcccggtagtcgagatgtcatggcacagggccggtgtcctgctgctaggggctcaatcctgcctacctgtcccggaggttccggccgtaggtggggttgggtcgatgtacacctctgatcagagtataatctattcgaatagccgagccctcggttatgggcaagccgagcaatgtacccaaatggccggcagcgtcacccgtcgtggtttggatatgactggcttcgtcttggagctgcgaggcatgtgcgtggccctggggtatccacacggagtggactaccaggccaggccgcttccggatcaggagggagacgacgcggagccccacgctggttgggaggtcaccgcagtgatcctctctggctctcccgagcggacttcgttgacagtcaccgcgggtggagactccttccccgccgcttgccagagcgccgctctcctcgccatcggcactcttcaccagcgctacccggacgagttgcagcactcgccctaccgctaccaccctcgtcgcggaggagcccgcgactacgccaccttccgggatgctagctcggaggatgacgctaccatcgtgcacctggcgcgcatggtggaggcgtacgacgcggctcgtatcgacttccatcagatggtgcgccgcgggatggtcgagaacaacatgaagatcctggagctgcgtcaggagaacctgcagctcaagaaggacctcgacgcggtggaggcacagctgcatcagctcaagatcgcccagggagagatctgccgccccaagcgtcgccgcgtctgccgcagccagaagatcaccgcccgcaagagcacctccaggcccgagcttgttcgtcagtccctggcgtggacttgcttcgtcgagacccctcgtgccgagcccgcgcccgtggttccccaggagggggaagcctccggcgttggtagcacggagggtgcgctgttgctcaccttccatggtgacgaccaggagaaatgctgctaccggtgatggcgaccaacctgaaggcagcaaccaccaccaccagggcaacccacctccacctcctcctccgcctccaccaccaccaccagacaccaacgccattctcacccaaatcctcgcccagcaagccaacatgatgaccgctttcctccaccacctccaaaacccgccacaacagaatgctccaccaccacccccacaacactctaaactcgccgagttcctccgcatccgcccacctaccttctctagctccaataaccccgtggatgctttggattggttgcatgccgtggggaaaaagctagacactgtgcagtgcagctgtcac

SEQ ID NO: 5297 - DNA, 7907 bp, Oryza sativa
  Clone ID: PAT_MRT4530_12099C.1
atggtggcagagtatctgatagtgaagggtcagatcaagtctccttggatgatgaagatgagtctccccgacatctcggcgaggaagagatggaatcaaaggcatgcacccgttgcggggaaattgaacacgttgctagcatgtgtctcacactctgcactcattgtgaagaagaccatccaccaggggagtgtcccacccgcaagctccaacagcaacatcgacgatatcatccacagcaccaatgctcctcctgctgcacctgaccctgcaataaatcatagcgataataccttcagcaccaaccattctctgcaccgacagcctcagcaaagaattgtcgtcgatgaaagaagttgtgtctctccccgacctactccaggccaagcaaagggcaatcaacctccggagggcgataccaagcggaagaccgttattcgcctcaaccagcaaccagaaggaaacttctcctccctccgtttcgcgggaaagcaccggagacgcgtcctcgccggcaaaacagtggcgttgccgccactgttccacctccggccgccactgtcgcgtttcccgtgcgccggccgacgtcgccaccacctccctcggctccgcgacgccgccctcatccccggcatcacctcctcctcgctcgaagctcgccggagtggcctccacgtcggcgtccagtacctccccgcctccggccggctcctgtacgtcgccggtacgccgatcgacgtcgccgcgttgtcctctcctccagctgctcctctgtttcgccggaacaccgtcgcccgtgctggcctctccatcctcatcgtcgccgacgtcccttcggccgcccgttcatcctcgccggctcgtcgtctcgcggcgccgcctccgtcatcgtcatcgctgcggcgtgttccacgccatcctcgcattcgtgcagccgctgccggctgccctcgtcgcctcctcgccggccccggtcgtcgtcgtcgtcgtcctctcatcattcccggtcgtcgtggcgttcgtccctccgtcgagccgttctcatccgtcgtccgcatcagtcaagcaagccgcggcagccccgtcctcgtcttcgtcctcagctccgcgtcgtcaagccttgtgccagccgcgtctcgccttcgtccaaggatcgccgccgaagtcgttccctcgccgttcgcctccgtcgtccccgagctgtctccgccgcgcccgttcgtcgttgtcgtccccacgcctcgtcgcgtggtggtaaggatccctctccctcgctgccccgtcctcgtcctttcggtgtcgcccgtgctcgttgtgcggttgtcggccccggtacccgtgtaccggtgtcggtagtcgttcacgcgtgcgggtggtgaccgtgtagtgtccgcgttagtgtgcccgctcggtgtctagtggagtccgtttgtcgaccactcgcctcggttgacacacagggtccgcttccatcgacccgtggaccgtctctgtgtacccggttttctttttatgtattgttattgcttctttgtaggcttgtagctttgcttgtgtgcttcgcgtagctttcgtcgtcccggaggttcccgaagcgtggttcgtggtcgtcgccgaaggttcggaaggccgttccctctctcttcctctttcaaaacccctaaaacctgttttcggtggggtttgggtgcatgccagttgtgggaagtagcaccccggccactataaggattaagctcgggcctctgttgcaaagcactaccgtacttccacatgtctagtgggtaaggcttagtttgtggctcagtctggtcataaacaaaagtacacggatggagatggatgaagtcgggggtcgatggacattctccagggcagatgaaggctacacgagctgcggcccggtagtcgagatgtcatggcacagggccggtgtcctgctgctaggggctcagtcctgcctgcctgtcccgggggttccggccgtaggtaggattgggtcggtactcttgtctatggctaggatgggttggaaactatgtcacgtcttctgtctgtataccatggtgatggccggcagcgtcacccgtcgtggtttggacatgactggcttcgtcttggagctgcggggcatgtgcgtggtcctggggtatccgcatggagtggactaccaggccaggccgcttccggagcaggagggtgacgatgcagagccccacgctggttgggaggttactgcagtgatcctctctggctctcccgagcggacttcactggcagtcaccgcgggtggagattccttccccgccgcttgccagagcgccgctctcctcgccatcggcactcttcaccagcgctacccggacgagttgcagcactcgccctatcgctaccaccctcgtcgcggaggagcccgcgactacgccaccttccgggatgctagctcggaggatgacgctaccatcgtgcacctggcgcgcatggtggaggcgtacgacgcggctcgtatcgacttccatcagatggtgcgccgtgggatggtcgagaacaacttgaagatcctggagctgcgtcaggagaacctgcagctccagaaggacctggacgcggtggaggcgcagctgcatcagctcaagatcgcccagggagaggtctgtcgccccaagcgccgccgcgtctgccgcagccagaagatcaccgcccgcaagagcacctccaggcccgagcttgttcgtcagtccctggcgtggacctgcttcatcgagacccctcgtgccgagcccgcgcccgtggttccccaggagggggaaacctccggcgttggtagcacggaggatgcgctgttgctcaccttccgtcctggcccatcgcagcggagaagtgctaacaccggtgatggcaaccaactcgaaggcagcaaccacaaccaccagggcaacccacctccacctcctcctccgcctccaccaccaccaccagataccaacgccattctcacccaaatcctcgcccagcaggccaacatgatgactgctttcctccaccacctccaaaatccgccacaacataatgctccaccaccacctccccaacactctaaactcgctgagttcctccgcatccgcccacctaccttctctagttccaacaaccccgtggatgcgttggattggttgcatgccgtggggaaaaagctagacattgtgcagtgcagcgatgaggagaaagtcatcttcgccgcccaccagctgcaggggcccgcatctctatggtgggaccatttccaggctacgcagccagaggggcaacctatcacttgggctcgcttcaccgccgctttccggagaacccatgtgcccgccggagtcgtggcccttaagaaaagggagttccgagagttgaagcagggcaaccgctccgtgatggagtatttgcatgagttcaacaacctggcccgttacgctccggaggatgtgcgggaagatgaggagaagcaagagaatttcttggcaggaatggaccctgagctgtccgtccgtctagtctccggggactatccggatttccaacgtctggtggacaagagcatctgcttggaagccaagcacaaggaactggagtcgcacaagcgccgcttggcgaatttccgcaatcaacagggtgccaaccaaagggtccgctacaccaatccctatccagggggatcctcctcgcagcagcagcagcagcaacctcgccccgcgcctcgacctcaattcgtggtgcgcgtcccacagccgcagcagcagcagaatcaacaagggactcgtgcgccccgtccacctacgccaactgtgcagcctggtcaaggccgcagggacgctcaaggtccgcagcgtctgtgcttcaactgcttcgagcccgggcactttgcggataaatgcccaaagccgaggcgccagcaaggccaagcgcctccccgctccaacaatggtgggaaggatgtcattcggggtcgtgtgaaccacgtgacggccgaggacgtgctgacaactccagacgtcatcgttggtacgttcctcattcattccatccctgctaccattttgttcgactctggagcttcccactcgtttatatctgtgccattcgtggggagaaatcagttgggggtagaaaggcttaggaaccctctgctcatcaccacccctggaggggttatgacagcaaagtattatagccctgccgtccctatagaaattcaggggattccttttccctcggatctgattctgctagacaccaagaacttggatgtgatccttgggatgaattggttggctcaattccaaggagtagtggattgcgcgagacgcaccgtcactctgtaccgagggccggaacaaccggttgttttctttgcatccccaacctctgtcagaagttcagaactgcatcagattggactgtcagaaatccccatcgtcagagagttcagagatgtgtttccggaagaactacccggtatgctgcccaagcgagagattgagttccggatagatcttgctccaggaaccactcctctgtacaagcgaccctaccgtatggcagcaaatgaactggccgaagtcaagaaacagttggaagagttgaaagaaaaggggtatatacgcccgagtacttccccctggggtgctcctgtgatttttgtggagaagaaagacaagacgaagaggatgtgcgttgactacagagctctcaatgaagtcaccatcaaaaacaagtaccctcttccccgaatcgatgatctgttcgatcagcttaaaggtgccactgtattctccaagatcgatcttcgttccggatatcaccaattacgtattcgtgaagaagatattcctaagaccgcattcaccacgcgatacggactgtatgaattcacggtgatgtcgttcggtttaaccaatgcacctgccttcttcatgaacttaatgaacaaagtgttcatggaatacttggataagtttgtcgtggttttcattgatgacattctgatatactcacaatcagaggaagatcatcagcaccatctccgtctggtgttgggaaagttgcgtgaacatcaattgtatgccaaacttagcaagtgtgagttctggttgtccgaagtcaaattcttagggcacgtgatatctgctaaaggagttgctgtggaccccgaaacagtgaccgctgtcaccgattggaagcaacccaagacagtcactcaagtccgcagtttcttaggtttggcaggatactaccggaggttcatcgagaacttctccaaaatcgctcgacccatgacacagttgttgaagaaagaagagaagtttgtgtggagcccgcaatgtgaaaaggcgttccaaactctcaaagaaaagctggtttcctcaccagtgctaatcttgccagatactcgcaaggatttcgtggtgtattatgatgcttcgcgccaaggattggggtgcgtgctcatgcaggacggtcatgtggtggcctatgcctcacgccagctacggcctcatgaaggcaattaccctacccatgatttggagttagccgctgtggttcatgctctaaaaatctggcggcactatctcattgggaatcgctatgaaatatatactgatcataagagtttgaaatacatcttcacccagtcggatctgaatcttcggcaaaggagatggttagaactcatcaaggattatgatgtgggaagtcactatcatcctggtaaggccaacgtggtcgccgacgccctaagtcgaaaaagccattgcaacactcttaacatccgtggcgttccacccgaacttaatcaacagatggaagccctgaacctaagcatagttggtcgcggatttttggctgcgttggaagccaagcccaccttgctcgatcaaatccgcgaggctcagaagaatgacctggacatgcatggactcctcaggaatatgaaacagggtaaagccgctggtttcacagaggatgaacacggaaccctatggaacggaaatcgggtatgcgttccagataacagagaacttaaacagctgatacttcaggaagctcacgaaagtccttattccatccaccctggcagtacgaagatgtatctagacttgaaggagaaatactggtgggttagtatgaagcgagaaattgcagagttcgtggccctttgtgatgtgtgccagcgtgtcaaggaagagcaccaacgaccggccgggcttctccaacctctccaagtaccggaatggaaatgggatgaaattgggatggatttcatcaccggacttccaaaaacccaaggtggatatgattctatatgggtagttgtggatcgattaaccaaggtagcccgatttattcctgtgaagaccacctatggagggaacaaactagccgagctctacttcgctaggatcgtgagtctccatggcgttcccaagaaaatcgtatctgatcggggaagccaattcacctctcacttttggaagaagctccaagaagagctgggtacccgattaaatttcagcaccgcgtatcacccgcagacagatggacagaccgagcgtctaaatcagattctagaagatatgcttcgcgcatgtgtcctagatttcgggaagacctgggataagagtctcccctatgccgagttctcctacaataacagctatcaagccagcatacaaatggcaccctatgaagcgttgtatgggcgcaagtgccggacaccgctattgtgggaccaagctggcgaaagccaagtgttcgggaccgatatcctgagagaagctgaagcgaaggtcagaaccattcgggataatctaaaggtggcacagtcccggcagaaaagttatgcagataaccgtcgccgtgatctggaattcgcagtggatgactttgtgtatcttcgggtcacgccattgcgaggtgtacacaggtttcagacaaagaggaagctcgcacctcggtatgtgggtcctttccgtatcattgctcggcgcggagaagtcgcatatcggctggagctgcccgcctctttgggcaacgtgcatgatgtgttccatgtgtcgcaactcaagaaatgtcttcgagtgccatccgagcaggccgactcagagcaaattgaagttcgcgaagacttgacctatgtggagaggccagtgaaaatcctggacaccatggaacgcgggaccaggaaccgggtaatccgtttttgcaaggtccagtggagcaaccacgccgaagaagaagctacctgggagcgtgaagacgagctcgtcccgcttcggcatcgcctccttcggctccgccgcgtcctcgccgacctcgtccactcctccgtttcgcccgccgaccgccggaacaccgccgtcctcgtcgacccgagccgcgccgccgccttcctccactccggtcgtcgttctcgccgtcctcgtcgacccggggtgagccgtggaccgcccctttcgcttcccccttccctcccctctctcgggcgccgctccgctgcgtgcgtgatgcccggcggcgaccatcggggcgcgggcgcgccgcctcccgtcggccgtgccgcgaggccgccttcgggcgcgccccgcggctgccaggtggggcccggccgtcagccgcccgcgccctcgggtgcggccggtccgcgcgcccctcccctcggtcggtccgaatcccagaaccctggcctccacctgcgctccggcgccgccgccgccgccgtggacgcccttctgctcctcctccggctgagcctcctgctcgtgctcgccgccgccggcctcgcgcgcagccacctcctgctcgcgctccacgccgccgccctcgcgctccctccccgaccgcgtccacctccgcgccat

SEQ ID NO: 5298 - DNA, 423 bp, Oryza sativa
  Clone ID: PAT_MRT4530_1209C.1
atggtgggacccacctgttatacctcctcttccactcttaccctctccctctcgggcacaaagtgcgcacagcagcaacggggcggacgggcagtcggcgcgtgggggccagcgacggaacgcggagagggcatggcgaggggcgccgaggagagcgttggaggcagtgggctacggcgacgagtctgcagccctctcaagctccacgactatgacgacgaggtgacaagtcctcaactcaggggggcggtgggcgtcgtcgaggtcatccttccaggcggaggcagaggcgacggcgatgctaatgctcccttccctggagacggcggtgaggtagccctcgttgtcatcgtcatcttggatctcaaagtagggggagggaaaaagtgccgagcctcttctccggttcaaatgaggagttga

SEQ ID NO: 5299 - DNA, 2793 bp, Oryza sativa
  Clone ID: PAT_MRT4530_120C.1
atggaagaaaatattggaaagctggacaacactatcaaaaacctagaagttaggaaaaatgaaatccaaatccggcttagtatctctgaggggaagcaagaaacatgtaatcctgaagttacagaatggctacaaaaggtagcagcgatggaaactgaggtgaatgagataaaaaatgtgcagaggaagagaaagcaattattcagttattggtcaaagtacgaaattggcatgcaggctgcgaagaaactgaaggaagctgaaatgttgcatgaaaaaggtgcattcaaagaggtatcatttgaggtaccaccatatttcgtgcaagaagtgcccaccataccttcaactgaagaaacagagtgtaatttgaaagaagttctgcagtacctcaaagatgacaatgttggaattttagggatatggggaatgggaggagttggtaagaccaccttgctcagaaaaatcaacaatcacttcttaggtgtaaccaaagaaaattatggattcgaccttgttgtttatgtcgtggcatctacagccagtggaataggtcagcttcaagcagatattgctgaaaggatcgggctgttcctgaaaccaggttgtagcattaatatacgggcttcatttttgttaagttttttaaggagaaagaaattcttacttctgatagatgatttatggggttattttgatttagctgaagctggcattccatatcctaatggcctaaataagcagaaagtagttctggcaacacgttctgagagtgtttgtgggcatatgggagctcacaagacgatcttcatggaatgcttggaccaagaaaaagcttggcgattattcaaagaaaaagcaacagaagaagttattagttcagatgttaggattgaaagcctagcaaaggaagttgcagaagaatgtgggggtttgccccttgctcttgcaactcttggtcgtgcaatgtccacaaagaggactcgtcatgaatgggcacttgcactgtcatatctgaagaagtcccgcattcatgagatcccaaatatgggaaatactagtcacatatacactaggctaaaattaagttatgattatctgcaggataaacagatcaaatattgtttcttatgctgttctctgtggcctgaaggctactcaatttggaaagttgcactgatagactgttggatggggatgggtttgatagagtatgatactatagaggaagcatatgacaagggccactccatcattgagtacttgaaaaatgcttgcttattggaggctggctacttggaagatagggaggtgagaatacatgacattatccgagatatggcactgtcaatatcttctggctgtgttgaccaaagcatgaattggattgttcaggcaggggttggaattcataaaattgatagcagggatattgagaaatggaggtcagccagaaagatatcgctcatgtgcaattatatcagtgaacttcctcatgctatcagctgttacaatctccaatatctgtcactgcagcaaaacttttggttgaatgtgatcccaccttctctttttaaatgcttatcgtctgttacatacttggacttgtcttggattcccatcaaagaacttccagaagaaatcggcgcattagttgaactccaatgtctcaaactgaaccaaacactcattaaatcattgcctgtggcgattggccaattaacaaagttgaagtacctaaatttgagctacatggatttcttggagaagataccctatggtgttattccaaatttatcaaagctacaagtgttggacttatatggtagcaggtatgctggctgtgaagaggggtttcattcaagaagtcacatggattatgatgagtttagaatagaagagttatcttgcttaactagagaactaaaagctctgggaataacaatcaagaaagtgagtaccttgaagaagctccttgatattcatggaagtcacatgagattgcttggtctatataaattgagtggcgagacatctcttgcgctcactataccagatagtgtccttgttcttaatataacggactgttcagaattaaaggagttctctgtcacaaacaagccacagtgttatggagatcatcttccgaggctagagtttctcaccttttgggatcttccaagaattgagaagattagtatggggcatattcagaaccttcgtgtcctttatgtagggaaagcccatcaactgatggacatgtcctgcattctgaaactaccgcacctggagcaattggatgtgtctttctgcaataaaatgaaacagctagtccatataaagaataaaatcaatactgaagtacaagatgaaatgccaatccagggatttcgacgactgagaattttgcaattgaattcgttgccaagcttggaaaacttctgtaactttagcctagaccttccttctttggaatactttgatgtgtttgcttgtccgaagctgagaaggctgccttttgggcatgcaattgtcaaattaaagagtgtcatgggggagaaaacatggtgggacaatcttaaatgggatgatgaaaacagtcccttattgctatttccattttttaaagcatcagaaactcgtatagcatccttaaggccggagctagatactagtgtagcatcctcacccaaagctttcttcaccaaaaggcagccctatttaagttcatcaattcgctacacatctttcctaaaatctatgtttgaagctgaggagtttagtagcctttag

SEQ ID NO: 5300 - DNA, 6610 bp, Oryza sativa
  Clone ID: PAT_MRT4530_12100C.1
tataacctaaagaaccctgtgctttgtttttatgtattggtattgcttctttataggcttgtagctttgcttgtgtgcttcgcgtagcttctgtcgttccggaggttcccgaagcgtggttcgcggtcgtcgccgaaggatcggaagtccgttctctctctcttcctctttcaaaacccctaaaacctgttttcggtggggtttgggtgcatgccagttatgggaagtagcaccccggccactataaggattaagctcgggcctctgttgcaaagcactaccgtacttccacatgtctaatgggtaaggcttagtttgtggctcagtctagtcataaacaaaagtacacggattggagatggatgaagtcgggcgtcgatggacattctccagggcaaatgaaggctacacgagctgcggcccggtagtcgagatgtcatacggcggagggttggtgcccaatgctaggggctcagttctgcctgcctgtcccgggtatcccggccgtaggcaggattgggtcggtactcttgtttatggctaggatgggttggaaactatgtcacgtcttccgtctgtataccgtggtggtatgtggcgcgtggtaacacgtgaggaagatgtgtcttgtggcatttgtgggtgtgtcttgttgagtacggtggttgtactcagtcttgctcaatttttcccaagtccagaagaggagctccttgaagatgaaggctttggtgtctagctcgtgcctgccgtcaagtgcctgtggtcgtcgccctagtcttccgctgtttctcgtttgtctttgtgtgttctgggccttgcctcctgggacaaggattaatgcacgcacgtaaggaatgcccgttgggttatttccggtcgtgacaacttctccgcgccgagcagtgatacggaaaggacccacataccgaggtgcgagcttcccctttgtccgaaacctgtgtacacctcgcaatggcgtgacccgaacatacacaaagtcatccgctgcgaattccaggtcacggcgacggttatctgcataacttttctgccgggactgtgccatctttagattatcccgaatggttctgaccttcgcttcagcttctctcaggatatcagtcccgaacacttggctttctccaacttggtcccacaatagcggtgtccggcatttgcgcccatacaacgcttcataaggtgccatttgtatgctggcttgataactgttattgtaggagaactcggcataggggagactcttatcccaggtcttcccgaaatctaggacacatgcgcgaagcatatcctctaggatctgatttagacgctcggtctgtccatctgtctgcgggtgatacgcggtgctgaaatttaatcgggtacccagctcttcttggagcttcttccaaaagtgagaggtgaactggcttccccgatcagatacaattttcttggggacgccatgcagactgacgatcctagcgaagtagagttcagctagtttgttccctccataggtggtctttacgggaatgaaccgtgctaccttggttagtcgatccacgactacccatatagaatcatatccgccttgggtttttggaagtccggtgataaaatccatcccaatttcatcccatttccattctggtacttggagaggttggagaagtccggccggtcgttggtgctctgccttgacacgccgatttccgttccatagggttccatgttcatcctctgtgaaaccagcggctttaccctgtttcatattcttgaggagcccatgcatatccgggtcattcttctgagccttgcagatttgatcgagcaaggtaggcttggcttccagcgtagccaagaatccacgactaactatgcttaggttcagggcttccatctgttgattaagttccggtggaatgccacggacgttaagagtgttgcaatggctctttcgacttagagcgtcggcgaccacgttggccttaccaggatgatagtgaattcccacatcataatccttgatgagttctaaccatctcctttgccgaagattcagatccgactgagtgaagatgtatttcaaactcttatgatcagtatatatttcacagcgattcccaatgagatagtgccaccagatttttagggcatgaaccaccgcggctaactccaaatcatgagtagggtagttgccttcatgaggccgaagctggcgtgaggcataggccaccacataaccatcctgcatgagcacgcacccctatccttggcgcgaagcgtcacaatacaccatgaagtccttgtgagtatctggcaagattaacaccggcgaggaaaccagcttttctttgagagtttgaaacgccttctcgcattgcgggctccacacaaatttctcttctttcttcaacaactgtgtcatgggtcgagcgattttggagaagttctcgatgaaccttcggtagtatcctgccaaacctaagaaactgcgaacttgagtgactgtcttgggttgcttccaatcggtgacggcgatcactgtttcggggtccacagcaactcctttagcagatatcacgtgccctaagaatttgacttcggacaaccagaactcacacttgctaagtttggcatacaattgatgttcccgcagctttcccaataccagacggagatggtgctgatggtcttcctctgattgtgagtatatcagaatgtcatcaatgaaaaccaccacaaacttatccaagtattccatgaacactttgttcattaagttcatgaagaaggcaggagcattggttaaaccgaacgacatcaccgtgaattcatacagtccgtatcgcgtggtgaatgcggtcttcggaatatcttcttcgcgaatacgtaattggtgatatccggaacgaagatcaatcttggagaatacagtggcacctttaagctgattgaacagatcatcgatccggggaagagggtacttgtttttgatggtgacttcattgagagctctgtagtcaacgcacatcctcttcgtcttgtctttcttctccacaaaaatcacaggagcaccccagggggaagtacttggacgtatataccccttttctttcagctcttccaactgtttcttaacttcggccaattcatttgctgccatacggtagggtcgcttgtacagaggagcggttcctggagcaagatctatccggaactcaatctctcgcttaggcggcataccaggtagttcttccggaaacacgtctccgaactctctgacgatgggaatttctgacagttctatctgatgaagttctgaacttctgactgaggttgggggtgcaaagaaaacaaccggttgttccggccctcggtacagagtgacagtgcgtctcgcgcaatccactactccttggaattgagccaaccaattcatcccaaggatcacatccaagttcttggtgcctagcagaatcagatccgagggaaaaggaatcccctgaatttctatagggacggcagggctataatactttgctgtcataacccctccaggggtggtgatgagcagagggtttctaagcctttctacccccaactgatttctccccacgaatggcacagatataaatgagtgggaagctccagagtcgaacaaaatggtagcagggatggaatgaatgaggaacgtaccaacgatgacgtctggagttgtcagcacgtcctcggccgtcacatggttcacacgaccccgaatgacgtccttaccaccgttgttggggcggggaggcgcttggccttgctgacgccttggcttcgggcatttatccgcaaagtgcccgggctcgaagcagttgaagcacagacgctgcggaccttgagcgtccctgcggccttgaccaggctgcacagtcggtggaggaggacggggcgcacgagtcccttgttgattctgctcctgctgcggctgtgggacgcgcaccacgaattgaggtcgaggcgcggagcgaggttgctgctgctgctgttgctgctgcgaggaggatccccctggatagggattggtgtagcggaccctttggttagcaccctgttggttgtggaaattcgccaagcggcgcttgtgcgactccagttccttgtgcttggcttccaagcggatgctcttgtccaccagacgttggaaatccggataatccccggagactagacagacggacagctcagggtccattcctgccaggaacttctcttgcttctcctcatcttcccgcacatcctccggagcgtaacgggccaggttgttgaactcgtgcaaatactccatcacggagcggttgccttgcttcaactctcggaattcccttttcttaagggccacgactccggcgggcacatgggttcttcggaaagcggcggtgaagcgagcccatgtaataggctgtccctctggctgcgtagcctggaaatggtcccaccatagagatgcgggtccctgcagctggtgggcggcgaagatgactttctcctcatcgctgcactgcacagtgtctagctttttccccacggcatgcaaccaatccaacgcatccacggggttgttggagctagagaaggtaggtggacagatgcggaggaactcggcgagtttagagtgttggggaggtggtggtggagcattatgttgtggcggattttggaggtggtggagaaaagcagtcatcatgttggcctgctgggcgaggatttgggtgagaatggcgttggtatctggtggtggtggtggaggcggaggaggaggtggaggtgggctgccatggttgttgtggttgctgtcttcgggttggttgccatcactggtggcagcatttctcctggtcatcaccatggaaggtgagcaacagcgcatcctccgtgctaccaacgccggaggcttccccctcctggggaaccacgggcgcgggctcggcacgaggggtctccacgaagcaagtccacgccagggactgacgaacaagctcgggcctggaggtgctcttgcgggcggtgatcttctggctgcggtagacgcggcgatgcttggggcggcagatctctccctgggcgatcttgagctgatgcagctgcgcctccaccgcatctaggtccttcttgagctgcaggttctcctgacgcagctccaggatcttcatgttgttctcgaccatcccacgacgcaccatctgatggaagtcgatacgagccgcgtcgtacgcctccaccatgcgcgccaggtgcacgatggtagcgtcatcctccgagctagcatcccggaaggtggcgtagtcgcgggctcctccgcgacgagggtggtagcggtagggcgagtgctgcaactcgtccgggtagcgctggtgaagagtgccgatggcgaggagagcggcgctctggcaagcggcggggaaggaatccccacccgcggtgactgtcagcgaagtccgctcgggagagccagcgaggatcactgcagtgacctcccaagcagcgtggggctccgcatcgtcaccctcctgctccggaagcggcctggcctggtagtccactccatgtggatgccccaggaccacgcacatgccccgcagctccaagacgaagccagtcatgtccaaaccacgacggctgacgctgccggccatttgggtacattgctcggcttgcccataaccgagggcgcggctattcgaatagattttactctgatcagaggtgtacatcgacccaatcccacctacggccggaacccccgggacaggcaggcaggactgagcccctagcagcaggacaccggccctgtgccatgacatctcgactaccgggccgcagctcgtgtagccttcatttgccccactagacatgtggaagtacggtagtgctttgcaacagaggcccgaacaccggtccttatatggccgaggtgggtccacggtggaccgggtgcacgcggcttgcgccggccggcgccgtgggtcccacgcgtcagccgcacccgaggacgcgggcggctgacgaccgggccccacatggcagccgcggggcgcgcccgaaggcggcctcgccggcacagccgacgggaggcggcgcgcccgcgccccgatggtcgccggcggcgacctccggcgcgacggagcggcgcccgagagaggggagggaagggggaagcgaaatgggcggtccatggctcaccccgggtcgacggcgacgacgggaacggcgaccgaagcggagaaagggggcggcgcggctcgggtcgacgaggacggcggcgttccggcggtcggcgggcgaaacgaaggggtggacgagattggcgaggacgcggcgaacccgaagaaggcgatgccgaaacgggaggaggcccggtgcgacgacggcggcggaccggagctcggcggcgacggcggagagagaggacgacgttgcgagctcgattccgacggggagagagagcggcgagtggcggaaacgaaggagggaggcatggggagtgtttatgtagtgttgggaggaggagagagcggccggatgagggggaatcggtcgtggaagatccggccgccat

SEQ ID NO: 5301 - DNA, 637 bp, Oryza sativa
  Clone ID: PAT_MRT4530_12101C.1
tcccgtacgccaccaagcccggacctggcggcgtacgcggcgcacccggcgcacgtcccccgtgcagggcacgtcctccccacgcggctcgacaccaccgccatcgactgggtcaaccccgcgcttcgccccgtccccggtcacccccggctcccccctgtccggcttaaccgcttgccgaaagttaaagaaagttttgaagttcccccaacgttcgtgaggaagttccccacggccgaaccgccgccgccggtcaagccaaaggccgcccaaggttgaactttcgggaaggaaccttcctcccccgcgcgggctaaggggtaccagttcggaatgtgccgttgttcaccagcctgaagaagctcaacccgttgaaggggaaccggaaagttccagaagccaagccgccgttaagcccacttgcttcgaaccgagttgcttcgtgttgaacctttcttcttcgaacctcccacccttgaagcttccggccccgcccaacttcttgagagttcccttcgtttggaaattcttagttcccttgtgattggtgtcctcctctcctgtggcgtgtgtgatgccaatgcaatggattttggaaggaataagaatggtacctggactaaaaaaaaaaaaaaaa

SEQ ID NO: 5302 - DNA, 1770 bp, Oryza sativa
  Clone ID: PAT_MRT4530_12102C.1
atgccccaacccgctacctcctcccggcgctccggcgacttccctgactgggtcttcctcgacactgttgcgcacaccggccgctgccacgacaacgcgaccaccgctcgggcgaagtcgagcgatggctaccccatcgaggtgtccttcgtgttcgccgatccacccgccctcacccgctgctttgttcactgccccgccggcctgacggcaggtgagttctccatgtcgccgccctccatcaccggcgcggacggcgccttcctcctcctacgtgtcatcttcccccaccgctctgaccgatgcatggtcaccgactggttcgtctacaagtcgggccccgggacgccatctctcgagctcctgatccagcgccccaacccgcttgacgttgtatccagacgcgccggcgtcttatcctgtggcgaccactgtctggtcgtcgaccccgaatggcgattccatgacgacgactggatgaagttccacctccatatcttctcgagcaagaccaagcggtggagcaacaaggtcgcaaagctgggtcgtggcatggaggcgttcaaccctttcttcctacccaccaaggtgttgtgtgtcgtccgaggaggatcaatggcctgggttgatttccggaacagcatcctactgctcgactcggtccccgggaactgccccgaggtgagcctgatccgtctgcccccattgatgcccatcaacaacgttgactccggaggcagtcccgatggaccttgcgtggatctggtccgggatgtcacctgtagagatggctggttcaagttcatcgagatgggatttccgtacttggatcctaatgatgcacagttaaaccgtggatgggaggccaccatgttcaagaggaagatccgttcagataattattggcaatgggagccgtgcggcactgttgactctgctagccttttgcctgccgactcatgtgttgcttgtttgtttcctgagatctttgactgcaacgagcacaagctagccctgaacaatgttgtgagctcatttcccacattggatctatactgtgacgatgttgtttacatgatgaccaagatcaaggctgatgatccagacgcgtgcgcggtggcgacgggcgactgcgggtgcagcgttggcgggcgggaggcgcggcggctccacctgaaccgccgagctgcggcgggcgcaacgtcagcgggggtgaggaggcggcgcatctggctgccgctccgcgccccacgcgcgtggatctggcgtggatattgcacgggtgacggtgggtgcggctgtgacgggcaactgcgggcaggaggcaaggcggcggcgaatctggccgccgttccgcccgtacgcgcacggcgcgacctctgcggcggcaagctcggactcggatggatatggaggaacagcggcggccacccccacgacacgccgcaatcgatgtccggagcaagcgctatcgcattatcatcggtcgatcttgtcggggaccagggtaccagcccagaagacagagaaaatgatgcccaatatcatgttgtggcaaatgatggtgataaatttgcatttttgaccagtagaaatgctcctaagaacaagcttgttgggcggccaccagcttgtatcgacaatgctgctgcccagcctccacgcatggctctcctgctcagcaaatgtattgatagcatggagaagttggagatggtgcagtgctgtccggcaggtggcagatcaccaacgttccgctgccccgtctag

SEQ ID NO: 5303 - DNA, 443 bp, Oryza sativa
  Clone ID: PAT_MRT4530_12103C.1
gcttcttgctgcctgcggtctcgattagcttcccgtatatataagttaaagtttgctagtgcattttactcattaattaatagacagtatgctgaacatgtagtttaattaatcacgtacatttagatgacgtatatataagtagaatccaactactttcgtttaattttgttgtgcgaagaatgtaacaatattatgagagatagttataacccaacgttcacctagaaaaattatactctatagtagtagctagataataggaatgcatttatcataaatgcaaatattatggacacttttggaaaaaaaaaaagcttaatctctagaggatccccggggtacccgagctcgaattcgtaatcatggtcatagctggttcctggtggtgaaaattggtattccgttcacaatttcccccccacattaccgaagccgggaag

SEQ ID NO: 5304 - DNA, 753 bp, Oryza sativa
  Clone ID: PAT_MRT4530_12104C.1
gttatccagataatgcaaagcagaagtcatagaattgataacaccaatagaaccagtagctagaatggaatggtgaagtaagactaatctaaataggtttacatgataccaacaaaacatatctccacaaatttgtgaaaagcattctattgttcagttgttgataagagtgacataatactgcttttgacatagtatatgatatagcaataattctttatattcaaatttggcgctttattaatcaatccctgactagctggagtactttgacaaagaacatataaatatcacaaacctatggtatcagtgccctaagggcattaacaaacagaccttgttcaagtaattcatctgtgttagcacacaagtggccactataagcacaaagaaccaagtctctggatataccaactgatttgtcccctcaaacgtcaactttaaggatgtaccgtgcttcagtaagtctccgtttaatcttgctgtcaaggagggagacaatggtgcgtatatacctacatcgtgagaaaatttatgtgattataggcattactgaaaggagactgaatgtctgatgccatgtagaaagggattgttagggttacaaacttcttgattgcggaatcctttcataatccttcgtcacatgtaacaaaatggtaccagacaacacaacaatcagaccacagatttcagacccaatgcttccaaggctttcaccagaccaatcctgcaccaattattagagaagaa

SEQ ID NO: 5305 - DNA, 199 bp, Oryza sativa
  unsure (1)..(199): unsure at all n locations
  Clone ID: PAT_MRT4530_12105C.1
cggcggaactcgaatctcttctgtccccttacaccaccgtccccccacaggagatgctgcgctgncacangncgccncaatgccgcctcggcgcgggcggcgcgggcgcgggggtgctgntgagacagcgaanaggnntggcggtgcgttgccgngnncanaggtntccggggtcgaggcggcggcgnggacaccggcg

SEQ ID NO: 5306 - DNA, 904 bp, Oryza sativa
  Clone ID: PAT_MRT4530_12106C.1
atggacggcggcggcggcgcgaagaagagccggaacccgcacaaggcgccggcggactaccgcagcgaccgcaagtcggcctccgggatgagcggcgagcccaagaagggcggccgcggcggcaagttcacctgggagggcgccgacggctacgccgacgaggacctcgacctcatctcccccaagaactccacctcccactccaagtccgccgcttccgccgccgccgccgacagcagcagcaacaagaagtccggcgacgacgagaggctgttcctcgaggaggggcggaactcgtccgtcgggtcgtcatcgtcgtcgtcggacatcgccgagctggacggcatgtcgccggacagctactgcatctgggtgtcctcgccgtcgccagcatcctcgccgtcgcgccccccacggaagagcgggtcgacggggtccatcacgcggtggcgccgcatcagcgagctcgtcatcggccgcagccatagcgacggcaaggagaagttccgcttcatctccgcgctgtcgtccctggccagggagcaccccaaaccgaagcccacgacgaagggcgccaccgccaccaaaccgcattcttcactgacggcggcaaagaggccgctcgaggacgaggacgacgatgatgacttgggcggccctagtgtcaatgtggatggatatggtggccgtactcggcgtcgcagcccacacctccgccgtcctatccctgctgctgctcgccgtcgaggttgccgcctacctccaggggtggaacctcgaggaggtggcgtcactccccgccgtcgacggcctcttcgccgcgcctccattgccctcttgctcgggaagaagggcaaatgagtcatttttcatgtcgactcacatgtttggatggcaaatgtga

SEQ ID NO: 5307 - DNA, 150 bp, Oryza sativa
  Clone ID: PAT_MRT4530_12107C.1
atgtgggcgaagtgctcgcaccacagtgctccgggcgttttcggggcgacgtgctcaattccgctgatgtccacatcatccggcgctggtcctggaaattttgcaaaaacgtcctcgcttaacttgacaatctttcttaagtccctcaat

SEQ ID NO: 5308 - DNA, 1988 bp, Oryza sativa
  Clone ID: PAT_MRT4530_12108C.1
ctcctccatcccctccccgcgccaccatgcgccccttccaccctcctcgccccaacgccggccaaccccaccgcccgcgccccggcgaccccgccccgcctcccctccccatgcacccgggcttcaaccctccgcccgtccccaacctcgccgccgccaaccccatggccgccgcggcggcggccaaccctttcctcgcgatgcagctcttcggccaggcgcagcagctccagagcctcggcttcctcgccgccgccgcgctccagcagcaccatcaccagccgcagccgcaggcccccttcttccccgggggaggtttcccgccgaaccccaaccagttcggggccttccctgtccagcacgccgggttcaacggcggcggggcgtttcgacctggtggcgtgggcgtgggcgtggccggcccccgtactccccgcccgatgatgggcgcccctggtaatggttacaacagcggtggcggcagcggccatggtaccggagctggtgcgccgagacccatgctgaatggtggggggaacgatcggaatagcagtgctgggaagggcggtgaggtaaaccacactaagatcaagccagatggcatccctcgttttacctctgaaaatggtgagaggaaaaatacaacagatcagaaagcccgattcaactctggaagagattgtagggatagcaggcaatttggcccatctggtggaaggggaaggggaaggggaaggtctttcaatcaaggtcgtggaggaggaaacaacaactggagagatgcaaaatccaacttcagaagcagtgacagtccaagtccagcatcaggacaacgccgcaatgacagtccagcatctggaggacaccggaagcggcctcgtataatttatgatgcaaacgaagttaaacagtggcttgaagcacgcaagaagaactatcctacaagtgtcaacataaataaggcctcagcaactttatgtccacatcagactatcagagaagcatcatcaactgaccacttaatgcagaagttgtctgagagtcgaccagatggtgagaagaaggatgaagaggcccaaatgcgccgtcaggaactcaaggaagtattagaaaaacagaaagaattgggttttgaactccctgaactaccacctggctatctatctgaacatgaggatcaaggcaatggtaggagaagtaactggaaaacacaacgcagggattgtcgttttggaaaccgtgctgataacaaaagatcaaggtatgaccgcaatgattttcagtctaagagacccaaggtacggaaccaaactcattgtgatgatggggcagtgctcaagagcagggagccaaccctcttgcagaaacttcttagttcggatgtcaagagggacaggcataggcttctccacacgttcaaattcatggtccttaacaatttcttcagtgattatcctgataagcccttggagtttcctagtgttaaagtaaaccagatcgaacttgaaagcaacattgctgaagaggacctagatgacttgatgaacagcgagacggcaaaggacagcatccttgatttgaaggaaaatggtgatcagaaagactcgagctcaattgatggagaatcagacctcgatgacgacaatgatgatgaagatgaagaagatgatgatgatggcaatggccagtgctgagagcagcgacaaggatgagacgaggacgtcgatgcagggcagatgtaatacccgtttttttaaacatgatggaagtaaacgactccagacgtctacacccaaaggtatactcaaccaaaatgtaatgcacctgaagtcagaggtgcaagtatccagcagggcacaggccaactgtgtttttggtgtatagttggcgttcacaaatgatatttatgtagctgcctttgaaattttgttatcagttgcatttgctattatgtgttttgctgtttggagaaaaaaaaaaaaaaaaaa

SEQ ID NO: 5309 - DNA, 214 bp, Oryza sativa
  unsure (1)..(214): unsure at all n locations
  Clone ID: PAT_MRT4530_12109C.1
gcggcacctngctctnctttgccttcagagaaacccgaagccatggccgttggtactcttcttaaggtattttttctttccaaaaaatctggatggggggccaaccggcagggtggcggccccaaacccgtgacctgcttcattggtggcccggcctgtgccttccaacaataacctggcaagaaccggaaaaccaatggattaacaagaaagg

SEQ ID NO: 5310 - DNA, 660 bp, Oryza sativa
  Clone ID: PAT_MRT4530_1210C.1
ctagtcccagcgctcgcccacatgcgtccgcatggggtcgttgggaccagtgtattcccacgctccacgggatcgttcctgaagaggtgcgatgcagcggcggaagtaatcgccaaagaccatcgcccccgtgaggcccaggctccgcaggcccctaaggcgatcccacaccgcgtcgtattcctcgcccagctccgaagtcgccagccatgcggcagacctttcaggagggccagcgggaactcgaagtcgcggatggtccggcaacgcggtgtagaaccagtccttattccagtcctcccatttcttgcggagattgctctcgatgtactgacccgctgtgcctggccggggcccaatgaacatctcacacaaatgcacgaagatggccagcgtcatcacggcattgggtgcgagatgcaaggcatgaatttcgtagaaatccagaacctcatggaagaatctggagaacggcggaatcaagcccgtcatggcgaaggacaagaggtgcatggatcgctccggatatcgtggccgtggccgcgactctcccgcccgcacgacggcaccgtccggcatgatcttgcggggaaggctaaggtgcctgtctgctgtgatgcgggaggaagggagcactgcgtcgccggtgtcttgggccat

SEQ ID NO: 5311 - DNA, 117 bp, Oryza sativa
  Clone ID: PAT_MRT4530_12110C.1
atggcgagcgcgaacacctctcgttggttcagtcttggcacactcgccttcttgagactgcacgtcatgccatccgaaaatgttagtggcactatcattgccatccgaaaatgttag

SEQ ID NO: 5312 - DNA, 257 bp, Oryza sativa
  Clone ID: PAT_MRT4530_12111C.1
cccacgcttacgctttatcctcggacacacgaacgtgcaaatcagggacatgagcgtcggacaaaacatacaccgcagcagggcatcaaggaccatcgaggggacgaggggcacacgtgagcagaggcttctacaggagcaagctgtacacgctgcaggacacgctgtgcagcacccgcaaggactgccacggcgacctgctccgggagggcgccgccgcgaacatcaactccgtggccgccaaaaagcacgccaag

SEQ ID NO: 5313 - DNA, 462 bp, Oryza sativa
  Clone ID: PAT_MRT4530_12112C.1
atggctggcgaagagggagtagagccttcgacttttgaagccgaagttggagctgcgccacccccagcagcggcgccatctcttccaccttcagcactgacgaccttgacagatgcggatacgttgaaagcggcggccacgctccagttcagggacgtgatcctttcgcctcaactagccacgacgtcaacagcaatcatcaccttgcaagctgacgccaatctcaaagctcaagccaatgcagacatgggggctatacgtcagaacatggctaaactgcgagacacacttcgccagatgcaagagcagcagcaagcatacggagcagcaagacaagccaaggccaacacgcaggagtttccgacgctctacgctcagccccaagtttttcccccacatgctgcaccagccccggcgtactacgccaagcccgtcccggccgtcgctgtacgaccgccataa

SEQ ID NO: 5314 - DNA, 670 bp, Oryza sativa
  unsure (1)..(670): unsure at all n locations
  Clone ID: PAT_MRT4530_12113C.1
ttttttttttnttccccgaatagtctccaaattctcaaatcaatatctctaaatacatcacaaaatcttaaaaaattacattacaacttctacaaaattcatcacaaatacatcacatgttcacatcacacacaaatcaaatacatcacatattcacatcacacacaaatcatctcagatccgaatcacagattctcaaccaaaaaaaaaggaaagaagacgaacggcccactgccgcggcgggcgccggagcgccgcccgccgcgtacccagttccgccgcgaggccgccagccgccagagggccgccacgccatctcgcccagctctcgtggcgccgggcggtcgcgcaccacaggagcgttctcgcgctgactcgcgagggcgcagccgcgaaaccgccgccgcgtcgcttggcaacctccgctcgccgcgccgccnngccgggcgggcggcctccgngcccacgccgcaaggggggcggcggnacttcgngcccaccgttncaaagggaggtggggaggtgggaagganggangangganaagaaaaaataagggtgtaactgnctnnngncnaattctgcnnnncnggggaccnctanttttagagggggcgcccccggggggggctccnctttggtcccttanggggggtaatttcancttggg

SEQ ID NO: 5315 - DNA, 732 bp, Oryza sativa
  Clone ID: PAT_MRT4530_12114C.1
atgccaccaaaggaaatcgttaaggagagagttgccaagtgaaaggaaggcaacagcgaaggggagatggctggcgaagagggagtagagccttcgacttttgaagccgaagttggagctgcgccacccccagcagcggcgccatctcttccaccttcagcactgacgaccttgacagatgcggatacgttgaaagcggcggccacgctccagttcagggacgtgatcctttcgcctcaagtaccgggggcacctcaagctgccgccttcacctagctagccacgacgtcaacagcaatcatcaccttgcaagctgacgccaatctcaaagctcaagccaatgcagacatgggggctatacgtcagaacatggctaaactgcgagacacacttcgccagatgcaagagcagcagcaagcacccgtcccggccgtcgctgtacgaccgccataacatgtgatttcggcgccggttcgtccagcggcacaccaagcccagtacccgaagcccactcacactccacaagcaatgatggaggcagcttcgaccttacaagcacagtttcaagccttcttgcaacaactcaatcaaccccacaacaatataccaagagcttcgcctctggcccaggacgagcggagcccaagtcaggggtgcgctagccgggcagccgttgggctagttcatcatgccaagttcggtagcaacaactctcaaactggctccaccagt

SEQ ID NO: 5316 - DNA, 546 bp, Oryza sativa
  Clone ID: PAT_MRT4530_12115C.1
atggctgcaagaaagtcgcagaccggcgtcccacgggctccagtggtggcggtgattgtggtggtgatgacaatgcttgcttcccgtgccgcatcgcagaacaatggctgctccagcgtgatgatgacgctctccccgtgcctggattacatctccggcaaatcgccgatccccgagttcacctgctgcaccacgctcgctggcgtcgtccagtccgacccccggtgcctctgcatggtcctggatggcagcgcggcgtccttcggcatctccatcaaccacacgagggcgctggagctccctggtgtctgcaaggtccaggcaccaccaatcagccaatgcacagccgtcccaactccacctccagcaccagatacacctacattagctgatgagccagcagagacaaacgaggatgaaccaagtccaccacctgcaggaagtgcaggatctaacaaaacctcaagcgccacaaactcaaagaaagcagcgagtttaatggccagtgtgctcatccctacttgtgccttgttctatgtcttctag

SEQ ID NO: 5317 - DNA, 243 bp, Oryza sativa
  Clone ID: PAT_MRT4530_12116C.1
atggcgattctggtgcttaggagctctgtggcggctaatccggctgcgccggcctcgggagggttagatccgccgccgctggcctcaggagctgcggggccttggcggcgacggtgggagcaacacactgcgatcatggcaccggagaagctgctgcagctgtcgctggggtggcctgactactgccggcacggcggcgtgctcaatgtggcagtggcggcggcgcgaggtggtggcccttga

SEQ ID NO: 5318 - DNA, 758 bp, Oryza sativa
  Clone ID: PAT_MRT4530_12117C.1
gccaacgacgagtgaagccaatgtagccactgccgtcgacaccacacgaggccgtcgccgccaacgacgacaatgagtgaagccagcacagccaccgtcgacgacaaccctgctggacccaaggcgctcctattccggttgccacggttgccgagaacgcgatgcagtcgaatcgtctcccgtctccccgtcaaggacggcgctcgcaccgccgtgctgtccccgtgctggcgccgcatctgggcctccacgctactcatcttcaacgatgccgacctcctccccgacaacgacaacccccaaatcttctggcgcgacatagcagacatcgtctcccgcgtcctcgccgcgtacccgagccaccggtgcatccgcctcacgaacgcctgcagctacgtggactcccgcagcgccgctgtgctctcgcgctggctcggcgtgctcgctgccaagggcgtccaggagctcatccttgtcttcctccccatctggcctatgcgagtagagcccccagccgatgtcctctgcatcgcctccctccaccgcctctaccttggccttcgaaggtcgttccctgacaccgagcacatccgcctcggcgctgacgtctttccctacctcatcgagctcggcatctgccgcaccaacatgaaggccaaggacctcgaccgcttgcttcgttcactcaccccaaatcagagcattgcttttgttcgaaaatactggttaagaaatggacgcatgtacaccgcgcgcat

SEQ ID NO: 5319 - DNA, 549 bp, Oryza sativa
  Clone ID: PAT_MRT4530_12118C.1
atggcgtcaggccggccacacacggcacatccaatcaaagtactccaccgccttcttgcaaagaccgacatactcaggcgtcagcgccggaagaggaggctcgtcctagggcgtcgagggataccggcgaagcggtcggcagacatcgccctgccatggaggccgccgccaccgccgcgggagctcatgatgttccccgtggccactgcagtgggagcccgcgcccgcaccctcgcttgccgccgccccctcccggccgcccaccgcaatcgcctcgtgaacccaaccgcgctcgcctcgccctcccagccacgctccctcctcgccacccgctgctgtctggagcccacagaccggttccccctcctcgtcgcgcctaccaccgctcgtcaacaagctccggccaccactcctctccgtcttcgcctcgcttctccgccgacatcccgctcccgcgccaccacccaccgcccgccatcgcgcgccgccatgagcgtcgaccgcccacagccgcccttgcgtgctgaccgcccgcgcggctgcgcctga

SEQ ID NO: 5320 - DNA, 345 bp, Oryza sativa
  Clone ID: PAT_MRT4530_12119C.1
ggggaaaacacaagaacttggttcaaacaaggtcttttccgaatacaaacaagttctctccagaaaggtcacatttttgggcaaaagggcacagcttacagaaaacgggatcgggggggggggtccagcaaacaccctggaaaacatcactgaaaagggctttggtgacatgggctaatcgggggccgtcccccggggggttgctcaaagctcggcgaccgggcggggcttttgcttgccgtcgacgtggggggggggaagctttttctccttgccgggatcgggggggtcgtcggcgccggggacccgctcctttacctcctccaccttttccttcgccttttt

SEQ ID NO: 5321 - DNA, 987 bp, Oryza sativa
  Clone ID: PAT_MRT4530_1211C.1
atgcgtccgcatggggtcgttgggaccagtgtattcccacgctccacgggatcgttcctgaagaggtgcgatgcagcggcggaagtaatcgccaaagaccatcgcccccgtgaggcccaggctccgcaggcccctaaggcgatcccacaccgcgtcgtattcctcgcccagctccgaagtcgccagccatgcggcagacctttcaggagggccagcgggaactcgaagtcgcggatggtccggcaacgcggtgtagaaccagtccttattccagtcctcccatttcttgcggagattgctctcgatgtactgacccgctgtgcctggccggggctggaagtagcatccccccaccaccgcgccttgcagaagctacggaatgaagaaggcctggaacaaccgcatcgtcggtcgcaccccaatgaacatctcacacaaatgcacgaagatggccagcgtcatcacggcattgggtgcgagatgcaaggcatgaatttcgtagaaatccagaacctcatggaagaatctggagaacggcggaatcaagcccgtcatggcgaaggacaagaggtgcatggatcgctccggatatcgtggccgtggccgcgactctcccgcccgcacgacggcaccgtccggcatgatcttgcggggaaggctaaggtgcctgtctgctgtgatgcgggaggaagggagcactgcgtcgccggtgtcttgggccatggcaaccggcggagagcgtggagcgtgagacagtatgaggtggcgagaatgttagggtttgagaagcgaaaggacgagtgggcggttggtgaaaggaagggggcagagtctctgcctccgcccccttttatcctcgcttcatccgcacttgcctcctcgtttcgcgctcccatacttgcccccacgatcctcgcgcccgcatttgtctcttcgcatcctgcgcccactcatcacgtcgcccgttgtatccgctcccgcctttag

SEQ ID NO: 5322 - DNA, 717 bp, Oryza sativa
  Clone ID: PAT_MRT4530_12120C.1
atggctacctctatcatcctcaagcttaccacggataaactgcccttaaagtcgcacatagccgtggtgattgaggttgcaaggttatccatgaagtttgagttggatcttggtggtcactcgaattctagagaaagacctaggggtgttggattgaaggccgaggacttctgtcgggatctttgcacgatgaggcaagaggcgcagccgcgcgggtggtcggcacacaagggcggcggtgggtggtcggcgctcacggcgcgcgcgagggcgggcggtgggtggcggcgtgggagcgggatgtcggcggagaagcgaggcggaggcggagaggagcgacagcagtgggtggcgaggagggggcgtggctgggagggcgaggcgagcgtggctgggttcacgaggcgagcgcggtgggcggccgggagggcgcggcggcaagcgagggtgcgggcgcggctgggtgcacaggcgagcgcggtgggcggcatagagggtgctgtggtgggtgcggttaggtgcacgaggcgagcgcacggagattccggcgagccctctcctcccgcctccggccaatatgctcccactgcggtggccacggggaacatcacgagctcccgcagcggtggcggcggcctccgtggcagggcgatgtctgccaaccgcttcattggtatccctcgacgctccaggacgagcctcctcttccggcgctga

SEQ ID NO: 5323 - DNA, 252 bp, Oryza sativa
  Clone ID: PAT_MRT4530_12121C.1
atggatattggaatttcagtgccatcaagaccgtgccactgcccactggtattcatggtcaagttggtaacaggaaatggagacgaggagttgcgtacgcgacacggcaccgaggcgcgccgcccaccaataaccaggagcagcggcaggggcccttacctgggcggagtcgcgctcggacggaaggccacgccggcccgggatttcagcggcaactctccggcggcgccggcggcccgcggcgggcgctga

SEQ ID NO: 5324 - DNA, 708 bp, Oryza sativa
  Clone ID: PAT_MRT4530_12122C.1
atggcgtcaggccggccgtacacggcacatccaatcgaagtactccaccgccttcctgcaaagaccgacatactcgggcgtcagcgccggaagaggaggctcgtcctggagcgtcgagggataccaatgaagcggttggcagacatcgccctgccacggaggccgccgccaccgctgcgggagctcgtgatgttccccgtggccaccgcagtgggagcatattggccggaggcgggaggagagggctcgccggaatctccgtgcgctcgcctcgtgcacctaaccgcacccaccacagcaccctctatgccgcccaccgcgctcgcctgtgcacccagccgcgcccgcaccctcgcttgccgccgcgccctcccggccgcccaccgcgctcgcctcgtgaacccagccacgctcgcctcgccctcccagccacgccccctcctcgccacccactgctgtctggagcccacagaccagttctccctcctcgtcgtgcctaccaccgctcgtcaacaagctccggccaccgctcctctccgcctccgcctcgcttctccgccgacatcccgctcccacgccgccacccaccgcccgccctcgcgcgcgccggctcagaacctcctcgtgaagaacgacggaacttcctggcagctcagacaccccagaacttccggagttctaagacaggaacttctgggattgaaataa

SEQ ID NO: 5325 - DNA, 345 bp, Oryza sativa
  Clone ID: PAT_MRT4530_12123C.1
atggtgcaagtatttggttggcaatgctccagtgagggagatcggccgatgactggtgagggcttgccatggcaggagagagagagaagcagagcttcaagctctgttgatgtgaggaaaaggaggcgtgaggtggcggctgacgtcggctgcggttgcttagcagcgacggaaagacggcggcggcagttgatgaacacgacatggcgacggtggcggcgcgacttggcggcgacggaagaggagcttgcggcggcgtgcgccgtgcgcgtgtacgacacgcactgggaggagggggcggttcggctggggttggctgggccgaattgggccggctcggcttag

SEQ ID NO: 5326 - DNA, 454 bp, Oryza sativa
  Clone ID: PAT_MRT4530_12124C.1
acacaacagtactcataggcctcaatggccaattaccctatattaattacaattaacacactttttatgacataactggcatctaagtgaacacgctatccgtgacccatagggcaaatatcttacccccttgcatacaggatatgaccttgtggaaactactgactcacctcatttaaaagcacagtatgaccctacctgaccatgttcagggggctaaaaacgttgtgcaaggtcatttcctgaggagtaccacgcccacccttagtttagccagcctatctccagctcttccggttactaggttactcattcactgcactattctcatcccctgctgccaaatgcatcaccaggcctaattgcgaattcttggcctccacggccaaatggcataacgcgagacagatcaaatgagcaataagctcataactggccactagccgaaataggg

SEQ ID NO: 5327 - DNA, 432 bp, Oryza sativa
  Clone ID: PAT_MRT4530_12125C.1
ggggggcccacatatatgaaagttgaaacagattccgtaaaagataattcagatgacaagatgagtgtatgcaaaactgaagctttgatatcactaagtaggaattattgcattttcatgtccagatcaataaccaacaaataaattgataatgagttgccattgtcagaagtgcatatcataaatgatatgcggcacaggaagccagaatgcatagacttgaacatcagatggaaagtaattcaaggtagatgtaaccaaatcagcagttgagataagcatgtcagttccatgtttttggaagattacaaaaattgttatctcggtgttatgacatcgacatctttcctgttcaaaagcacatataatttgacctcttaaagcatatgttacttcagaataggctgtttgagctgatcctttcagtcatgc

SEQ ID NO: 5328 - DNA, 5900 bp, Oryza sativa
  Clone ID: PAT_MRT4530_12126C.1
atggcggccgggtcttccgcgcccgtttccccttcgtccggccgccctctctcaccccccaccctatataaccctccccgagctccccaccaccgtttccgccactcaccgccctctctccccgccggaatcgagctcgcgccgtcgctctctctctccgccgtcgccgccgagctccggtctgccaccgtcgtcgccccggaccacctcccacctcggcgccgcctccttcggcttcgccgcatcctcgccgacctcgtccacctctccgtttcggtcgccgaccgccggagcaccgtcgaccccgtccacccgagccgcgccgccgccttcctccgctccggtcgccgtttccgtcgtcgccgtcgacccggggtgagccgtggaccgccgcttcgtttccccctttccctcccctctctcggccgccgctccgccgtgcctatggccgccgccggcgaccataggggcgcgggcgcgccgcctcccgccgctgcgccggcgtggccgcctccgggcgtgcctagcggctgccgcgtggggcccggctgtcagccgcccgcgcccttaggtgcggctgacgcgtgggacccatggcgccggccggtgtgagccctggtgcgcccggtccaccttggacccacctcggccatataaggaccggtcttcgggcctctgttgcaaagcactaccgtacttccacatgtctagtgggacaaatgaaggctacacgagctgcggcccggtagtcgagatgtcatggcacagggccggtgtcctgctgctaggggctcagtcctgcctacctgtcccgggggtccggccgtaggtgggattgggtcgatgtacacctctgatcagagtataacctattcgaatagccgcgccctcggttatgggcaagccgagcaatgtacccaaatggccggcagcatcaaccgccgtggtctggacctgactggcttcgttttggagctgcggggcatgtgcgttgtcctggggtatccgcatggagtggactaccagggcaggcagctcccggagcaggagggtgacgatgcagagcgccacgctgcttgggaggttactgcagtgatcctcactggctcacccgagaggacttcgttggcagtcaccgcaggtggagattctttctccgccgcttgccagaacgccgcactcctcgccatcggcacacttcaccagcgctacccggacgagttgcagcactcgccctaccgctaccaccctcgccgcggaggagcccgcgattacgccatcttccgggatgctagctcggaggatgacgctaccatcatgcacctggcgcgcatggtggaggcgtacgacgcggcccgtatcgacttccatcagatggtgcgccgtgggatggtcaagaacaacatgaagatcctggagctgcgtcaggagaatctgcagctgaagaaagacctagatgcagtggaggcgcagctgcatcagctcaagatcgcccagggagaggtctgtcgccccaagcgtcgccgcgtctaccgcagccagaagatcaccgcccgcaagagcacctccaggcccgagcttgttcgccagtccttggcatgaaccagcttcgtggagacccctcgtgccgagcccgcgcccgtggttcctcaggagggggaagcctccggcgttggtagcacggaggatgcgctgctgctcaccttccatggtgacgaccaggagaagtgctaataccggtgatggcaatcaacccaaaggcagcaaccacaacaaccatggcagcccacctccacctcctcccccgcctcctccaccaccaccagacaccaacgccatcctcacccaaatcctagcccagcaggccaacatgatggctgctttcctccaccacatccaaaatccgccacaacataatgctccaccaccacccccacaacactctaaactcgccgagttcctccgcatccgtccaccaaccttctctagctccaataaccccgtggatgcgttggattggttgcatgccgtggggaaaaagttagacaccgtgcagtgcagcgatgaggagaaagtcatcttcgccgcccaccaactgcaggggcccgcgtctctatggtgggaccatttccaggctacgcagccagaggggcagcctattacttgggcccgcttcaccgccgctttccggaggacccatgtgcccgccggagtcatggcccttaagaaaagggaattccgagagttgaagcaaggcaaccgcttcgtgatggagtatttgcatgagtttaacaacttggcccagtacgccccggaggatgttcgtgaagatgaggagaagcaagagaagttcttggcaggtatggaccctgagctgtccgtgcgtctagtctccggggactatcaggatttccaacgtctggtggacaagagcatccgcttggaagccaagcacaaggaactagagtcgcacaagcgtcgcttggcgagtttccgcaaccaacagggggctaaccaaagggtccgctacaccaatccctatccagggggatcctcctcacagcagcagcaacagcagcagcaaccccgctccgcgccccgacctcaattcgtggtgcgcgtcccacagccgcagcaacagcagagtcagcaagggactcgtgcgccccgtcctcctacgccagctgtgcagcctggtcaaggccgcagggacgctccaggtccgcagcgtctgtgcttcaactacttcgagcctgggcactttgcggataaatgcccaaagccgaggcgccagcaaggccaagcgcctccccgccccaacaacggtggtaaggatgtcaatcggggtcgtgtgaaccacgtgacggccgaggacgtgctgacaactccagacgtcatcgttggtacgttcctcattcattccatccctgctaccattttgttcgactctggagcttcccactcgtttatttctgtgccattcgtggggagaaatcagttgggggtagaaaggcttaggaaccctctgatcatcaccacccctggaggggttatgacagcaaagtattatagccctgctgttcctatagaaattcagggaattccttttccctcggatctgatccttctagacaccaagaacttggatgtgatccttgggatgaattggttggctcaattccaaggagtagtggattgtgcaagacgcactgtcactctgtaccgagggccggaacaaccggttgttttctttgcacccccaacctctgtaggcagttcagaacttcatcagataggactgtcagaaatccccatcgtcagagagttcggagacgtgtttccggaagaactacccggtatgccgccgaagcgagagattgagttccggatagatcttgctccaggaaccacccctcagtacaagcgaccctaccgtatggcagcaaatgaactggccgaagttaagaaacagttggaagagttgaaagaaaaggggtatatacggccgagtacctccccctggggtgctcctgtgattttcgtggagaagaaagacaagacgaagaggatgtgcgttgactacagagctctcaatgaagtcactatcaaaaacaagtaccctcttccccggatcgatgatatgttcgatcagcttaaagctgccactgtattctccaagattgatcttcgttccggatatcaccaattacgtattcgtgaagaagatatccctaagaccgcattcaccacgcgatacggactgtatgaattcacggtgatgtcattcggtttaaccaatgctcctgccttcttcatgaacttaatgaacaaagtgttcatggaatacttggataagtttgttgtggttttcattgatgacattctggtgtactcacaatcagaggaagaacatcagcaccatctcagtctggtgttgggaaagttgcgggaacatcaattgtatgccaaacttagcaagtgtgagttctggttgtccgaagtcaaattcttagggcacgtgatatctgctaaaggagtcgctgtggaccccgaaacagtgaccgccgtcactgattggaagcaacccaagacagtcactcaaattcgcagtttcttaggtttggtaggatactaccggaggttcatcgagaacttctccaaaatcgctcgacccatgacacagttgttgaagaaagaagagaaatttgtgtggagcccgcaatgcgagaaggcgttccaaactctcaaagaaaagctggtttcctcgcaagttttaatcttaccagatactcgcaaggacttcatggtgtattgtgatgcttcgcgtcaaggattggggtgcgtgcttatgcaggaaggacatgtggtagcctatgcctcacgccagctacggccccatgaaggcaattaccctacccatgatttggagttagccgctgtggttcatgctctaaagatctggcggcactatctcattgggaatcgctgtgaaatatatactgatcataagagtttgaaatacatcttcactcagtcggacctgaatcttcggcagaggagatggttagaactcatcaaggattatgatgtgggaattcactataatcctggtaaggccaacgtggtcgccgacgctctaagccgaaaaagccattgcaacactcttgacgtccgtggcattccacctgaacttaatcaacagatggaagccctgatcctaagcatagttggtcgtggattcttggctacgttggaagccaagcctaccttgctcgatcaaatccgcgaggctcagaagaatgatccggatatgcgtggactcctcaagaatatgaaacagggtaaagccgctggtttcacagaggatgaacacggaaccctatggaacggaaatcggcgtgtcaaggcagagcaccaacgaccggccggacttctccaacctctccaagtaccagaatggaaatgggatgaaattgggatggatttcatcaccggacttccaaaaacccagggcggttatgattctatatgggtagtcgtggatcgactaaccaaggtggctcggtttattcatgtgaagaccacctatggagggaacaaactagccgagctctacttcgctaggatcgtgagtctccatggcgttcctaagaaaattgtatctgataggggaagccaattcacctctcacttttggaagaagctccaagaagagctgggtacgcggagaagttgcttaccagttggagctgcccgcctccttgggcaacgtgcatgatgtgttccatgtgtcgcaactcaagaaatgccttcgagtgccgcccgagcaggccgactcagagcagattgaagttcgcgaagacttgacctacgtggagagaccagtgagaatcttggacaccatggagcgcaggaccaggaaccgggtaatccgtttttgcaaggtccaatggagcaaccacgccgaggaagaagctacttgggagcgtgaagacgagcctcgctgacgggtggggcccacccgtcatccccttcctcccgccgctcccaccgcctccacgtgcaataaagagggggaaatcactccccgtgattccctctccctttccccccacttttccctctctctctccctcggattcgtttggaaacactcccgcaaacttcgtcggcgcatcaatggcgggcggatcttccgcggccgattccccctcatccgttcgttctctcccccttccaacactatttaaacgctccccgtgcctgcctgcaccgtttccggcactcgccgctctctctccccgtcggaatcgagctcgcgcccgcgttatctctcttcgacgtcgcgccgagcttcggtccgccggcgtcgtcgcccggaccctctttcgtttcggcgt

SEQ ID NO: 5329 - DNA, 1228 bp, Oryza sativa
  Clone ID: PAT_MRT4530_12127C.1
ttttgttgtttttttcttttttttttttttttttttttattttcttttggggggcaaaaaaacactcctttcagcttcgatgtttcaatggtaagggctttagagaacacttccagctttatccctgacaaaacaagaattttgtttctacttattaaaccggtaagcgtttaccactgtccgataacaactctgatacatggcgacttcgattaattaatcaacagcgttctacaaattttggtctatctcaataatgttctaaaaatttcgtacaccaaagttacactgttcaatttatacaagagcatggttgagaacttgggattcccttgaggactatggccaaaattctcatgttaaaaaactgagcaataaactttgatgctctcggttttgctgtaaaatgtgccatggcagacaccatgaaccagaatgtagggccttgttgcctgatcataaaaatctcaagatatgcatgccgtcttcgataaattctggagcaaacgggtaaaaaaaggtcggctcggagagataaaggtagagcgagaggcctggattctgaaaataagtgaagaagaaaaataaggctgagttacccctactcagctgacattggatctatcggaccaaaatccttcagtggccaaacccgacaaaagatcttccctgtaattagaccataagggacaggtccaaactgtcttgaatctctagaagcataaatattatcaccctgcacccagacatggccttttggtaccacgacggtcttggaggcgtcgctgttgccggggtcgacgaggaacgtgacggcgtcgccctccatcccgacgacgcgcttgacgaccgccttgcgcgggttctccggcgagacgaggagcacggcgtcgccgctcgccacccgcccgagccgcgcgctcaccaggtccaccgccaccacgtcccccgccaggttcatcgccggcagcatgctcgggcccatcacctgcgccgacgccaagagccccacagaacgcgggtggggatcaagccagagcagagcagagagagagagagaggaagaggagacgcgggcgaagtacagtaccagcgcgaaggagcagacgtgggcgttgacgacgtggacggcgcagacggcctgcgcgacgaggaagacgcgggagaaggcttccccggcgatctccctccacgggatcccgccgaggcgccgcgcgaacccggacat

SEQ ID NO: 5330 - DNA, 5421 bp, Oryza sativa
  Clone ID: PAT_MRT4530_12128C.1
atgtcgtggcacagggccagtgtcctgctgctaggggctcagtcctgcctacctgtcccgggggttccggctgtaggtgggattgggtcggtactcttgtctatggctaggatgggttggaaactatgtcacgtcttccgtctgtataccgtggtgatggccggcagcatcaaccgtcgtggtctggacctgactggtttcgttttggagctgcggggcatgtgcgttgtcctggggtatccgcatggagtggactaccagggcaggcagctcccggagcaggagggtgacgatgcagagccccacgctgcttgggaggttactgcagtgatcctcactggctctcccgagaggacttcgttggcggtcaccgcgggtggagattccttctccgccgcttgccagaacgccgcactcctcgccatcggcactcttcaccagcgctacccggacgagttgcagcactcgccctaccgctaccaccctcgccgcggaggagcccgcgactacgccaccttccgggatgctagctcggaggatgacgctaccatcatgcacctggcgtgcatggtggaggcgtacgacgcggctcgtatcgacttccatcaaatggtgcgccatgggttggtcgagaacaacatgaagatcctggagctgcgtcaggagaatctgcagctgaagaaggacctagacgcagtggaggcgcagctgcatcagctcaagatcgcccagggagaggtctgtcgccccaagcgccgccgcgtctgccgcagccagaagatcaccgcccgcaagagcacctccaggcccgagcttgttcgccagtccttggcgtggacttgcttcgtcgagacccctcgtgccgagcccatgcccgtggttcctcaggagggggaagcctccggcgttggtagcacggaggatgcgctgttgctcaccttccgtcctggcccgtcgcagcggagaagtgctaacaccggtgatggcaaccaacccgaaggcagcaaccaccacaaccatggcagcccacctccacctcctcctccgcctccaccaccaccaccagacaccaacgctattctcacccaaatcctcgcccagcaggccaacatgatggctgctttcctccaccacatccaaaatccgccacaacataatgctccaccaccaccgccacaacactctaaactcgccgagttcctccgcatccatccacctaccttctctagctccaataaccccgtggatgcgttggattggttgcatgccatggggaaaaagttagacatcgtgcagtgcagcgatgaggagaaagtcgtcttcgccgcccaccaactgcaggggcctgcatctctatggtgggactatttccaggctacgcagccagaggggcagcctattacttgggcccgcttcaccgccgctttccggaggacccatgtgcccgccggagtcatggcccttaagaaaagggaattccgagagttgaagcaaggtaaccgctccgtgatggagtatttgcatgagttcaacaacctggcccggtacgccccggaggatgtacgggaagatgaggaaaagcaggagaagttcttggcaggaatggatcctgagctgtcagtccgtctagtctccggggactatccagatttccaacgtctggtggacaagagcatccgcttggaagccaagcacaaggaactggagtcgcacaagcgccgcttggcgaatttccgcaatcaacagggagctaaccaaaggatccgctacaccaatccctatccagggggatcgtcctcgcagcagcaacagcagcagcaacctcgctccgcgccccgacctcaattcgtggtgcgcgtcccacagccgcagcaacagcagagccagcaagggacccgtgcgccccgtcctcctacgccagccgcgcagtctggtcaaggccgcagggacgttcaaggtccgcagcgtctgtgcttcaactgcttcgagcctgggcactttgcggataaatgcccaaagccgaggcgccagcaaggccaagcgcctccccgctccaacaacggtggtaaggatgtcattcggggtcgggtgaaccacgtgacggccgaggacgtgctgacaactccagacgtcatcgttggtacgttcctcattcattccatccctgctaccattttgttcgactctggagcttcccactcgtttatatctgtgccattcgtggggagaaatcagttgggggtagaaaggcttaggaaccctctgctcatcaccacccctggaggggttatgacagcaaagtattatagtcctgccgtccctatagaaattcaggggattccttttccctcggatctgattcttctagacaccaagaacttggatgtgatccttgggatgaattggttggctcaattccaaggagtagtggattgtgcaagacgcactgtcactctgtaccgagggccggaacaaccggttgttttctttgcacccccaacctctgtcagtagttcagaacttcatcagataggactgtcagaaatccccatcatcagagagttcggagacgtgtttccggaagaactacccggtatgccgcccaagcgagagattgagttccggatagatcttgctccaggaaccactcctctgtacaagcgaccctaccgtatggcagcaaatgaactggccgaagttaagaaacagttggaagagttgaaagaaaaggggtacatacgtccgagtacttccccctggggtgctcctgtgatttttgtggaaaagaaagacaagacgaagaggatgtgcgttgactacagagctctcaatgaagtcaccatcaaaaacaagtaccctcttccccggatcgatgatctgttcgatcagcttaaaggtgccacggtattctccaagattgatcttcgtttcggatatcaccaattacgtattcgtgaagaagatatcccgaagaccgctttcaccacgcgatacggactgtatgaattcacggtgatgtcattcggtttaaccaatgctcctgccttcttcatgaacttaatgaacaaagtgttcatggaatacttggataagtttgttgtggttttcattgatgacattctggtatactcacaatcagaggaagaccatcagcaccatctccgtctggtgttgggaaagttgcgggaacatcaattgtatgccaaacttagcaagtgtgagttctggttgtccgaagtcaaattcttagggcacgtgatatctgctaaaggagttgctgtggaccccgaaacagtgaccgccgtcaccgattggaagcaacccaagacagtcactcaaattcgcagtttcttgggtttggcaggatactaccggaggttcatcgagaacttctccaaaatcgctcgacccatgacacagttgttgaagaaagaagagaaatttgtgtggagcccgcaatgcgagaaggcgttccaaactctcaaagaaaagctggtttcctcgccagtgttaatcttgccggatactcgcaaggacttcatggtgtattgtgacgcttcgcgccaaggattggggtgcgtgctcatgcaggaaggtcatgtggtggcctatgcctcacgccagctacggcctcatgaaggcaactaccctacccatgatttggagttagccgcggtggttcatgctctaaaaatctggcggcactatctcattgggaatcgctgtgaaatatatactgatcataagagtttgaaatacatcttcacccaatcggatctgaatcttcggcagagaagatggttagagctcatcaaggattatgatgtgggaatccactatcatcctggtaaggccaacgtggtcgccgacgccctaagtcgaaaaagccattgcaacactcttaatgtccgtggcattccacctgaacttaatcaacagatggaagccctgaacctaagcatagttggtcgcggattcttggctgcgttggaagccaagcctaccttgctcgatcaaatccgcgaggctcagaagaatgatccggacatgcgtggactcctcaagaatatgaaacagggtaaagccgctggtttcacagaggatgaacacggaaccctatggaacggaaatcgggaagctcacgaaagtccttattccatccaccctggcagtacgaagatgtacttagacttgaaggagaaatactggtgggttagtatgaagcgggaaattgcagagttcgtggccctttgtgatgtgtgccagcgtgtcaaggcagagcaccaacgaccggccggacttctccaacctctccaagtaccagaatggaaatgggatgaaattgggatggatttcatcaccggacttccaaaaacccaaggtggatatgattctatatgggtagttgtggaccgattaaccaaggtagctcggtttattcctgtgaagaccacctatggagggaacaaactagccgagctctacttcgctaggatcgtgagtctccatggcgttcctaagaaaattgtatctgataggggaagccaattcacctctcacttttggaagaagctccaagaagagctgggtacccgattaaatttcagcaccgcgtatcacccgcagacagatggacagaccgagcgtctaaatcagatcctagaagatatgcttcgcgcatgtgtcctagatttcgggaagacctgggataagagtctcccctatgccgagttctcctacaataacagctaccaagccagcatacaaatggcaccttatgaagcgttgtatgggcgcaaatgccggacaccgctcttgtgggaccaagttggggaaagccaagtgttcgggactgatatactgagagaagctgaagcgaaggtcagaaccattcgggataatctaaaggtggcacagtcccggcagaaaagttatgcagataaccgtcgccgtaacctggaattcgcagtggatgattttgtgtaccttcgggtcacgccattgcgaggtgtacacaggtttcagacgaaagggaagctcgcacctcggttcgtgggtcctttccgtatcattgctcgacgcggagaagtcgcttaccagttggagctgcccgcctccttgggcaacgtgcatgatgtgttccatgtgtcgcaactcaagaaatgccttcgagtgccgtccgagcaggccgactcagagcaaattgaagttcgcgaagacttgacttacgtggagaggccagtgaaaatcctggacaccatggagcacaggaccaggaaccgggtaatccgtttttgcaaggtccaatggagcaaccacgccgaggaagaagctacttgggagcgtgaagacgagctgaaggcagcccatcccgatctcttcgccagttcttccgaatctcggggtcgagattccgtttaa

SEQ ID NO: 5331 - DNA, 2057 bp, Oryza sativa
  Clone ID: PAT_MRT4530_12129C.1
ttagagaaccagagcttgcatcctgcatgggtttataatagtgtgcttttttgtctgcaacttggaagagtagatgtcagaaggtccaatgcttctggcaatgcagttcatggctgcaagaatcaagatcccaatgcagtttctctgtactctcttgagcccaattttggttgcctgttgatctattccaagcagactcacttggctgaagaacagtagagcaagcaagaaagagttcttgaagaaatacctcacttggcctctacctctttcagtatgcgtgcttgcacgagcagcaggtttatccttgcagaagccaagtgctaaaagataagggagaggtacaacacctacttcagtttgcaggttgcaatcaaacacactgaagttcctttgcatgtggagattgagtagtttaaagccacctgcttcaatctcattgctccagtagcacaggagctgctccttgctgagcttcgccatccttaggacccttgacacaaccttgatgtcgattaaggcaaaaagcagctgaacttcctccattgtggctggccaggtcttgctcttccatcctttcttcttcttgaatagctccttcactttcacttccttcttatcaagagaggattgaacttgttgaatcgagcttccagtatgactatgaacactcatgagggcactattctttttcttgtcctttttcaggaaaagacggaaagtcatgatagactcctctaataatttgatgaggtcagatgcaaaaattgaaggttccacttgatcttcagcattatatttcccatctgcaacttgaaaagtggggacctgaagtaacttcgacaaggaactccgagaccgtgcatatatctcaacccgtgaaccttgctcaaatggctcattctcaacaaatctctgcaatagaacctggaactgctggaatgcttgagcagcacagctgtaggtggtgggattatcaggttgagctgcgagtatcagactcaggtgcacatacatacaatgaagagcctcccaacttaaagaaacatgcccaacatatgctgtctcaagtgtttggtagggatcatcctcgctctgctgttgctgaagatgttcgcagtcctcctggaggtcatccctccttttgaaagagaggttgcgcagggttgatgccaatttggatgctgatctaggcgacttttttgagatgttgaaggaccctggatccttgagaagctgcgtgatcatcttatcgaacaccgccatcctctcacaatacttctcatagagcgaatcgaacccgcatagcgggaacccgtcgccgacgtcggactccatccactccctggaactactcccttcctcctcctcctcttccccatcctcctccacctcagcacactcctcctcagggatgagcaccatgaagctgttcttcctcagctccttgagcctacgcttcacctcattggtgatgaaatcatcatcgtcatcatcctcctcctgcccttccacggccccattgcctgcatctgcatccatacccgcaccggctgctgccgccgcaggatcatcctccaagatcttgcccttctgctcatcggaagctgcattgttcccagccttggtttcctcctctgattctacaacctctcccccgcccccgccgctcttccgggccttccccaacttcttgatcttgaagaaatccatccgtggaagcgcagaagcttcgaaatcccaacagagaggatccgatcgatgctaaagaagatccccttcccctttccttaatccaaaacctcactcccctttttgtcttccccgagtaaccagcttgaataatggggataaaaaacctccaagatccaaccgacgaatcaccagcggagcccagcaatcgcgaccggggcagctcatcacgcggcggcggtgagctccatatggcggcgtcgggggggatcgaggcggagatcaatcgggaggggaatggaatggagagcgtgtgctgcgtgcttgggtttaagcgagcgttacagcatgacgctacagtggcc

SEQ ID NO: 5332 - DNA, 458 bp, Oryza sativa
  Clone ID: PAT_MRT4530_1212C.1
gttgacggttgttatcgatcagtttcgaccgtcaatattactaaactagagaagaactagtgatgcttgcaatgcatatacctgttagaataataatattccactagtattaggtatactaacatttttgcagagaataacaataaagtggaggagaatcgacatcaactcaaacgataaatcaatcggacgatgtcgacaatcagacttatatatgaataggccaagaactcagaattgacacgatgaattgggccaaaattcacaagtctgcctatgagagcaaaagaggaggctgcctaccgaaattgggtcaggtcagcccagcccatggtttggccgaaccctccgcaactccgtttgatccagggttctcctgaacggctgagatggctccccaatcacggttggagggtatttctttcacccaagcaagtacctctgcgaacgaaaacaca

SEQ ID NO: 5333 - DNA, 5352 bp, Oryza sativa
  Clone ID: PAT_MRT4530_12130C.1
atggatgaagtcgggggtcgatggacattctccagggcaaatgaaggctacacgagctgcggcccgatggccggcagcgttacccgtcgtggtttgcacatgactggcttcgtcttggagctgcgaggcatgtgcgtggtcttggggtatccacatggagtggattaccaggccaggccgcttccggatcaggagggtgaggatgcagagcctcacgctggttgggaggtcactgcagtgatcctctccggctctcccgagcggacttcactggcagtcaccgcgggtggggattccttccccgccgcttgccagaacgccgctctcctcgccatcggcacccttcaccagcgctacccggacgagttgcagcactcgccctaccgctaccaccctcgtcgcggaggagcccgcgactacgccaccttccgggacgccagctcggaggatgacgctaccgtcgtgcatctggcacgcatggtggaggcgtacgacgcggctcgtatcgacttccatcagatggtgcgtcgtggcatggtggagaacaacatgaagatcctggagctgcgtcaggagaacctgcagctcaagaaggacctcgacgcgttggaggcgcagctgcatcagctcaagatcgcccagggagagatctgccgccccaagcgtcgccgcgtctgccgcagccagaagatcaccgcccgcaagagcacctccaggcctgagcttgtccgtcagtccctggcgtggacttgcttcgtcgagacccctcgtgccgagcctgcgcccgtggttccccaggagggggaagcctccggcgttggtagctcggagggtgcgctgttgctcaccttccgccctggcccgtcgcagcgctctccttctctgtttgctggttctgtgtggggttttcagatggtgacgaccaggagaaatgttaacaccggtgaaggcaaccaacccgaaggcagcaaccccaacccccaaggcaatccacctccaccaccaccaccagacaccaacgccattctcacccaaatcctcgcccagcaagccaacatgatgaatgctttcctccaccacctccaaaacccgccacaacagaatgctccaccaccacctccccaacactccaaactcgccgaattcctccgcatccgcccacccaccttctctagctccaacaatccagtagatgcgttggattggttgcatgccgtggggaagaagctggacactgtgcagtgcagtgatgaagagaaagtcatcttcgccgcccatcagctgcagggacccgcatctctatggtgggaccatttccaggccacgcagccagagggacagcctattacttgggcccgcttcaccgccgctttccggagaacccatgtgcccgctggagtcgtggctcttaagaaaagggaattccgagagttgaagcaaggcaaccgctccgtgatggagtatttgcatgagttcaacaatctagcccgttatgccccggaggatgtgcgggaagatgaggagaagcaagagaagttcttggcaggaatggaccctgagctgtccgttcgtctagtctctggggactatcctgattttcaacgactggtggacaagagcatccgcttggaagccaagcacaaggagctggaatcgcacaagcgccgcttggcgaatttccgcaatcagcagggtgctaaccagagggtccgctacaccaatccctacccagggggatcctcctcgcagcagcagcaacagcagcagaatcagcaagggactcgtgcgccacgtcctcctacgccaactgtgcagcccgttcaaggccgcagggacgcttcaggtccgcagcggctgtgcttcaactgcttcgagcccgggcactttgcggataaatgcccgaagccaaggcgtcagcaaggccaagcgcctccccgctccaacaacggtggcaaggacgtcattcggggtcgtgtgaatcacgtgacggccgaggacgtgctgacaactccagacgtcatcgttggtacgttccccgttcattccatccccgctacaattttgttcgactctggagcttcccactcgtttatatctgtgccattcgtggaaaaaaatcagttgggggtagaaaggcttagaaaccctctgctcatcaccacccctggcggggttatgacggcaaagtattatagccctgccgttcctatagaaattcaggggattccttttccctcggatctgattctgttagacacaaagaacttggatgtgattcttgggatgaattggttggctcaattccaaggagtagtggattgcgcgaggcgcactgtcactctgtaccgaggaccagaacaaccggttgttttctttgcacctccaacctctgtcagaagttcagaactgcatcagataggtctgtcagaaatccccatagtcagagagttcggagacgtgtttccggaggaactacctggtatgccgcccaagcgagaaattgagttccggatagatcttgctccaggaaccactcctctgtacaagcgaccctaccgtatggcagcaaatgagctggccgaagttaagaaacagttggaagagttgaaagaaaaggggtacatacgtccgagtacttccccttggggtgcccctgtgatttttgtagaaaagaaagacaagacgaagaggatgtgcgttgactacagagctctcaatgaagttaccatcaaaaacaagtaccctcttccccggatagatgatttgttcgatcagcttaaaggtgccactgtattctccaagattgatcttcgttccggatatcatcaattacgtattcgtgaggaagacattccgaagaccgcattcactacgcgatatgggctgtatgaattcacggtgatgtcgttcggcttgaccaatgcacctgccttcttcatgaacttgatgaacaaagtgttcatggaatacttggataagttcgttgtggttttcatcgatgacattctgatatactcacaatcagaggaagaccatcagcaccatctccgtctggtgttgggaaagttacgggaacatcaattgtatgccaagcttagcaagtgtgagttctggttgtccgaagtcaaattcttggggcacgtgatatctgctaaaggagttgctgtggatcccgaaacagtgaccgccgtcaccgattggaagcaacccaagacagtcactcagattcgcagtttcttgggtttggcaggatactaccggagattcatcgagaacttctccaaaatcgctcgacccatgacacagttgttgaagaaagaagagaagtttgtgtggagcccgcaatgcgagaaggcgttccaaactctcaagcaaaagctggtttcctcgccagtgttaatcttgccggatacccgcaaggacttcatggtgtactgtgatgcttcgcgccaaggattggggtgcgtactcatgcaggacggtcatgtggtagcctatgcctcacgccagctacgacctcatgaaggcaactaccctacacatgacttggagctagcagcggtggttcatgctctaaaaatctggcggcactatctcattgggaatcgctgtgaaatatatactgatcacaagagcttgaaatacatcttcactcagtcggacctgaatcttcgacaaaggagatggttagaactcatcaaggattatgatgtgggaattcactatcatcctggcaaggctaacgtggttgccgacgctctaagtcgaaagagccattgcaatactctcaacgttcgtggcattccacccgaacttagtcaacagatggaagccctgaacctaaacatagttggtcgtggatttttggccgcgttggaagccaagcctaccttgctcgatcaaatccgcgaggctcagaagaatgatccggacatgcatggactcctcaagaatatgaaacagggtaaagccgcaggtttcacagagggtgaacacggaaccttatggaacggaaagcgggtatgcgttccagatagcagagaacttaaacagctgatacttcaggaagctcacgaaagtccttattccattcacccgggcagtaccaagatgtacttagatttgaaggagaaatactggtgggtcagcatgaagcgggaaattgcagagtttgtggctctatgtgatgtgtgccagcgtgtcaaggcagaacaccagcgaccggccggacttctccaacctctccaagtgccggaatggaaatgggatgaaattgggatggatttcatcaccggacttccaaaaacccaaggtggatatgattctatatgggtaatagtggatcgattaaccaaggtagctcgatttattcctgtgaagaccacctatggagggaacaaactagcggagctctacttcgctaggatcgtgagtctccatggcgttcccaagaaaatcgtatctgataggggaagccaattcacctctcacttttggaagaagctccaagaagagctgggtactcgattgaatttcagcaccgcgtatcacccgcagacagatggacagaccgagcgtctaaatcagatcttagaagatatgcttcgcgcatgtgtcctggacttcgggaagacttgggataagagtctcccctatgccgagttctcctacaataacagctatcaagccagcatacaaatggcaccctatgaagcgttgtacgggcgcaaatgccggacaccgctattgtgggaccaagttggagaaagccaagtgttcgggactgatatcctgagagaagctgaagctaaagtcagaatcattcgggataatctaaaggtggcacagtctcggcagaaaagttatgcagataaccgacgccgtgatctggaattcgcagtggatgactttgtgtaccttcgagtcacgccattgcgaggtgtgcacaggtttcagacaaaagggaagctcgcacctcggtatgtgggtcccttccgtatcatcgctcgacgcggagaagttgcttaccagctggagttgcccgcctccttgggtaacgtgcatgatgtgttccatgtgtcgcaactcaagaaatgtctccgagtgccatccgagcaggccaactcagagcaaattgaagttcgcgaagatttgacctatgtggagaggccagtgaaaatcctggacaccatggagcgcaggaccaggaaccgggtaatccgtttttgcaaggtccagtggagcaatcacgccgaagaagaagctacttgggagcgcgaagacgagctgaaggcagcccatcccgatctcttcgccagttcttccgaatctcggggtcgagattccgtttaa

SEQ ID NO: 5334 - DNA, 308 bp, Oryza sativa
  Clone ID: PAT_MRT4530_12131C.1
gggacgcgtgggcggacgcgtgggcggacgcgtgggtcagaaacatcattccccccaccccaagcattattccgtctggttcggaacccgggttcttgagagagggagagggatttgagataaagaaggcgggttgggggcttgatccttggcttggaaggtggcggtggcacagggatggttttaggggcggcgaaaaaacaggcggttggtcaaggggagggattcaccaacctgaatggttaccagggggggttcttatgggtggcaagttttggattcgggtttcttacctttaacttcgggat

SEQ ID NO: 5335 - DNA, 1428 bp, Oryza sativa
  Clone ID: PAT_MRT4530_12132C.1
atggtgagggcgtcaacagccatctctgcgggaagagtcgtcgtcgtcgccggagcggcggcgttggtggttgtcttgctgtgcgcggcgccggcgccggcggccgtggaagctgtcccggccggcgccgaggtctccgagttcccggggttcgacggcgacctcccctccaagcactacgctgggtacataactgttggacatcagccgctaaagagacatatgtattactattttgccacttccgaaaggaactcaaccactgaccctgtcatcatctggataaatggtggcccagcatgttcaggatttagtgcctttttgcattcaatcggaccattgaaaatagagggacccatgattcatgccagagatgagccaaggaccaagttaaatcctttctcatggaccaagatgtctagtgtccttttggttgactcaccagcaggagtgggctattcttattctgaaaatgaagatgactatgtaacaaatgatacaagcagagtattggacctgtatgattttttatcgaagtggttttctgaatatcttgagtttctatcaaatcctttctacattgccggttgctcctatagtggcgtgatagtaccagttcttgcacaagaaattctgaagcgaaatgaagacaatggcagaataaagataaattttaagggttattcactgtgtaatccagctgttgatgtagaaattgaaaataacgcgtttgtaccttatgcatttcgaatgggattgatttcagatgaattatatcagaatttagttagtacgtgcaatgggaagtactggaataacaaaggcccatcttgtctagcaaacttggaacagtttcataagcaaatcagtggcattaacatggaacatattctttgtccaccatgtcgttatcaaatgggaataaccaaagaagccaatgaggaatatgattttggtcagatgtttgagctcctttccgaaagctccgagtatggtttagaatgcaataatcaagaactggtcctcgagaaactctttgacacaaaatccagcagagaaaaactgcatgccaaaccgattgaaatattacaaaagtggaagagatgccccaactttatccaatacacaagagatattccaactttaacagagtatcacttaaatgagtttttccaatgcagtggagatcatgccttgcttgtcccattttctgcaactttagagtggctaaaaacattgaactataaggaaattgagaaatggcatccatggtttgtagagaaacaaattgcagggtattcagttcggtatgaaaataatatactatttgcaacaatcaagggagctggccatgtcccatcagattacctgccatttgaagtatttgttgcctatcaaagatggatagatggttctgattctttatag

SEQ ID NO: 5336 - DNA, 6446 bp, Oryza sativa
  Clone ID: PAT_MRT4530_12133C.1
accgccaccccacccagcgcgccacccccgccgcaccacagcgcccccaacccccccccccacccgaaaccccaccccggcctcgcccccgcccgccccgcccgcccccccaacccggccccgcccccccctcgccccgacccccgccacacgcccgcccacccccctcccgccgccccccctcaccccccccccccccaccggccccgccgcgccccgccccccccaccccccgcgccgccccccatcccgcccgccccgccccccgccgccccgcccggaccccaccccccgacgcgcacaaccccactccccccccccgccccccccccggccccccccccgccccccccccgccgaacgccccgcaccccaagaggccagcccccgttaagccatccgtgcccccgggcgtcggcgacagggcggggcaacaccagaccgggctgacggcgaaccaggcgggaaaagcaccgcccggcgccctcagatgcagatgacgggtgggaacccacggcgccggccggtgtgagcccgggtgcgcccgggtccaccgtggacccacctcggccatataaggaccggtcttcgggcctctgttgcaaagcactaccgtacttccacatgtctagtggggcaaatgaaggctacacgagctgcggcccggtagtcgagatgtcatggcacagggccggtgtcctgctgctaggggctcagtcctgcctacctgtcccgggggttccggccgtaggtgggattgggtcgatgtacacctctgatcagagtataatctattcgaatagccgcgccctcggttatgggcaagccgagcaatgtacccaaatggccggcagcatcagccgtcgtggtctggacctgactggtttcgtcttggagctgcggggcatgtgcgttgtcctggggtatccgcatggagtggactaccagggcaggccgctcccggagcaggagggtgacgatgcagagccccacgctgcttgggaggttactgcagtgatcctcaccggctcacccgagaggacttcgttggcagtcaccgcgggtggagattctttctccgtcacttgccagaacgccgctctcctcgccatcggcactcttcaccagcgctacccggacgagttgcagcactcgccctaccgctaccaccctcgtcgcggaggagcccgcgactacgccaccttccgggatgctagctcggaggatgacgctaccatcatgcacctggcgcgcatggtggaggcgtacgacgcggctcgtatcgacttccatcagatggtgcgccgtgggatggtcgggaacaacatgaagatcctggagctgcgtcaggagaatctgcagctgaaaaaggacctagacgcagtggaggcgcagctgcatcagctcaagatcgcccagggagaggtctgtcgccccaagcgccgccgcgtctgccgcagccagaagatcaccgcccgcaagagcacctccaggcccgagcttgttagtcagtccctggcgtggacttgcttcgttgagatcccccgtggttcctcaggagggggaagcctccggcgttggtagcacggaggatgcgctgttgctcaccttccatggtgacgaccaggagaagtgctgtcaccggtgatggcaaccaacccgaaggcagcaaccacaacaaccatggcagcccacctccacctcctcctccgcctccaccaccaccaccagacaccaacgccattctcacccaaatcctcgcccagcaggccaacatgatggctgctttcctccaccacatccaaaatccgccacaacataatgctccaccaccacccccacaacactctaaactcgccgagttcctccgcatccgtccacctaccttctctagctccaacaaccccgtggatgcgttggattggttgcatgccgtggggaaaaagctagacaccgtgcagtgcagcgatgaggagaaagtcgtcttcgccgcccaccaattgcaggggcccgcatctctatggtgggaccatttccaggctacgcagccagaggggcagcctattacttgggcccgcttcaccgccgccttccggaggacccatgtgcccgccggagtcatggcccttaagaaaagggaattccgagagttgaagcaaggcaaccgctccgtgatggagtatttgcatgagttcaacaacctggcccggtacgccccggaggatgtacgggaaaatgaggaaaagcaggagaagttcttggcaggaatggaccctgagctgtccgtgcgtctagtctccggggactatccggatttccaacgtctggtggacaagagcatccgcttggaagccaagcacaaggaactggagtcgcacaagcgtcgcttggcgaatttccgcaatcaacagggagctaaccaaaggatccgctacaccaatccctatccagggggatcctcctcgcagcagcaacaacagcagcagcaaccatgctccgcgccccgacctcaattcgtggtgcgcgtcccacagccgcagcagcagcagagtcagcaagggacccgtgcgccccgtcctcctacgcccgccgtgcagtctggtcaaggccgcagggacgttcaaggtccgcagcgtctgtgcttcaactgcttcgagcccgggcactttgcggacaaatgcccaaaaccgcggcgccagcaaggccaagcgcctccccgctccaacaacggtggtaaggatgtcattcggggtcaggtgaaccacgtgacggccgaggacgtgctgacaactccagacgtcatcgttggtacgttcctcattcattccatccctgctaccattttgttcgactctggagcttcccactcgtttatatctgtgccattcgtggggagaaatcagttgggggtagaaaggcttaggaaccctctcctcatcaccacccctggaggggttatgacagcaaagtattatagtcctgccgtccctatagaaattcaggggattccttttccctcggatctgattcttttagacaccaagaacttggatgtgatccttgggatgaattggttggctcaattccaaggagtagtggattgtgcaagacgcactgtcactctgtaccgagggccggaacaaccggttgttttctttgcacccccaacctctgtcagtagttcagaacttcatcagataggactgtcagaaatccccatcgtcagagagttcggagacgtgtttccggaagaactacccggtatgccgcccaagcgagagattgagttccggatagatcttgctccaggaaccactcctctgtacaagcgaccctaccgtatggcagcaaatgaactggctgaagttaagaaacagttggaagagttgaaagaaaaggggtatatacgtccgagtacttccccctggggttctcctgtgatttttgtggagaagaaagacaagacgaagaggatgtgcgttgactacagagctctcaatgaagtcaccatcaaaaacaagtaccctcttccctggatcgatgatctgttcgatcagcttaaaggtgccacggtattctccaagattgatcttcgttccagatatcactagttgcgcatccgtgaagaagatattccgaagaccgcattcaccacgtgatacggactgtatgaattcacggtgatgtcattcggtttaaccaatgctcctgccttcttcatgaacttaatgaacaaagtgttcatggaatacttggataagtttgttgtggttttcattgatgacattctggtatactcacaatcagaggaagaccatcagcaccatctccgtctggtgttggggaagttgcgggaacatcaattgtatgccaaacttagcaagtgtgagttctggttgtccgaagtcaaattcttagggcacgtgatatctgctaaaggagttgctgtggaccccgaaacagtgaccgccgtcactgattggaagcaacccaagacagtcactcaaattcgcagtttcttaggtttggcaggatactaccggaggttcatcgagaacttctccaaaatcgctcgacccatgacacagttgttgaagaaagaagagaaatttgtgtggagcccgcaatgcgagaaggcgttccaaactctcaaagaaaagctggtttcctcgccagtgttaatcttgccggatactcgcaaggacttcatggtgtattgtgacgcttcgcgccaaggattggggtgcgtgctcatgcaggacggtcatgtggtggcctatgcctcacgccagctacggcctcatgaaggcaactttccaacggagagaagcatcaaggcaacacaaatccccgccaagattaccgtttcagcctaactccagtgccaggacagaggaatcgaaatgagaaaagaaaatgccgagtccgggaagacatctgttgcttcaattgtcaaggaatgggtcatttcgccgacaagtgcccaaaaccgagaaacatagctgccggcacgtcagtccacgcaactccctgcaatcagaagcttgctcctcagcaaattgtcatccatgcatcccgaagcagtcctatagcccgcgttgcaacagctctaactccagcgagtgcattactgtcgcgaccgggaaaattgccttttcccgaacgcaccacggtatacagacggaagacgtgacatagtttccaacccatcctagccatagacaagagtaccgacctaatcccgcctacggccggaacccccgggacaggcaggcgagactgagcccctagcagcagggcaccaaccctctgccatgacatctcgactaccgggccgcagctcgtgtagccttcatttgccctggagaatgtccatcgacccccgacttcatccatctccaatccgtgtacttttgtttataaccagactgagccacaaactaagccttacccactagacatgtggaagtacggtagtgctttgcaacagaggcccgagcttaatccttatagtggccggggtgctacttcccacaactggcatgcacccaaaccccaccagaaaacaggttttaggggttttgaaagaggaagagagagagaacggccttccgaaccttcagcgacgaccgcgaaccacgcttcgggaacctccggaacgacgaaagctacgcgaagcacacaagcaaagctacaagcctataaagaagcaataacaacacataaaaagaaaaccgagtacacagagacggtccacgggtcgacggaagcggaccccgtgtgtcaaccgaggcgagtggccaacaaacggactccactagacaccacacgggctgcacacgtagaaaccacgcggctaccgagcgggcacactaacacggtcaccacacgcacaagcgaacgactaccgacaccggtacacggcggcggcgatccttggacaaggcttgacgacgcggagccgaggacgaagacgaggacggggctgccgcggcttgcttgacggacgcggacgacggacgagaacggctcgacggagggacgaacgccacgacgaccgggaacgacgagaggacgacgacgacgacgacgaccgggaccggcgagtaggcgacaaggacagccggcagcggctgcacggagacgaggacggtgtggaacacgccgcagcgatgatgatgacggaggcggtgccgcgagacgacgagccgggcgaccgacgggacgtcgatccagcggctgagcggaggaggggacggcgtggaacgcgctgctgcgatgttggagaaggtggtggtgcagcggggcgacgagccgacgaggaggaatgggtggttggcgcggcggcggcgttccggcgaacttcgggcgaggaggaggtgatgctggggaaggagacgatgccacggtgtcgaaggaggagacagcggcgtcgatcggcgcaccggcgacgaacagcagccggctggagggagtgggtggcggcaatgccaccggttgccggcggggacgcgcctccggtggtctccgcgcgaaacggaggcgacgccggtggaggggaagtgtcacgcccagaaattcccgaatagaattccaagcagaatgtgtattaaaacccccgtccaggaccagccggggtacacaaacgacaatgttgacatacagatccacgtcttacaaacattataaaggtcttacagaaatgcagcggaaaacaaaagataaccggagctaatccttgacttgaactgcagcgggaacaccactccacaggcatcctcgacggcacggacaaagcctactcctcggagaacccgccatcggacacatactcgagctctgggattggggaaaatagagcaaggctgagtactacccactgtactcagcaagtcataccggaacgggggtatgatgcagggattccacaagggatagctaagcag

SEQ ID NO: 5337 - DNA, 1685 bp, Oryza sativa
  Clone ID: PAT_MRT4530_12134C.1
gtaacaacccctcccgagattacgagaaagggagcaatttactagagagcgacttcacatgggagatggaaatattttacatatgcatactgctaagctagcactaccagattattgagctaagacggcggcgagcaaattacagataggaacaagatgggagttcatcgcggccaaaaagacaatcttttgccacgttgagacaagccgcacacatgcacgtttttttatcacggcatcatgtgttcgatatcaacaactaattatactactagcgtctaagctacggtttgagcacggcgatcaccgtttgtccgtagcggcgaatcggccggtccgagtcaagcgccgccgtcaccgccgccgccgtccttggtgtcggcccttccgccgtccctcgtgtcgctcatggaccgcagcaatggcgactccgaccctttggaggcgttgaaggagcgcttgcagtgagcaatggcgctctggatgccgtcctgcagctgcagcagcgagtcgtcgcggcgctgcggctgctgcccggcggtggatggcggcggcggcagcgacggggacggcgcggcggccactgcggaggacgcggaccggctcttgccgaggcgcttgcacacctgcttcagcccggctggcacgctggcgcggggcgcgcgcacgccgcaggcgacgacgaccggctgcggcggcgctggggccaccgccgccgccgccgccgcggtaggaggctgggtgggcgccggggagggggaaggggaaggtgacggcgaggggtcgggctccaggtccgtctcctcgccctcgctggcgctggcgaagcggaggcgctcgccgtagcggcgggagaccttgacgtaaagcggtttgatcttgttcaggtacttgagcagcatctccttcgcgaaccgccgttcctcggcggtgatggccgccgcctcgggagtctgcagcgcctgcacagccggcctggctgcgccggcgccggcgccggcgtcggaggtgcgagagctgttgtcgcgcgtgaagagcgagacgaagggcgcgtcgtccactcggaacttgatcaagaaacggttcgtcttcggcgccggggagccgccgccgccgttacattccgccgggacagggaccttcggcttcctgagcttcagcagcagcacgcggaacttagtcgccggccggaggaacgacgccggcggtgccgccgcctccgagaccagctccaccaccttcgcctctccgcactcgccacccggcgccaccgccaccgcgtcgtccacggtcaccacctcgccgccggacgcgacatcccccgcgacagagaagttgaactcgaccctctcctcctccgcgtccgacgcggcactctcgtcgccgggcaccgcgaactccaggtcaaagaacgacgcgtcgtcatccacctcccctcctccacctccacccccacccccacctccgccgtcctcgcacgccgacgcggctatggtggtggccgccacggcgccgcccttgttgccggcaaccgcgccgccgcgcaagaacttgaggaaggtgaacgtctccatgccacacaacacaacacaacacaagacagcagctagccgcagtgagcttcactcgtttctagctcctactcctacctcctactgcctcagcactgagaaaaggactctttt

SEQ ID NO: 5338 - DNA, 291 bp, Oryza sativa
  Clone ID: PAT_MRT4530_12135C.1
atggcgacgtcctcgaccggtatcgtctggcacctgtcgttcgcgatcgttgtgatcgtggtggttgtggcggaccttgtcgcttcggaagtcatcttcgtcggctcacagttcatgtcggaacgacaaggtttggccgcatcagaatccttctcgagctcggatgtcgtcgatgctccgttctccgtcccggcgggcggattttttgacatggagtcgccttggtttgtagccactacgttctcgtttccggtcattggcggaccggttgagatcgacatcgtggcgtaa

SEQ ID NO: 5339 - DNA, 6033 bp, Oryza sativa
  Clone ID: PAT_MRT4530_12136C.1
atggcggccggatcttccgcggccgattccccctcatccggccgctctctccccctcccaaccctatataaacactccccgtgcctccctccaccgtttccgccactcgccgctctctctctccgccggaatcgagctcgcgccgtcgctctctctctccgccgtcaccgccgagctccggtccgccgccgtagtcgccccggaccttctcccgcttcggcgtcgccttctccgggttcgccgcaacctcgccgacctcgtccacccctccgtttcgcccgccaaccgccggaacgccgccgtccccgtcgacccgagccgcgccgccgccttcctccgctccggtcgccgttcccgtcgtcgctgtcgacccggggtgagccgtggaccgccgtttcgcttcccccttccctcatctctctcgggcgccgctccgccgcgctggtggtcgccggcggcgaccatcggggcgcgggtgcgccacctcccgtcggctgtgccggcgtggccgccttcgggcgcgccccgcggctgccatgtggggcccggtcgtcagccgcccgcgccctcgggtgcggctgacgcgtgggacccacggcgccggccggtgtgagccgggtgcacccggtccaccgtggacccacctcggccatataaggaccggtcttcgggcctccgttgcatagcactaccgtacttccacatgtctagtggggcaaatgaaggctacacgagctgcggcccagtagtcgagatgtcatggcacagggccggtgtcctgctgctaggggctcagtcctgcctgcctgtcccgggggttccggccgtaggtgggattgggtcgatgtacacctctgatcagagtataatttattcgaatagccgcgccctcggttatgggcaagccgagcaatgtacccaaatggccggcagcgtcagccgtcgtggtctggacatgactggtttcgtcttggagctgcggggcatgtgcgttgtcctggggtatccgcatggagtggactaccagggcaggccgcttccggagcaggagggtgacgatgcagagccccacgctgcttgggaggttactgcagtgatcctcactggctctcccgagcggacttcgctggcagtcaccgcgggtggagattctttctccgccgcttgccagagcgccgctctcctcgccatctgcactcttcaccagcgctacccggacgagttgcagcactcgccctaccgctaccaccctcgccgcggaggagcccgcgactacgccaccttccgggatgctagctcggaggatgacgctaccatcatgcacctggcgcgcatggtggaggcgtacgacgcggctcgtatcgacttccatcagatggtgcgccgtgggatggtcgagaacaatctgaagatcctggagctgcgtcaagagaacctgcagctcaagaaagacctagacgcagtggaggcgcagctgcatcagctcaagatcgcccagggagaggtctgccgccccaagcgtcgccgcgtctgccgcagccagaagatcaccgcccgcaagagcacctccaggcccgagcttgttcgtcagtccctggcatggacttgcttcgtcgagaaccctcgtgccgagcccgcgcccgtggttccccaggagggggaagcctccggcgttggcagcacggaagatgcgctgttgctcaccttccatggtgatgaccaggagaagtgctagtaccggtgatggcaaccaacctgaaggcagcaaccacaaccaccagggcagcccacctccacctcctcctccgcctccaccaccaccaccagataccaacgccattctcacccaaatcctcgcccagcaggccaacatgatgattgctttcctccaccacctccaaaatccgccacaacataatgctccaccaccacccccacaacactctaaactcgccgagttcctccgcatccgtccacccaccttctttagctccaacaaccccgtggatgcgttggattggttgcatgccgtggggaaaaagctagacactgtgcagtgcagcgatgaggagaaagtcatcttcgccgcccaccagctgcaggggcccgcatctctatggtgggaccatttccaggctacgcagccagaggggcagcctattacttgggctcgcttcactgccgctttccggagaacccatgtgcccgccggagtcgtggcccttaagaaaagggaattccgagagttgaagcaaggcaaccgctccgtgatggagtatttgcatgagttcaacaacctggcccgttacgccccggaggatgtgcggagatgaggagaagcaagagaagttcttggcaggaatggaccctgagctgtccgtccgtctagtttccggggactatccggatttccaacgtctggtggacaagagcatccgcttggaagccaagcacaaggaactggagtcgcacaagcgccgcttggcgaatttccgcaatcaacagggtgctaaccaaagggtccgctacaccaatccctatccagggggatcgtcctcgcagcagcaacctcgctccgcgccccgacctcaattcgtggtgcgcgtcccacagccgcagcaacagcagagtcagcaagggactcgtgcgccccgtcctcctacaccaactgtgcagcctggtcaaggccgcagggacgctcaaggtccgcagcgtctgtgcttcaactgcttcgagcctgggcactttgcggataaatgcccgaagccgaggcgccagcaaggccaagcgcctccccgctccaacaacggtggtaaggatgtcattcggggtcgtgtgaaccacgtgacggccgaggacgtgctgacaactccagacgtcatcgttggtacgttcctcattcattccatccctgctaccattttgttcgactctggagcatcccactcgttcatatctgtgccattcgtggggagaaatcagttgggggtagaaaggcttaggaaccctctgctcatcaccacccctggaggggttatgacagcaaagtattatagtcctgccgtccctatagaaattcaggggattccttttccctcggatctgattcttctagacaccaagaacttggatgtgatccttgggatgaattggttggctcaattccaaggagtagtggattgcgcgagacgcactgttactctgtaccgagggccggaacaaccggttgttttctttgcacccccaacctctgtcagaagttcagaacttcatcagatagtactgtcagaaatccccatcgtcagggagttcggagatgtgtttccggaagaactacccggtatgccgcccaagcgagagattgagttccggatagatcttgctccaggaaccactcctctgtacaagcgaccctaccgtatggcagcaaatgaactggccgaatttaagaaacagttggaagagttaaaagaaaaggggtatatacgtccgagtacttccccctggggtgctcctgtgatttttgtggagaagaaagacaagacgaagaggatgtgcgttgactacagagctctcaatgaagtcaccatcaaaaacaagtaccctcttccccggatcgatgatctgttcgattagcttaaaagtgccacggtattctccaagatcgatcttcgttccggaaatcaccagttgcgcattagggaagaagatattccgaagaccgcattcaccacgcgatacggactgtatgaattcacggtgatgtcattcggtctaaccaatgctcctgccttcttcatgaacttaatgaacaaagtgttcatggaatacttggataagtttgttgtggtgttcattgatgacattctgatatactcacaatcagaggaagaccatcagcaccatctccgtctggtgttgggaaagttgcgggaacatcaattgtatgccaaacttagcaagtgtgagttctggttgtccgaagtcaaattcttagggcacgtgatatctgctaaaggagttgctatggaccccgaaacagtgaccgccgtcactgattggaagcaacccaagacagtcactcaagtccgcagtttcttaggtttggcgggatactaccggaggttcatcgagaacttctccaaaatcgctcgacccatgacacagttgttgaagaaagaagagaaatttgtgtggagcccgcaatgcgagaaggcgtttcaaactctcaaagaaaagctggtttcctcgctagtgttagtcttgccagatactcgcaaggatttcatggtgtattgtgacgcttcgcgccaaggattggggtgcgtgctcatgcaggacggtcatgtggtggcctatgcctcacgccagctacggcctcatgaaggcaactaccctacccatgatttggagttagccgcggtggttcatgctctaaaaatctggcggcactatctcattgggaatcgctgtgaaatatatactgatcataagagtttgaaatacatcttcacccagtcggatctgaatcttcggcaaaggagatggttagaactcatcaaggattatgatgtgggaattcactatcatcctggtaaggccaacgtggtcgccgacgctctaagtcgaaagagccattgcaacactcttaacgtccgtggcattccacccgaacttaaccaacagatggaagccctgaatctgagcatagtgggtcgtggattcttggctacgctggaagccaagcccaccttgctcgatcaaatccgcgaggctcagaagaacgacccggacatgcgtggactcctcaaaaatatgaaacagggtaaagccgcgggtttcacagaggatgaacacggagccctatggaacggaaatcggcgtgtcaaggcagagcaccaacgaccggccggacttctccaacctctccaagtaccagaatggaaatgggatgaaattgggatggacttcatcaccggacttccaaaaacccaaggtggatatgattctatatgggtagttgtggaccggttaaccaaggtagctcgatttattcctgtgaagaccacctatggagggaacaaactagccgagctctacttcgctaggatcgtgagtctccatggcgttcccaagaaaatcgtatctgataggggaagccaattcacctctcacttttggaagaagctccaagaagagctgggtacccgattaaatttcagcaccgcgtatcacccgcagacagatggacagaccgagcgtctaaatcagatcctagaagatatgcttcgcgcatgtgtcctagatttcgggaagacctgggataagagtctcccctatgccgagttctcctacaataacagctaccaagccagcatacaaatggcaccttatgaagcgttgtatgggcgcaaatgccggacaccgctcttgtgggaccaagttggggaaagtcaagtgttcgggactgatatcctgagagaagctgaagcgaaggtcagaaccattcgggataatttaaaggtggcacagccacggcagaaaagttatgcagataaccgtcgccgtaacctggaattcgcggtggacgattttgtgtaccttcgaatcacgccattgcggggtgtacacaggtttcggacaaaagggaagctcgcacctcggttcgtgggtcctttccgtatcattgctcggcgcggagaagtcgcttaccagttggagctgcccgcctccttgggcaacgtgcatgatgtgttccatgtgtcgcaactcaagaaatgtctccgagtgccatccgagcaggccgactcagagcaaattgaagttcgcgaagacttgacctacgtggagaggccagtgaaaatcctggacaccatggagcgcaggaccaggaaccgggtaatccgtttttgcaaggtccagtggagcaaccacgccgaagaagaagctacctgggagcgtgaagacgagctgaaggcagcccatcccgatctcttcgccagttcttccgaatctcggggtcgagattccgtt

SEQ ID NO: 5340 - DNA, 8512 bp, Oryza sativa
  Clone ID: PAT_MRT4530_12137C.1
ctagaatctctcaacgacgtcagcagctattttatcagcagctatttgtgcatcattgatgaggtcaagagcagcctctttgcttgtcccgtctgcaaagccatcaatggcattaatatcaatcttcgggtacaaggacttggtcatcgccaacgccaggcttgctcccatgcttccagcttccttgatattcttaaaatatgtatccggagcaattctcagcttgtcgaagatctcggcaatgtcaaatgaactcggaccattgttattgaagaacatggcttggacgagtggtgtagcggcgttggcgacttcatctctagctccttcaagcctcttgattttgttgaccaagacgtcgaattgagcattcacatcagcaagagggcatgaagataagagtgattttttgaagttccagctgcaagtaccttcgacatctttcaaggccgagtccctctgctttgtcaattcatccttatccttttccagagccttgatccgcttttccagatcggatatctttgcggcttgcacttttgatgagccgcttatcgagaaattggagtcttgaagcttggtgatacggtctctcagatcatgctcagtcttcctggcaagctccttggcttcgtgcagctggtctctggtggcttcaagggttccaaggtgtggaactaacttctcgagggttgctgtcttcgcttcattcctaagatggattctatttacaagacgagtagcttggcccagtgtctttttcagtagacatacttcctcatcttccctctgcttatttattacaattccttgtggccgcatttcatcatccctccacttgactaatattggtgggcgggaatcttcagccgattgtacccggaggacctcttcttcatcaccaatcattggccctgtgataatttccggtctgggacgagcaggtccttgcaccctaacaggagaactagttccagagtcagcaccagtgtccgtcttgggagggctgttagtttgagcttctacttccgggatgtcattattttgttgagagtcagactggttagtcgactttgaagtgtcaggttgatcaatagaccggattttcggccctccactggcttggcttgtcttccaacggggtgagcggcgttgagcaatcggagggtcagatttcatcaaagcaaattccggtgggggaggattgaaggcgttgtatggtatgactggcaacgtgtgtgaatagatcctctcctgcataattttgaactcaagagattctgggttctctcggttggggtcatgcttgccgtcaaattcaaaggctgttctagatctttccttgattggtgccaacaaggtcttgatgaagtgccgagtgatttgttccccttgtagaccctgttcgttcagcttcagcatgcgatcaaacaagtcgagcgcttgggcggcttcttctcccatcggcagtgagttccaggtatcgcgatagactgggggaagacaggagtatccgggaagcgctggcttggggttttgcacatagaaccagttcgcgtgccaacctttgttcgaggttttgaatggcatggagaagtatttttggctcaaggtccccctcagttgaaatccggctcccccaactacgcatggtttgcttttgtttgcctggggcttgaggaagaagatgcagcggaataaagcgaaatgtggcctaatccccagaaaagcttcgcaagcatggatgaaattggcgatatggactatggaattggggtttaggtggtgtaggctgattccatagaaatccaaaattcctctgaagaaacttgaggtcggaagagaaaatccgccgtagaagaaatgagaaaataccacgaccacatgtgtgtcaggagttgggaatgcttcgccgtatgctggacgccacccaatgatctcctttgccggaagaacaccgtgcgccaccatctccttcaggttctcctccgttacatcggagggcgcccactgactctcaaagctctctctctctctctcttccgccatggatgcgatctgaatgatgcgatttgctttggaaatggctgagaatggatggggaatcggagcggtggatgcggggagaaatttcgtgaagtttttgagggtggattggagcggattgatgaaccctaccgcctgtgccgcctcgaccgtgcgccggccggccgcgccgtcgcctcctccaacgtcgccgccacctcctccaccccggcctgccctccgtttcgcgcggtgaccgccggaggcgcgttcccgccgtcgcccttctctttcctccgcgccggccgcctccagccgcctctccctcctcgccggagcgccgtccggccgcgccgtcttctccctcggcctcgcagccacctcctctccctcggtcagccctccgtttcgcggggaaagcaccggagacgcgtcctcgccggcaaaacagtggcgttgccgccactgttccacctccggccgccactgtcgcgtttcccgtgcgccggccgacgtcgccaccacctccctcggctccgcgacgccgccctcatccccggcatcacctcctcctcgcccgaagctcgccggagtggcctcctcgtcggcgtccagtacctccccgcctccggccggctccttgttcaccctaggataaacaaaaccccaactagtgggtattctattcatggttccactctcttcctctttcaaaacccctaaaacctgttttcggtggggtttgggtgcatgccagttgtgggaagtagcaccccggccactataaggattaagctcgggcctctgttgcgaagcactaccgtacttccacatgtctagtgggtaaggcttagtttgtggctcagtctggttataaacaaaagtacacggatggagatggacgaagtcgggggtcgatggacatctctaggacaaatgaaggctacacgagctgcggcccggtagtcgagatgtcatggcacagggccggtgtcctgctgctaggggcttagttctgcctacctgtcccgggggttccggccgtaggtggagttgggtcgatgtacacctctgatcagagtataatctattcgaatagccgcgcccccggttatgggcaagccgagcaatgtacccaaatggccagcagcatcaaccgtcgtggtctggacctgactggcttcgttttggagctgcggggcatgtgcgttgtcctggggtatccgcatggagtggactaccaaggcaagcagctcctggagcaggagggtgacgatgcagagccccacgctgcttgggaggttactgcagtgatcctcactggctcacccgagaggacttcgttggcagtcaccgcgggtggagattccttctccgttgcttgccagaacgccgcactcctcgccatcggcactcttcaccagcgctacccggacgagttgcagcactcgccctaccgctaccaccctcgtcgcggaggagcccgtgactacgccaccttccgggatgctagcttggaggatgacgctaccatcgtgcacctggcgcgcatggtggaggcgtacgacgcggcccgtatcgacttccatcagatggtgcgtcgcgggttggtcgagaacaacatgaagatcctggagctgcgtcaggagaatctgcagctaaagatggacctagacacagtggatgcgcagctgcgtcagctcaagatcgcccagggagaggtctgtcgccccaagcgtcgccgcgtctgccgcagcctgaagatcaccgcccgcaagagtacctccaggcccgagcttgttcgtcagtccctggcgtggacctgcttcgtcgagacccctcgtgccgagtccgcccccgtggttcctcaggaggagggagcctccggcgttggcagcacggaggatgcgctgctgctcaccttccgtcctggctcgttgcagctgtagacgagcagttagtaggcttgcgtatggtgacaaccaggagaagtgctgctaccggtgaatgcagtcaccccgaaggcagcaaccacaacaaccatggcagcccacctccacctccttctccgcctccaccaccaccaccagacaccaacgccattctcacccaaatcctcgcctagcaggccaacatgatggctgctttcctccaccacatccaaaatccgccacaacataatgctccaccaccgcccccacaacactctaaactcgccgagttcctccgcatccgtccgcctaccttctctagctccaataaccccgtggatgcgttggattggttgcatgccgtggggaaaaagttagacaccgtgcagtgcagcgacgaggagaaagtcatcttcggcgcccaccaactgcaggggccagcatctctatggtgggaccatttccaggctacgcagccagaggggcagcctattacttgggcccgcttcaccgccgctttccggagaacccatgtgcctgccggagtcatggcccttaagaaaagggaattccgagagttgaagcaaggcaaccgctccgtgatggagtatttgcatgagtttaacaacctggcccggtacgccccggaggatgtacgggaagatgaggagaagcaagagaagttcttggcaggaatggaccctgagctgtccgtgcgtctggtctccggggactatccggatttccagcgtttggttgacaagagcatccgcttggaagccaagcacaaggaactggagtcgcacaagcgtcgcctggcgaatttccgcaatcaacagggggctaaccaaagggtccgctacaccaatccctatccagggtgatcgtcctcgcagcagcaacagcagcagcaacctcgctccgtgccccgacctcaattcgtggtgcgcgtcccacagccgcagcaacagcagagtcagcaagggactcgtgcgccccgtcctcctacgctagccgtgcagcctggtcaagtccgcagggacgttcaaggtcagcagcgtctgtgcttcaactgcttcgagcctgggcactttgcggataaatgcccaaagccgcggcgccagcaaggccaagcgcctccccgctccaacaacggtggtaaggatgtcattcggggtcgggtgaaccacgtgactgccgaggatgtgctgacgactccagacgtcatcgtgggtacgttcctcattcattccatccctgctaccattttgttcgactctggagcttcccactcgtttatatctatgccattcgtggggagaaatcagttgggggtagaaaggcttaggaaccctctgctcatcaccacccctggaggggttatgacagcaaagtaatatagccctgccgttcctatagaaattcagggaattccttttccctcggatctgattcttctagacaccaagaacttggatgtgatccttgggatgaattggttggctcaattccaaggagtagtggattgtgcaagacgcactgtcactctgtaccgagggccggaacaaccggttgttttctttgcacccccaacctctgtcggtagttcagaacttcatcagataggaatgtcagaaatccccatcgtcagagagttcggagacatgtttccggaagaactaccaggtatgccgccgaaacgagagattgagttccggatagatcttgctccaggaaccactccccagtacaagcgaccctaccgtatggcgtcaaatgaactggccgaagtcaagaaacagttgggagagttgaaagaaaaggggtatatacggccgagtacttccccctggggtgctcctgtgatttttgtggagaagaaagacatgacgaagaggatgtgcgttgacaacagagctctcaatgaagttactatcaaaaacaagtacccacttccccggatcgatgatctgttcgatcagcttaaaggtgccactgtattctccaagattgatcttcgttccggatatcaccaattgcgtattcgtgaagaagatatcccgaagaccgcattcaccacgcgatacggactgtatgaattcacggtgatgtcattcggtttaaccaatgctcctgccttcttcatgaacttaatgaacaaagtgttcatggaatacttggataagtttgttgtggttttcattgacgacattctggtgtactcacaatcagaggaagaccatcagcagcatctccgtctggtgttgggaaagttgcgggaacaccaattgtatgccaagctcagcaagtgtgagttctggttgtccgaagtcaagttcttagggcacatgatatctgctaaaggagttgctgtggatcccgaaacggtgaccgccgtcactgattggaagcaacccaagacagtcactcaggttcgcagctttttgggtttggcagaatactaccgaagattcatcaagaacttctccaaaatcgctcgacccatgacacagttgctgaagaaagaagaaaaatttgtgtggagcccgcaatgcgagaaggcattccaaactctcaaggaaaagctggtttcctcgccagtgttaatcttaccggatactcgcaaggacttcctggtgtactgtgacgcttcgcgccaaggattggggtgtgtgctcatgcaggaaggccacatggtagcctatgcctcccagcagcttcggccccatgaaggcaactaccctacccatgatttggagttggccgctgtggttcatgctctaaagatctggcgacactatctcattgggaatcgctgtgaaatatatactgatcataagagtttgaaatacatcttcactcagtcggatctgaatcttcggcagaggagatggttagaactcatcaaggattaggatgtgggaattcactatcatcctggtaagacaaacgtggtcgccgacgctctaagtcgaaaaagccgttgcaacactcttggcgtccgtggcattccaccaaaacttcatcaacagatggaagccctgaacctaagcatagttggtcgtggattcttggctacgctggaagccaagcctaccttgctcgatcaaatccgcgaggctcagaagaatgatccagatatgcatgggatcctcaagaatatgaaacagggtaaagccgctggtttcacagaggatgaacacggaaccctatggaacggaaatcgggtatgcgttccagacgacagggaacttaaacagttgatacttcaggaagctcacgaaagtccctattccatccatcctggcagcacgaagatgtacttggacttgaaagaaaaatattggtgggttagtatgaagcgggaaattgcagagttcgtggccctttatgatgtgtgccagcgtgtcaaggcagagcaccaacgaccggccggacttctccaacctctccaagtactagaatggaaatgggatgaaattgggatggatttcatcaccggacttccaaaaacccagggcggttatgattctatatgggtagtcgtggaccgactaaccaaggtagctcggttcattcccgtgaagaccacctatggagggaacaaactagctgaactttacttcgctaggatcgtgagtctccatggcgttcctaagaaaattgtatctgataggggaagccaattcacctctcacttctggaagaagctccaagaagagttgggtacccgattaaatttcagcaccgcgtatcacccgcagacagatggacagaccgagtgtctaaatcagatcctagaagatatgctccgtgcctgtattctagattttgggaagacctgggataagagtctcccctatgccgagttctcctacaataacagctaccaagccagcatacaaatggcaccctatgaagcgttgtatggccgcaaatgccggacaccgctattgtaggaccaagttggggaaagccaagtgttcgggactgatatcctgagagaagctgaagcgaaggtcagaaccattcgggataatctaaaggtggcacagtcccgacaggagagctatgcagataaccgacgccgtaacctggaatttgcagtggatgactttgtgtaccttagggtcacaccattgcggggtgtacacaggttccagacgaaagggaagctcgcatctcggtttgtgggtcctttccgtatcattgctcgacgcggagaagtcgcttaccagttggagctgcccgcctccttgggcaacgtgcatgatgtgttccatgtgtcgcaactcaagaaatgtcttcgagtgctatccgagcaggccgattcagagcaaattgaagttcgcgaaaacttgacctacatggagaggccagtgaaaatcctggacaccatggagcgcaggaccaggaaccgggtaatccgtttttgcaaggtccaatggagcaaccacgccgaggaagaagctacttgggagcgtgaaaacgagttgaaggcagcccatcccgatctcttcgccagttcttccgaatctcggggtcgagattccgtt

SEQ ID NO: 5341 - DNA, 5595 bp, Oryza sativa
  Clone ID: PAT_MRT4530_12138C.1
atggatgaagtcgggggtcgatggacattctccagggcaaatgaaggctacacgagctgcggcccgatggccggcagcgtcacccgtcgtggtttggacatgactggcttcgtcctggagctgcggggcatgtgcgtggtcttggggtatccacatggagtggattaccaggccaggccgctcccggagcaggagggtgaggatgcagagcctcacgctgggtgggaggtcactgcagtgatcctctctggctctcccgagcggacttcgctggcagtcaccgcgggtggggattcttctcccgccgcttgccagaacgccgctctcctcgccatcggcaccctccaccagcgctacccggacgagttgcagcactcgccctatcgctaccaccctcgtcgcggaggagcccgcgacttcgccaccttccgagatgctagcttggaggatgacgctaccgtcgtgcatctggcacgcatggtggaggcatacgacgcggctcgtatcgacttccatcagatggtgcgtcgcgggatggttgagaacaacctgaagatcctggagctgcgtcaggagaacctgcagctcaagaaggacctcgacgcattggaggcgcagctgcaccagctcaagatcgcccagggagaggacagccgccccaagcgtcgccgcgtctgccgcagccagaagatcaccgcccggaagagcacctccaggcccgagcttgttcgtcagtccctggcgtggacttgcttcgtcgagacccctcgtgccgagcctgcgcccgtggttccccaggagggggaagcctccggcgttggtagcacggaggatgcgctgttgctcaccttccgccctggcccgtcgcagcggagaaatgttagcaccggtgaaggcaaccaacccgaaggcagcaaccccaacccccaaggcaatccacctccaccaccaccaccagacaccaacgccattctcacccaaatcctcgcccagcaagccaacatgatgaccgctttcctccaccacctccaaaatccgccacaacagaatgctccaccaccacctccacaacactctaagctcgccgagttcctccgcatccgcccacccaccttctctagctccaacaatcccgtggatgcgttggattggttgcatgccgtggggaagaagctggacactgtgcagtgcagtgatgaagagaaagtcatcttcgccgcccatcagctgcaggggcccgcatctctatggtgggaccatttccaggctacgcagccagaggggcaaccgattacttgggcccgcttcaccgccgctttccggagaacccatgtgcccgccggagtcgtggctcttaagaagagggagttccgggagttgaagcaaggcaaccgctccgtgatggagtatttgcacgagttcaacagtctggcccggtacgctccggaggatgtgcgggaagatgaggagaagcaagagaagttcttggcgggaatggaccctgagctgtccgttcgcctagtctctggggactatccggacttccaacgtctggtggacaagagcatccgcttggaggccaagcacaaggagctggagacgcacaagcgccgcttggcgaacttccgcaatcagcagggcgctaaccagagggtccgctacaccaatccctatccagggggatcctcctcgcagcagcaacaacagcagcagcaacctcgctccgcgcctcgacctcaattcgtggtgcgcgtcccacagccgcagcagcagcagagtcagcaagggactcgtgtagcccgtcctcctacgccagttgtgcagcccgttcaaggccgcagggacgctcaaggtcagcagcgtttgtgcttcaactgcttcgagcccgggcactttgcggataaatgcccaaagccaaggcgtcagcaaggccaagcgcctccccgctccaacaacggtggcaaggacgtcattcggggtcgtgtgaaccacgtgacggccgaggacgtgctgacaactccagacgtcatcgttggtacgttcctcgttcattccatcccagctactattttgttcgactctggagcttcccactcgtttatatctgtgccattcgtggggaaaaatcagttgggggtagaaaggcttaggaaccctctactcatcaccacccctggaggggttatgacagcaaagtactatagccctgccgttcctatagaaattcaagggattccttttccctcggatctgattctgctagacaccaagaatttggatgtgattcttgggatgaattggttggctcaattccagggagtagtggattgcgcgagacgcactgtcactctgtaccgaggaccggaacaaccggttgttttctttgcacccccaacctctgtcagaagttcaaaactgcatcaaatagaactatcagaaatccccattgtcagagagttcggagatgtgtttccggaagaactacctggtatgccgcctaagcgagagattgagttccggatagatcttgctcctggaaccactcctctgcacaagcgaccctaccgtatggcagcaaatgaactggccgaagttaagaaacagttggaagagttgaaagaaaaggggtacatacgtccgagtacttccccttggggtgctcctgtgatctttgtggagaagaaagacaagacgaagaggatgtgcgttgactaccgagctctcaatgaggtcaccatcaaaaacaagtaccctcttccccggatcgatgatctgttcgaccagcttaaaggtgccactgtattctccaagattgaccttcgttccggatatcaccaattacgtattcgtgaagaagatattccgaagaccgcattcaccacgcgatatgggctgtatgaattcacggtgatgtcgttcggtctaaccaatgcacctgcattcttcatgaacttgatgaacaaagtgttcatggaatacttggacaagtttgttgtggttttcattgatgacatcctgatatactcacagtcagaagaagaccatcagcaccatctccgtctggtgttgggaaagctgcgggaacatcaattatatgccaagcttagcaagtgtgagttctggttgtccgaagtaaaattcttggggcacgtgatatctgctaaaggagttgccgtggaccccgaaacagtgaccgccgtcactgaatggaagcaacccaagacagtcactcaaattcgcagtttcctgggtttggcaggatattaccggagattcatcgagaacttctccaaaatcgctcgacccatgacacagttgttgaagaaagaagagaaatttgtgtggagcccgcaatgcgagaaggcattccaaactctcaaagaaaagctggtctcctcgccagtgttaatcctgccagatactcgcaaggatttcatggtgtactgtgatgcttcgcgccaaggattggggtgcgtactcatgcaggacggtcatgtggtagcctatgcctcacgccagctacgacctcatgaaggcaactaccctacacatgacttggaattagcagcggtggttcatgctctaaaaatctggcggcactatctcattgggaatcgctgtgaaatatatacagatcataagagtctgaaatacatcttcacccagtcggatctgaaccttcggcaaaggagatggttagaactcatcaaggattacgatgtgggaattcactatcatcctggtaaggccaacgtggtcgccgacgctctaagtcgaaaaagccattgcaacactctcaacgtccgtggcattccacccgagcttaaccaacagatggaagccctgaacctaagcatagttggtcgtgggttcttggccgcgttggaagccaagcctaccttgctcgaccaaatccgcgaggctcagaagaatgatccggacatgcatggactcctcaagaatatgagacagggtaaagccgctggtttcacggaggatgaacacggaaccctatggaacggaaagcgggtatgcgttccagatagcagagaacttaaacagttgatacttcaggaagctcacgaaagtccttattccattcacccgggcagtacgaagatgtacctagacttgaaggagaaatactggtgggttagcatgaagcgggaaattgcagagttcgtggctctatgtgatgtgtgccagcgtgtcaaggcagaacaccaacgaccggccggacttctccaacctctccaagtaccagaatggaaatgggatgaaattgggatggatttcatcaccggacttccaaaaacccaaggtggatatgattctatatgggtaattgtggatcgactaacaaaggtagctcgatttattcctgtgaagaccacctatggagggaacaaactagcggaactctacttcgctaggatcgtgagtctccatggtatccccaagaaaatcgtatctgataggggaagccaattcacctctcacttttggaagaagctccaagaagagctgggtacccgtttaaatttcagcaccgcctatcacccgcagacagatggacagaccgagcgtctaaatcagatcctagaagatatgcttcgcgcgtgtgtcctagattttgggaagacttgggataagagtctcccctatgccgagttctcctacaacaacagctatcaagccagcatacaaatggcaccttatgaagcgttgtacgggcgcaaatgccggacaccgctattgtgggaccaagtcggagaaagccaagtgttcggaactgatatcctgagggaagctgaagctaaagtcagaatcattcgggataatctaaaggtggcacagtcccggcagaaaagttatgcagataaccgacgccgtgacctggaattcgcagtggacgattttgtgtaccttcgggtcacgccattgcgaggggtacacaggtttcagacaaaagggaagctcgcacctcggtatgtgggtcccttccgtatcatcgctcgacgcggagaagtcgcttatcagctagagttgcccgcctccttgggtaacgtgcacgatgtgttccatgtgtcgcaactcaagagatgtcttcgagtgccatccgagcaggccgactcagagcaaattgaagttcgcgaagatttgacctacgtggagaggccagtgaaaatcctggacaccagggagcgcaggaccaggaaccgggtaatccgtttttgcaaggtccagtggagcaaccatgccgaagaagaagctacttgggagcgtgaagacgagctgaaggcagcccatcccgacctcttcgccagttcttccgaatctcggggtcgagattccgtttaaggggggtaggtttgtcgcgtcccaaaacgacccgctcgctctcgccgtcggattcgtgctcgcgccgtgctccgccctctccgccatcgccgccgagttccgttccgccgccgtcgccactccgggcttcctcccggctcggcgccacctccctcggcatcgccgcatccccgtcgaccccgtccgccgctccgcttcgcccgccgaccgtcggagcgtcgtcgtcatcgtcat

SEQ ID NO: 5342 - DNA, 179 bp, Oryza sativa
  unsure (1)..(179): unsure at all n locations
  Clone ID: PAT_MRT4530_12139C.1
cccgcgtccgggacgcngtgcgggagggagcggtgatagggcgctccacgcctacagcgcagttaggggctagccggtgttccggcgggcggcgatagcgccgggtcgaccgagagtcgggcgtctgccaccccgggtgcacgcaggggctcctaggctggctgaggctcgggtgctcg

SEQ ID NO: 5343 - DNA, 614 bp, Oryza sativa
  Clone ID: PAT_MRT4530_1213C.1
ggagagactagtctcgagtttttttttttttttttttggttgccgaagatacctcggatcatgaataatgagttttctggttcaaaaaaaaaaaaggattcatcacctagcctgcaaatcaagttaatacacacaatgaaagatcattcgtctacacatcccattcaattcttctacacgtaagcagcgtaaattgtactgtctacaggtcagtttccctagctcgttccgttccctacagagctaatgccatgtactttcaggctttcagttcttcagtcatcatcgtccgccggatcatcttcatcgtcagggagctctatgtcgtcactatcaagtgcttgtcctgtctgggagcttgactcatttctactaaccccataagaatttgatgagtccagaagatacgggagatttagaagctgcagaaaagactcagtttgtggattcctacaatgaactgttatggagggattggatgcttgacaagaaggatcataagatgcagcagtctggacaaaatcaataggtttagcccctctggcatttaacttgttcctaacccattgcaagtcatcttgagtgtcaacctgttcatccagcattgtaaatgg

SEQ ID NO: 5344 - DNA, 5193 bp, Oryza sativa
  Clone ID: PAT_MRT4530_12140C.1
atgtcatggcacagggccggtgtcctgctgctaggggctcagtcctgcctgcctgtcccgggggttccggccatggccggcagcgtcacccgtcgtggtttggacatgactggcttcgtcttggagctgcggggcatgtgcgtggccaggccgcttccggagcaggagggtgacgacgcggagccccacgctggttgggaggtcactgcagtgatcctctctggctctcccgagcggacttcgctggcagtcaccgcgggtggagattccttccccgccgcttgccagaacgccgctctcctcgccatcggcactcttcaccagcgctacccggacgagttgcagcactcgccctaccgctaccacccccgccgcggaggagcccgcgactacgccaccttccgggatgctagctcggaggatgacgctaccatcgtgcacctggcgcgcatggttgaggcgtacgacgcggctcgtatcgacttccaccagatggtgcgtcgtgggatggtcgagaacaacatgaagatcctggagctgcgtcaggagaacctgcagctcaagaaggacctagacgcggtggaggcgcagctgcatcagctcaagatcgcccagggagaggtctgccgccccaagcgtcgccgcgtctgccgcagccagaagatcaccgcccgcaagagcacctccaggcccgagcttgttcgtcagtccctggcgtggacttgcttcgtcgagacccctcgtgccgagcccgcgcccgtggttccccaggagggggaagcctccggcgttggtagcacggaggatgcgctgttgctcaccttccgttctggcccgtcgcagcggagaaatgctgccaccggtgatggcaaccaacctgaaggcagcaaccacaaccaccagggcaacccacctccacctcctcctccgcctccaccaccaccaccagacaccaacgccattctcacccaaatcctcgcccagcaagccaacatgatgactgctttcctccaccacctccaaaatccgccacaacataatgccccaccaccacccccacaacactctaaactcgccgagttcctccgcatccgcccacctaccttctctagctccaacaaccccgtggatgcgttggattggttgcatgccgtggggaaaaagctagacacggtgcagtgcagcgatgaggagaaagtcatcttcgccgcccaccagctgcaggggcccgcatctctctggtgggaccattgccaggctacgcagccagaggggcaacctattacttgggcccgcttcaccgccgctttccggagaacccatgtgcccgccggagtcgtggcccttaagaaaagggaattccgagagttgaagcaaggcaaccgctccgtgatggagtatttgcatgagttcaacaatctggcccgttacgccccggaggatgtgcgggaagatgaggagaagcaagagaagttcttggcaggaatggaccccgagctgtccgtccgtctagtctctggggactatccggattttcaacgtctggtggacaagagcatccgtttggaagccaagcacaaggaactggagtcgcacaagcgccgcttggcgaatttccgcaatcaacagggtgctaaccaaagggtccgctacaccaatccctatcccggggaatcctcctcgcagcagcaacaacagcagcagcaacctcgctccgcgcctcgacctcaattcgtggtgcgcgtcccacagccgcagcaacagcagagtcagcaagggactcgtgcgccccgtcctcctacgccaactgtgcagcctggtcaaggccgcagggacgctcaaggtcagcagcgtctgtgcttcaactgcttcgagcccgggcactttgcggataaatgatcgaagccaaggcgtcagcaaggccaagcgcctccccgctccaacaacggtggtaaggatgtcattcggggtcgtgtgaatcacgtgacggccgaggacgtgctgacaactccagacgtcatcgttggtacgttcctcatacattccatccctgctaccattttgttcgactctggagcttcccactcgtttatatctgtgccattcgtggggagaaatcagttgggggtagaaaggcttaggaaccctctgctcatcaccacccctggaggggttctgacagcaaagtattatagccctgccgtccctatagaaattcaggggattccttttccctcggatctgattctgctagacaccaagaatttggatgtgattcttgggatgaattggttggctcaattccaaggagtagtggattgcgcgagacgcactgtcactctgtaccgagggccggaacaaccggttgttttctttgcacccccaacctctgtcagtagttcagaactgcatcaggtaggactgtcagaaatccccatcgtcagggagttcggagatgtgtttccggaagaactacccggtatgccgcccaagcgagagactgagttccggatagatcttgctccaggaaccactcctctgcacaagcgaccctaccgtatggcagcaaatgaactggccgaagttaagaaacagttggaagagttgaaagaaaaggggtatatacgtccgagtacttccccctgggatgctccggtgatttttgtggagaagaaggacaagacgaagaggatgtgcgttgactacagagctctcaatgaagtcaccatcaaaaacaagtaccctcttccccggatcgatgatctgttcgatcagcttaaaggtgccactgtattctccaagattgatcttcgttccggatatcaccaattacgtattcgtgaagaagatattcctaagaccgcattcaccacgcgatacggactgtatgaattcacggtgatgtcattcggtttaaccaatgctcctgccttcttcatgaacttaatgaacaaagtgttcatggaatacttggataagtttgtcgtggttttcattgatgacattctgatatactcacaatcagaggaagaccatcagcaccatcttcgtctggtgttgggaaagttgcgggaacatcaattgtatgccaaacttagcaagtgtgagttctggttgtccgaagtcaaattcttagggcacgtgatatctgctaaaggagttgccgtggaccccgaaacagtgaccgccgtcactgattggaagcaacccaagacagtcactcaaattcgcagtttcttaggtttggcaggatattaccggaggttcatcgagaacttctccaaaatcgctcgacccatgacacagttgttgaagaaagaagagaaatttgtgtggagcccgcaatgcgagaaggcgttccaaactctcaaagaaaagctggtttcctcgccagtgttaatcttgccggatactcgcaaggacttcatggtgtattgtgatgcttcgcgccaaggattggggtgcgtgctcatgcaggacggtcatgtggtggcctatgcctcacgccagctacggcctcatgaaggcaactaccctacccatgatttggagttagccgcggtggttcatgctctaaaaatctggcggcactatctcattgggaatcgctgtgaaatatataccgatcataagagtttgaaatacatcttcacccagtcggatctgaatcttcggcagcggagatggttagaactcatcaaggattatgatgtgggaattcactatcatcccggtaaggccaacgtggttgccgacgctctaagtcggaagagctattgcaatactcttaacgtccgtggcattccacccgaacttaatcaacagatggaagccctgaacctaagcatagttggtcgcggattcttggctgcgttagaagccaagcctaccttgctcgatcaaatccgcgaggctcagaagaatgatccggacatgcatggactcctcaagaatatgaaacagggtaaagccgcaggtttcacagaggatgaacacggaaccttatggaacggaaagcgggagaaatactggtgggtcagcatgaagcgggaaattgcagagtttgtggctctatgtgatgtgtgccagcgtgtcaaggcagaacaccagcgaccggctggacttctccaacctctccaagtgccggaatggaaatgggatgaaattgggatggatttcatcaccggacttccaaaaacccaaggtggatatgattctatatgggtaattgtggatcgattaaccaaggtagctcgattcattcctgtgaagaccacctatggagggaacaaactagcggagctctacttcgctaggatcgtgagtctccatggtattcccaagaaaatcgtatctgataggggaagccaattcacctctcacttttggaagaagctccaagaagagctaggtactcgattgaatttcagcaccgcgtatcacccgcagacagatggacagaccgagcgtctaaatcagatcctagaagatatgctccgcgcatgtgtcctagacttcgggaagacttgggataagagtctcccctatgccgagttctcctacaataacagctatcaagccagcatacaaatggcaccttatgaagcgttgtacgggcgcaaatgccggacaccgctattgtgggaccaagttggagaaagccaagtgttcgggactgatatcctgagagaagctgaagctaaagtcagaatcattcgggataacttaaaggtggcacagtcccggcagaaaagttatgccgataaccgacgccgtgatctggaattcgcagtggatgattttgtgtaccttcgggtcacgccattgcgaggggtgcacaggtttcggacaaaagggaagctcgcacctcggtatgtgggtccctttcgtatcactgctcgacgcggagaagtcgcctaccagctggagttgcccgcctccttgggtaacgtgcatgatgtgttccatgtgtcgcaactcaagaaatgtcttcgagtgccatccgagcaggccgactcagagcaaattgaagttcgcgaagacttgacttacgtggagaggccagtgaaagtcctggacaccatggagcgcaggaccaggaaccgggtaatccgtttttgcaaggtccaatggagcaaccacgctgaggaagaagctacttgggagcgtgaagacgagatgaaagcaacccat

SEQ ID NO: 5345 - DNA, 5596 bp, Oryza sativa
  Clone ID: PAT_MRT4530_12141C.1
atggatgaagtcgggggtcgatggacattctccagggcaaatgaaggctacacgagctgcggcccggtagtcgagatgtcaaatagcacagggttggtgccctgctgctaggggctcagttccgtctgcctgtcccgggggttccggccgtaggcgggattgggtcgatgtacacctctgatcagagtataatctattcgaatagccgcgccctcggttatgggcaagccgagcaatgtacccaaatggccggcagcgttacccgtcgtggtttggacatgactggcttcgtcttggagctgcggggcatgtgcgtggtcttggggtatccacatggagtggattaccaggccaggccgcttccggatcaggagggagacgatgcggagccccacgctggttgggaggtcactgcagtgatcctctctggctctcccgagcggacttcgctggcagtcaccgcgggtggagattccttccccgccgcttgccagaacgccgctctcctcgccatcggcactcttcaccagcgctacccggacgagttgcagcactcgccctaccgctaccaccctcgtcgcggaggagcccgcgactacgccaccttccgggatgctagctcggaggatgacgctaccatcgtgcatctggcacgcatggtggaggcatacgacgcggctcgtatcgacttccatcagatggtgcgtcgtggcatgatcgagaacaacatgaagatcctggagctgcgtcaggagaacctgcagctcaagaaggacctcgacgcggtggaggcgcagctgcatcagctcaagatcgcccagggagaggactgtcgccccaagcgtcgccgcgtctgccgcagccagaagatcaccgcccgcaagagcacttccaggcccgagcttgttcgtcagtccctggcgtggacttgcttcgtcgagacccctcgtgctgagcccgcgcccgtggttccccaggagggggaagcctccggcgttggtagcacggaggatgcgctgttgctcaccttccgtcctggcccgtcgcagcagtagacgagcagttagtaggcttgcgcatggtgacgaccaggagaaatgctgttaccggtgaaggcaatcaacccgaaggcagcaaccacaaccaccaaggcaatccacctccacctcctcctccgcctccaccaccaccaccagacaccaacgccattctcacccagatcctcgcccagcaggccaacatgatgaccgctttcctccaccacctccaaaatccgccacaacacaatgctccaccaccacccccacaacactctaagctcgccgagttcctccgcatccgcccacccaccttctctagctccaacaatcccgtggatgcgttggattggttgcatgccgtggggaagaagctggacactgtgcagtgcagtgatgaagagaaagtcatcttcgccgcccaccagctgcaggggcccgcatctctatggtgggaccatttccaggctacgcagccggagggacaaccgattacttgggctcgcttcaccgccgctttccggagaacccatgtgcccgccggagtcgtggctcttaagaaaagggagttccgagagttgaagcaaggcaaccgctccgtgatggagtatctgcatgagttcaacaatctggcccggtacgctccggaggatgtgcgggaagatgaggagaagcaagagaagttcctggcaggaatggaccctgagctgtccgtccgtctagtttccggggactatccggatttccaacgtctggtggacaagagcatccgcttggaagccaagcacaaggaactggagtcgcacaagcgccgcttggcgaatttccgcaatcaacagggtgctaaccagagggtccgctacaccaatccctatccaaggggatcctcctcacagcagcaacaacagcagcagcaacctcgttccgcaccccgacctcaattcgtggtgcgcgtcccacagccgcagcagcagcagaatcaacaagggactcgtgcgccccgtcctcctacgccagctgtgcagcccgttcaaggccgtagggacgcttcaggtccgcagcgtctgtgcttcaactgcttcgagcccgggcactttgcggataaatgcccgaagccaaggcgtcagcaaggccaagcgcctccccgctccaacaacggtggaaaggatgtcattcggggtcgtgtgaatcacgtgacggccgaggacgtgctgacaactccagacgtcatcgttggtacgttcctcgttcattccatccctgctaccattttgttcgactctggagcttcccactcgtttatatctgtgccattcgtggggagaaatcagttgggggtagaaaggcttaggaaccctctgctcatcaccacccctggaggggttatgacagcaaagtattatagccctgccgtccctatagaaattcaggggattccttttccctcggatctgattcttctagacacccagaacttggatgtgatccttggaatgaattggttggctcaattccaaggagtagtggattgcgcgagacgcactgtcactctgtaccgagggccggaacaaccggttgtttcctttgcatccccaacctctgtcagaagttcagaactgcatcagataggactgtcagaaatccccatagtcaaagaattcggagacgtgtttccggaagaactacctggtatgccgcccaagcgagagattgagttccggatagatcttgctccaggaaccactcctctgcacaagcgaccctaccgtatggcagcaaatgaactggccgaagtaaagaaacagttggaagggttgaaagaaaaagggtatatacgtccgagtacttccccatggggtgctcccgtgatttttgtggagaagaaagacaagacgaagaggatgtgcgttgactacagagctctcaatgaagtcaccatcaagaacaagtaccctcttccccggatcgatgatctgttcgatcagcttaaaggtgccactgtattctccaagatcgatcttcgttccggatatcaccaattacgtattcgtgaagaagatattccgaagaccgcattcaccacgcgatacgggctgtacgaattcacggtgatgtcgttcggtctaaccaatgcacctgccttcttcatgaacttaatgaacaaagtgttcatggaatacttggacaagtttgttgtggctttcatcgatgacattctgatatactcacaatcagaggaagaccatcagcaccatctccgtctggtgttgggaaagttgcgggaacatcaattgtatgccaagcttagcaagtgtgagttctggatgtccgaagtcaaattcttggggcacgtgatatctgccaaaggagtcgctgtggatcccgaaacagtgaccgccgtcaccgattggaagcaacccaagacagtcactcaaattcgcagtttcttaggtttggcaggatactaccggaggttcatcgagaacttctccaaaatcgctcaacccatgacacagttgttgaagaaagaagagaaatttttgtggagcccgcaatgcgagaaggcgtttcaaactctcaaggaaaagctggtttcctcgccagtgttaatcttgccagatactcgcaaggatttcatggtgtactgtgatgcttcgcgccaaggattggggtgcgtgctcatgcaggatggtcatgtggtagcctatgcctcacgtcagctacgacctcatgaaggcaactaccctacccatgatttggagttagcagcggtggttcatgctctaaaaatctggcggcactatctcattggtaatcgctgtgaaatatatactgatcataagagtttgaaatacatcttcacccagtcagatctgaaccttcggcaaaggagatggttagaactcatcaaggattatgatgtgggaattcactatcatcctggtaaggccaacgtggttgccgacgctctaagtcgaaaaagccattgcaacactctcaacgtccgtggcattccacccgaacttaatcaacagatggaagccctgaacctaagcatagttggtcgtggattcttagctgcgttggaagccaagcccaccttgcttgatcaaatccgcgaggctcagaagaatgatccggacatgcatggactcctcaagaatatgaaacagggtaaagccgctggtttcacagaggatgaacacggaaccctatggaacggaaagcgggtatgcgttcccgataacagagaacttaaacagctgatacttcaggaagctcacgaaagtccttattcaatccaccctggcagtacgaagatgtacttagacttgaaggagaaatactggtgggttagcatgaagcgggaaattgcagagttcgtggctctttgtgatgtgtgccagcgtgtcaaggcagaacaccaacgaccggctggacttctccaacctctccaagtaccagaatggaaatgggatgaaattgggatggatttcatcaccggccttccaaaaacccaaggtggatatgattctatatgggtagtcgtggatcgattaaccaaggtggcccgatttattcctgtgaagaccacctatggagggaacaaactagcggagctctacttcgccaggatcgtgagtctccatggcattcccaagaaaatcgtatctgataggggaagccaattcacctctcacttttggaagaagctccaagaagagctgggtacccgattgaacttcagcaccgcataccacccgcagacagatggacagaccgagcgtctaaatcagatcctagaagatatgcttcgcgcatgtgtcctagatttcgggaagacctgggataagagtctcccctatgccgagttctcatacaacaacagctaccaagccagcatacaaatggcaccgtatgaagcattgtatgggcgcaagtgccggacaccactattgtgggaccaagttggagaaagccaagtgttcgggactgatatcctgagagaagctgaagctaaagtcagaaccattcgggataatctaaaggtggcccagtcccggcagaaaagttatgcagataaccgacgccgtgatctggaattcgcagtggatgactttgtgtaccttcgggtcacaccattgcaaggtgtacacaggtttcagacaaaagggaagctcgcacctcggtatgtgggtcctttccgtatcattgctcggcgtggagaagtcgcttaccagctggagctgcccgcctccttgggcaacgtgcatgatgtgttccatgtgttgcaactcaagaaatgtcttcgagtgccatccgagcaggccgactcagagcaaattgaagttcgcgaagacttgacttatgtggagaggccagtgaaaatcctgcacaccatggagcgcaggaccaggaaccgagtaatccgtttttgcaaggtccagtggagcaaccacgccgaagaagaagcaacatgggagcgtgaagacgagctgaaggcagcccatcccgatctcttcgccagttcctccgaatctcggggtcgagattccgtt

SEQ ID NO: 5346 - DNA, 5478 bp, Oryza sativa
  Clone ID: PAT_MRT4530_12142C.1
atgtcatggcacagggccggtgtcctgctgctaggggctcagtcctgcctgcctgtcccgggtgttccggccgtaggcgggattgggtcggtactcttgtctatggctaggatgggttggaaactatgtcacgtcttccgtctgtataccgtggtgatggccggcagcgtcacccgtcgtggtttgggcatgactggcttcgtcttggagttgcggggcatgtgcgtggccctggggtatccacacggagtggactaccaggccaggccgcttccggagcaggagggtgacgatgcggagccccgcgctgcttgggaggtcactgcagtgatcctcgctggctcttctgagcggacttcgctgacagtcaccgcgggtggcgattccttccccgccgcttgccagagcgccgctctcctcgccatcggcactctccaccagcgctacccggacgagttgcagcactcgccctaccgctaccacccccgccgcggaggagcccgcgactacgccaccttccgggatgctagctcggaggatgacgctaccatcgtgcacctggcgcgcatggtggaggcgtacgacgcggctcgtatcgacttccatcagatggtgcgccgtgggatggtcgagaacaacatgaagatcctggagctgcgtcaggagaacctgcagctcaagaaggacctggacgcggtggaggcgcagctgcatcagctcaagatcgcccagggagaggtctgccgccccaagcgtcgccgcgtctgccgcagccagaagatcaccgcccgcaagagcacctccaggcccgagcttgttcgtcagtccctggcgtggacttgcttcgtcgagacccctcgtgccgagcccgcgcccgtggttccccaggagggggaagcctccggcgttggtagcacggaggctctctctgttgctggttctgtgtggggttttcagatggtgacgaccaggagaaatgctgttaccggtgatggcaaccaacccgaaggcagcaaccacaaccaccagggcaacccacctccacctccacctccgcctccaccaccaccaccagacaccaacgccattctcacccaaatcctcgcccagcaagccaacatgatgactgctttcctccaccacctccaaaatccgccacaacataatgctccaccaccacccccacaacactctaaactcgctgagttcctccgcatccgcccacctaccttctctagctccaacaaccccgtggatgcgttggattggttgcatgccgtgggaaaaaagttagacactgtgcagtgcagcgatgaggagaaagtcatcttcgccgcccaccaactgcagggacccgcatctctctggtgggaccacttccaggctacgcagccagaggggcaacctatcacttgggcccgcttcaccgccgcttttcggagaacccatgtgcccgccggagtcgtggcccttaagaaaagggaattccgagagttgaagcaaggcaaccgctccgtgatggagtatttgcatgagttcaacaatctggcccgttacgccccggaggatgtgcgggaagatgaggagaagcaagaaaagttcttggcaggaatggaccccgagttgtccgtccgtctagtctctggggactatccggattttcaacgactggtggacaagagcatccgcttggaagctaagcacaaggagctggagtcgcacaagcgccgcttggcgaatttccgcaatcaacagggtgctaaccaaagggtccgctacaccaatccctatccagggggatcctcctcgcagcagcaacaacagcagcagcaacctcgctccgcgcctcgacctcaattcgtggtgcgcgtcccacagccgcagcagcagcagggtcagcaggggactcgtgcgccccgtcctcctacgccaactgtgcagcccggtcaaggccgcagggacgctcaaggtcagcagcgtctgtgcttcaacttgttcgagcccgggcactttgcggataaatgcccaaagccaaggggtcagcaaggccaagcgccttcccggttcaacaacggcgggaaggatgtcattcggggccgtgtgaatcatgtgacggccgagaacgtgctgacaactccagacgtcatcgttggtacgttcctcgttcattccatccctgctactattttgttcgactctggagcttcccactcgtttatatctgtgtcattcgtggggagaaatcagttgggggtagaaaggcttagaaaccctttgctcatcaccacccctggcggggttatgacagcaaagtattatagccctgccgttcctatagaaattcaggggattccttttccctcggatctgattctgctagacaccaagaacttggatgtgattcttgggatgaattggttggcacaattccaaggagtagtggattgcgcgagacgcactgttactctgtaccgagggccagaacaaccggttgttttctttgcacctccaacctctgtcagaagttcagaactgcatcagataggtctgtcagaaatccccatagtcagagagttcggagacgtgtttccggaagaactacctggtatgccgcccaagcgagagattgagttccggatagatcttgctccaggaaccactcctctgcacaagcgaccctaccgtatggcagcaaatgaactggccgaagtaaagaaacagttggaagagttgaaagaaaaggggtacatccgtccgagtacttccccatggggtgctcctatgatttttgtagagaagaaagacaagacgaagaggatgtgcgtcgactacagagctctcaatgaagtcaccatcaaaaacaagtaccctcttccccggatcgatgatctgttcgatcagcttaaaggtgccactgtattctccaagatcgatctccgttccggatatcaccaattacgtattcgggaagaagatattccaaagaccgcattcaccacgcgatacgggctgtatgaattcacggtgatgtcgttcggtttgaccaatgctcctgccttcttcatgaacttaatgaacaaagtgttcatggaatacttggataagtttgttgtggttttcattgatgacattctaatatactcacaatcagaggaagaccatcagcaccatctccgtctggtgttgggaaagttgcgggaacatcaattgtatgccaaacttagcaagcgtgagttctggttgtccgaagtcaaattcttagggcacgtgatatctgctaaaggtgttgctgtggaccccgaaacagtgaccgccgtcaccgattggaagcaacccaagacagttactcaagtccgcagtttcttaggtttggcaggatactaccggagattcatcgagaacttctccaaaatcgctcgacccatgacacagttgttgaaaaaagaagagaaatttgtgtggagcccgcaatgcgagaaggcgttccaaactctcaaagaaaagctggtttcctcgccagtgttaatcttgccggatactcgcaaggatttcatggtgtactgtgatgcttcgcgccaaggattggggtgcgtgctcatgcaggacggtcatgtggtagcctatgcctcacgtcaactacgacctcatgaaggcaactaccctacacatgatttggagttagcagcggtgattcatgatctaaaaatctggcggcactatctcattgggaaccgctgtgaaatatatactgatcataagagtttgaaatacatcttcacccagtcagatctgaaccttcggcaaaggagatggttagaactcatcaaggattatgatgtgggaattcactatcatcctggtaaggccaacgtggttgccgacgctttaagtcgaaagagccattgcaacactcttaacgtccgtagcatcccacccgaacttaatcaacagatggaagccctgaacctaagcatagttagtcgcggattcttggctgcgttagaagccaagcctaccctgctcgatcaaatccgcgaggctcagaagaatgatccggacatgcatggactcctcaagaatatgaaacagggtaaagccgctggtttcacagaggacgaacacggaaccctatggaacggaaatcgggtatgcgttccagataacagagaacttaaacagctgatacttcaggaagctcacgaaagtccttattccatccaccctggcagtacgaagatgtacttagacttgaaggagaaatactggtgggttagcatgaagcgggagattgcagagtttgtggccctacgtgatgtgtgccagcgtgtcaaggcagagcaccagcgaccggccggacttctccaacctctccaagtacctgaatggaaatgggatgaaattgggatggatttcatcaccggacttccaaagacccaaggtggatatgattctatatgggtagttgtggatcgattaaccaaggtagctcgattcattcctgtgaagaccacctatggagggaacaaactagcggagctctacttcgctaggatcgtgagtctccatggcgttcccaagaaaatcgtatctgataggggaagccaattcacctctcacttttggaagaagctccaagaagagctgggtactcgattgaatttcagcaccgcctatcacccgcagacagatggacagaccgagcgtctgaatcagatcctagaagatatgctccgcgcatgtgtcctatatttcgggaagacctgggataagagtctcccctatgctgagttctcttacaataacagctatcaagccagcatacaaatggcaccttatgaagcgttgtatgggcgcaagtgccggacaccgctattgtgggaccaagttggagaaagccaagtgttcgggactgatatcctgagagaagctgaagctaaagtcagaatcattcgggataatctaaaggtggcccagtcccggcagaaaagttatgcagataaccgtcgccgtgacctggaattcgcagtggatgattttgtgtatcttcgggtcacgccattgcgaggtgtacacaggtttcagacaaaagggaagcttgcacctcggtatgtgggtcctttccgtatcattgctcgacgcggagaagtcgcttaccagttggagctgcccgcctccttgggcaacgtgcatgatgtgttccatgtgtcgcaactcaagaaatgccttcgagtgccatccgagcaggccgactcagagcaaattgaagttcgcgaagatttgacctacgtggagaggccagtgaaaatcctggacaccatggagcgcaggaccaggaaccgggtaatccgtttttgcaaggtccagtggagcaatcacgccgaagaaaaagctacttgggagcgtgaagacgagctgaaggcagcccatcccgatctcttcgccagttcttccgaatctcggggtcgagattccgtttaa

SEQ ID NO: 5347 - DNA, 478 bp, Oryza sativa
  Clone ID: PAT_MRT4530_12143C.1
cttgtctgtaagctagctaactaactacgtggctatggcccccaccgtgatggcctcctcggtcacctccgtggctccattccaagggctcaagtccaccgctctccttcccgttagtcgtcgttccatcaacttgggctttggcaacttctgtaatcggcggttggatcatgtccctgcttgttgagttcttttgaggtcttcttgtatatcttgtctttttcgttttctttccttttctccctttttgtttcttttttcctttctcttctcttctttttttgtctatttattatctatctccctttttcttctctatctcttattctttctctttttttcttttcttttcttcttttatttttttttttactatttatcttctttttccttttattttttttttactttttattttatcttcctttttttttctttttctttccccttttttcttattcttccttttttatcattt

SEQ ID NO: 5348 - DNA, 357 bp, Oryza sativa
  Clone ID: PAT_MRT4530_12144C.1
atgaggggcgacggggcgtacaccgggatgacgagggagaacgagagggagcgagccaacggcttggattcgccggagggagtgcgtcggtggcggattgcggcggcggcaaccggcggagagaagagggggaaacggcgacgaggtcacgaggggccgattcccggcgacgctgggcaggcgcggcaggcgctgtcggcggcggcgactggccgtgatagcagtagtcatatgtacgaggtcagtttgatggcacagtcattgttgccagtgatcattttgttgatgtcagcgtccctccaggagtcacctactcaggccaggaatgctcctttaggtccttccaacacttcttag

SEQ ID NO: 5349 - DNA, 490 bp, Oryza sativa
  Clone ID: PAT_MRT4530_12145C.1
ccggccggctcgaacgcacggcaaagtcgccaagcccagtagcaggaagagatcagatttctttttcgcctccgtctccgatcaggaagaggatgggcggattcgatctgcaggtgaaggagagggccaaggagctgaagcacctcaagggggcggtgatgaagggcgtcaaggtggtcggcgactcgtgcaagaaggcgtggaacaaggtcaagagcatcaagcactgaagcgatcgaagcgtcgacgaaccatccgatccgacatattgtttgagtagattcatctagtatgattattagtacttgattgccctgtgcgatcggggtggttttgtagtagttccttctatttgagatagaatttcgtgtgagatcgcctgtaaggatggctttatagtattggtctattttccccttgatggattggtgttctaaaatcttttttggtcaaaaaaaaagcgatagggatctgcctgtcaatattcgat

SEQ ID NO: 5350 - DNA, 333 bp, Oryza sativa
  Clone ID: PAT_MRT4530_12146C.1
cccacgcgttcggccacgccttcgcccacgccttcgaagaagggcttgcttattctaacgggggggaacaccctttcccggaaccttacacttcttggcttgggttgcaaccttattgttttgcaaccagcttaaaaaacttaattttttgggttccaacttttctttttgaaccaacttccgttcggggtggcctccaacattgtcgtcaccgggatcgggcttgttattgtcaccaggttcctgagaaggagaaggaggaggaggagctctccgccaccttagggtgccttccagaaggggattggttgaccaaccctttggatccattag

SEQ ID NO: 5351 - DNA, 2313 bp, Oryza sativa
  Clone ID: PAT_MRT4530_12147C.1
atgaatctcagccgtccgatctggtgggcccacacttcccccgactttgttcagtttggagttgcgacactgacatgtgggccccacttttactatggcccacacgtcagtgacacaacggcaagctgcacaagggtcaggcgatctcgtctccgcgagttcgctcgcgaccgcttccgagatccgttcaaccccgatctacgccgccgagaacctcgccggcggcgacgacgacgagcacctcgccggcggcggaaggcgatgatgcctgtacgcacgtaccaccaccaccaccaccacaacaacagcaacaaccatcggctacgccgcatcatcccccgagtcctcctcgccgtcttcgccatctacgccgtctcgttcgcggcgtacctcctccgccaccagtcgccgcacccgcacccgcaccctgccgctgaccccgagcgcgacgccgtggacgcagccggaggaggcggaggaggaggagccgtggaccgtgtgcgggtagaagcgccgtcctcgcagaagccatggcctcgcctcccctccttcctcccgtggacgtccgcctccgttcggccgccgccgaagcactcctgtgaggggtacttcgggaacgggttctcccgcctcgtggacgtgctccccgcgcggggcggcggcggcggcgggtggttccggtgccaccacagcgagacgctgcgcagctcgatctgcgagggcgggagggtgcggctcgacccggggctcatcgcgatgtcgcgcggcggcgagccgctcgaccaggtgatgggccgcgccgaggaggaggagctgcccaagtacgagcccggcgcgctgcaggtggaggcggcggcgaagaggacggggccgttggtggaagcggggttcctcgacgcctacgtgcccaccggcgggatcgggatgcacacgatgaggtcgctgctcgactcggggcgcgtcgtgccgcccggcgagctacactgctcgcagtgggttgaagaaccaacacttctagtaactcgttttgaatatgcaaaccttttccacacaattacggactggtacagtgcatatgtcagttccagagtcacggatttacctaaccgccctaatgtggtctttgtggatggacattgcaaggcacaactggagcaaacatgggaagcacttttctcaaatgtgacatatgttaagaatttctctggccctgtttgttttcgacatgcaattctttcaccattgggctatgagactgcgctatttaagggccttagtgagagctttagctgcgaaggtgcttctgcggagtccctcagagaaaagcctgatcaccagaaaacggcaaggttgtctgaatttggtgagatgattttagcttcttttgatcttctgagggatgacatactgtcatccaaaacatcaaatgggctcaatgttctctttgttcggcgagaggactacttggcccatccacgccacagtggaaaggttgaatctagactaagcaatgagaaggaggtatatgatgcaattgagggctgggcaaaaggtcagaaatgcaaaataaatgtcatcaatggtctttttgcccacatgaacatgaaggagcaactgcgtgctatacaggaagcttcagtagtaataggggcacatggggctggtctaactcacttggtttcagctaccccagatacaaaagtccttgaaatcatcagcagcatgtatcgacgcccacattttgcattgatctcacactggaagagcttagagtatcatgccataaatctccctggatcatatgcaagggtaacagatgttatcaatgagttgagtaatatactgaaaggaggaggacaacacaagctaaggggaaggaaaagggagaggaagaagaaggaatggggaggatggctgtgggcacggtggtttgcctgcctgcatgcatcccggaggagcacatgccttgttgctgctgcctggggcgtgaaatgggcgtggctgatgatggacgctagctcgctgggaatcatgcctgtttccttcagcatttatgtgggtcggaggatggagttggaattggctccggtttctgcttggttgggtggcctggatgctgtggcctggtctggactctggacagcgccgaggccttcggatgcggcggtgctgccggtggttacaggggtactgccacagtacatgtacagccttgggctcatgccactaccaattggcaaaggtgtaacttttatcgatggagggagtaatttagaaaagagagtactggttgatgtgatggaaaaggactga

SEQ ID NO: 5352 - DNA, 289 bp, Oryza sativa
  unsure (1)..(289): unsure at all n locations
  Clone ID: PAT_MRT4530_12148C.1
cccacgcgtccgcccacgcgtccgccaggcgctgtagctgatgcaaaaaggccatcagatgaagcggcatcacttatgaagaacatttactggaaggagtttggccttcttgcatttgtgtggatggcattccttgttcttcaggtcacaaagaactacacagctacttgctccagttggtactggatcttaaaccttctccagatcccagtatcagttggagtgactatgtatgaagcgctgggcctggtgagcgggaagagagntctatttgnaaagggaaatgaac

SEQ ID NO: 5353 - DNA, 620 bp, Oryza sativa
  Clone ID: PAT_MRT4530_12149C.1
ggggggttgttttttttttttttttttttttttttttttttttttttgggtttttttttttttttttttttttttttttttttttttttttttttcccgaatcaaacccccccctttttttttgggttaaacaaaaaaaaccccccacaaatgggaagggggggggggaaaaaaaaggaaaggaaattattggcaggaaggaaggaagggctagggggcaggggcaaaaatgggggcgaaaaggaaggggtcccagggggggggggggccaggggggccccaggggaggcagccggggaaggggcaaggggcggcctgcggccccggggaaaaaagcttgccctgccgaagggggggccccgacgggggcccgcccttgcaaagccccaacagggccggggggcccacaaatggcacccccccccgccggatggaccggagaacaccgggcgccacccgggggagcccccaggccggcccgagggccagccccccggggggccgggtcacgagggggggggtttccatggggcacttaaccgccccggccgatcccccccaagcctccggaaaaaagggggggggaaacatggccacgaaaaaaacggggtttggggggg

SEQ ID NO: 5354 - DNA, 474 bp, Oryza sativa
  Clone ID: PAT_MRT4530_1214C.1
atggcgggaggcgccaggaatggttcggccgaacccaaaaactcgcctcccggtctctcctttggccgtcatgttgaggcggcgacgggcgacggtttcagcgtgtgcggcgacgacggcggttctgacatgcgcggcgacggcgacagttccggcaggaagcacagtgatggtggcacatccggcgtgcacgacggttccatcgagaagtgcggcgatgtgtgcgcggcgatggtgaagcccgtccatgaccacctcctcactgcccacttcctcgacatcaaagacctcttcgacatcacctgtcgcaaggtcttcgacatgctcaagtgggtagtcgcaggcttcccactcccttgcacggcgatggcaggtggcggccatggggcttccaacgcagcgaggcaggcgatgaggaggcttccggcgcagcgaaggcaggagctgcaggggcttccggtgcggctagtctaa

SEQ ID NO: 5355 - DNA, 667 bp, Oryza sativa
  Clone ID: PAT_MRT4530_12150C.1
cccatcccaaaatcctcgccacctccgccccaaaaatcctcgccgccgaccggcgccgccgtcttctcgcggagcaagcagcgagcactacagcctccatgtcgccgagccagccagccaacattgtcgtcttctcgccttacttgccggcgaccccgtgtcgcttcgtcatcgtcgagccagctgggccgctcccttcccttggagccactgttctgcgccaccccctgtggagccaacatccgccgtcgtcttctcgtggagccaatggtcagcactgccaccaaacatctcgtccatggccatctcctcgcttcctgtgactgctgcttgtcggctcctccacacctctccaattgtaggtattttactactcagattacctttgctttgctctctatatagtaactgatgtttatcagcaagggagtaaactaccgcaagtcttccaagttcttctatctgaagaaaagaacacatttatccgcggtagcaccatttgtaattatgagcacaaattatattcaaattattttagcaattgtttaatttctttgggatagctcagttattaattttgaaaaaggatgaatgtcatgtgtgcatccttgctgtttatccagtgattggtcataatgcatatgttgactttacagaaagatcctta

SEQ ID NO: 5356 - DNA, 1289 bp, Oryza sativa
  Clone ID: PAT_MRT4530_12151C.1
tgcttctttgttcacctcggaaaagaaaaaagaacagaaagaaagacgatctagagggagccaaagattgcaagatcgatcgcaaggtaacgtacacgtacaggtgagaggaatcgatgccggccgacgcgcgagctgctccgccgtcgtgcccgttcccgacgatacggtcgcatggcgccgccgtggcgaggtcgcacgcctacgactggctcgcgctgctcctcctcgtcgccgtcgacggcctcctcaacgccatcgagccgttccaccggttcgtcggcgccggcatgatgaccgatctcagataccccatgaagcgcaacaccgtccccatctgggccgtcccgatcgtcgctgtcattgggcccatgattgtcttcaccgtcgtctacttcaggaggaggaacgtgtacgatcttcaccatgctgtgctaggcattctgttttcggtgctgattaccggcgtgctcaccgacgcgatcaaggatgccgtcggccgcccgaggccgaacttcttctggcgctgcttccccgacggaatcgcggtgttcgataacgtcaccacgggagtcatctgccacggcgacgcgagcgtgatcaaggagggacacaagagcttcccgagcggccacacttcatggtctttcgccggtctggggttcctgtcgtggtaccttgccgggaagatcacggtgttcgaccggcgcgggcacgtcgccaagctgtgcgtcgtcctcgcgcctctgctcgttgcggcgatggtcgccatctcgagggtggacgactactggcaccattggcaagacgtctgcacgggaggcgtccttgagaatcgaagctgctgccatgcgccccgtcttcttcaaccttgggcaagcggcgggctcatcatcgagctcgccatcggccccttcttctattgagagaggggaagcgagaacccaacgcagcaagccaccgaaccactggacgccatggaaaccggtaggggaggccaatgaacaaggtgcaagcaagaccaatcttgtgtatataaggccataatgtacagctcctcctcaaggcacgggaggtaatcgtcgttagtttgtaaatactttggcgtgggccaatggtaccgactaacttgactactgacctgacgcaaataggtgttgtttgtacatactgtatgtattttcaacgaagtttgtacatatgtattggttttgcttacttatgtactcctatgtattttaaataattttagtgtctaaaattccgttctaaaaaaaaaaaaaaaaaaa

SEQ ID NO: 5357 - DNA, 345 bp, Oryza sativa
  Clone ID: PAT_MRT4530_12152C.1
ggaaggattggcccatttaatcccccaaatgggaaaaaaaaaaattggaattttttttggggagggaaaattccaaaacgacccaaaaatgggggcaggaaaaacataaaaacaaaccacggggtcctggttgggaaaaaaccacccgtttttgaaattaaaaggggggggggaatccctaaaagggggggggcccggttttaaaaagggaaggcaaaaatacccccccaagggggcaaaaaaatcctttggaccaaaaaaggaacctttccttattttacgggaaaggtgaaacaagcctgggccggccattggaacgtaaacactgaaaagaacccaaatttt

SEQ ID NO: 5358 - DNA, 2406 bp, Oryza sativa
  Clone ID: PAT_MRT4530_12153C.1
atgcctcgccgcggcgcgtcctccgcttccaccagccgcggccgccgccgcccccgcgaggaggaggaggaggaggatgaggaggaggtggtgggggatgtcgcctccgacgactccgccgactccgacttcgtcgccgacacggaggaggaagaggcggcggacgacgagtacgactacgcgtccgatgggaaggatggcgcggggcccgcggctgctgctgctgctgctcctgcggcggtggccccgccgcccccgcaaccgaagcggctgcaaggggggaggaagaagggggcgggtggccacgggaagctgcccctgccgtgggaggagtgggaggaggcgaacgagaagtggctcgacgagcgggaggcggcggccaagggggaggaacccccggacccggaggttccccccgccgtggccgcgggggtgcccacggcggagccggccccggaggtgctgctcccgctgctgcgcttccagaaggagtggctcgcgtgggcgctcgcgcaggaggcctccccctcgcgcggtggcatcctcgctgacgagatggggatggggaagaccatccagggcatctcgctcgtcatcaccgcgcgccgcctccgccccccggcaccgcctcctcgccgccgcgccgcgtcgtcatctcagggccagccgaagcgttgggtgggatgcacgctggtggtctgccccgtggtggccgtcatacagtgggcgcaggagatcgagcggcacacggccaaagacagcgtgcgcgtgctggtgtaccacggcggccggcggggtgctcagaagtatgatttcaacaagtacgacttcgtgatcaccacctactccaccatcgaggcggactaccggaagcacatcatgccacccaagactcggtgctgctactgtgataaattgttttaccccaacaagctgaaggtgcatttgaggtattactgtggtcctgatgctcagcgaaccgagaagcaggccaaacaggagagccggaaatggggtagcaaaaaggggacatcgaagaggagggtccaaaagaagaaaaatgatagtgatggtgaggattttgaggaacgtgatgggggatcggggagccaatcaaggggtcagtcacctctacactcagtgcggtgggagcgtattattttggatgaggctcacttcataaaagacagacgttgcaatacagccaaggctatttttgcattagaatcggaatacaagtgggctctgagtgggacacctttgcagaatcgtgttggagaactctactcgctgatccgttttttgcaaatatttccttactcgaactatttctgcaaggactgcaactgcgagatactagatacccttctaaagaaacaatgtgattgtggtcactcatctgtcaggcatttttgctggtggaacaaggtgaccttaaggagggactctttcgataaaaatgaaatggaattctacgaagctttatatactcagagtcgcacgcaatttgattcatatgttgatgctgggacgctgatgaacaactatgcacatatctttgacctcctaacaaggttgagacaggctgttgatcatccatatcttgtggcattttctaagacagcagaactcagtgacagaagtaaaaatgaaggaaatgagaacatggaaagccagtgtgtgccccttactgtcgacctaacaacacgaagttctggagaaaaggtcactccaaatttgaagggtggcaaacgctcaggaatattaagcagactacaaaaccttgcagattttaagacaagcacaaaaatcgatgccttgtttttggcctacatgtttttgttgattgagttacataatgatgttaatggtgatgttaatgatgaaaatactttggttaacctgagagaagagataagaaacatggttgagcatgatggttccgccaaagggattgtgttcagccagttcacatcattcttggatttgattgaattctccctgcagaagtctggtatcaagtgcgtgcaacttaatggcaaaatgaacattgttgagaaggggaaagctatagataccttcaccaatgatccagactgcaggatttttctgatgagcttgaaagctggaggagtagctctcaatctcactgtggcatcacatgttttcttgatggacccttggtggaatcctgcagtcgagagtcaggcccaggatcgaatccaccgaattgggcagttcaagccaatcagaagcatgaggtttgtgatcaaggacaccgttgaggagcgtatactgcagctgcaagagaagaagcgactggtgtttgaaggcaccgttggcgactcacctgaggccatgtccaagcttacagaggctgatctcaagttcttgttccagaactga

SEQ ID NO: 5359 - DNA, 464 bp, Oryza sativa
  Clone ID: PAT_MRT4530_12154C.1
aaaaaacaggtacacctgggaaagtttccaagaaaatcaatctcagtatcctcagttgttcacagagcagtcgggtttaattggacattatcttctcaaacagagaaatgtccatcactagagagtacaccattaaagaatcacaagttcatcctcaaaccaataactattaattacagacttgagcacaaggggcttacaaatataacaaaatgccctgcacataacccatacaagctaacaatgaaatgaaccgaagtacattcgaaattccgaacgcatgtcatattatgtcatggggggtgctaccaagggagcagatgcaggaagaacagagaaaccaatgtctccggtgactggacggaatgacgcgtttctctctaggttctcccatataagctttctccgctcctcagatgcagctcgcttttcttcctcctcttggaaattcctctgacaagtta

SEQ ID NO: 5360 - DNA, 522 bp, Oryza sativa
  Clone ID: PAT_MRT4530_12155C.1
atgtcgggccattcgggcggcaacgaggtggaggagaggattgggggtagggagaggaggtaccaaaatcatgtacgcccattggaacccatccgacggctgacgaacgtcggtaccgcgaggtaccgtaatgccgatgggcgctcgctccttcagatccatctacgccagtcctacaccgcggtggcgtcgcggcccttcctccacctccactctccccctgcgtccccactccccaagtccccaggccagatccggccgccatcgactttggggcagcgtatctggacaaggacggcgacgggaatatctcctcgagctcgtgggcaggcaaacaacgaccacaacgaagatgcggcgccaaggcggcgagctcagccggcgtatgcggcggacccctgggtgacagtgacctcggggtggtgggctgatgtgggggatgcggcaacctctcagatggcggcggtggcggcgatcgggcagaacctcttgaccaccctcccctggtccccccactactag

SEQ ID NO: 5361 - DNA, 3783 bp, Oryza sativa
  Clone ID: PAT_MRT4530_12156C.1
atggacatctctaggacaaatgaaggctacacaagctgcggcccagtagtcgagatgtcatggcacagggccggtgtcctgctgctagggcctcagtcctgcctacctgtcccggaggttccggccgtaggtggggttgggtcggtactcttgtctatggctaggatgggttggaaactatgtcacgtcttccgtccatataccgtggtggtatgcgacacgtggttacacgtgaggaagattgtcacgaccggaaataacccaacgggcgttcctgacgtgcgtgcattaatccttgtcccaggaggcaaggcccagcacacacagagacaaacgagaaacagcggaagactagggcgacgaccacaggcgcagcagcagcagaatcagcaagggactcgtgcgccccgtcctcctacgccaactgtgcagcctggtcaaggccgcagggacgctcaaggtcagcagcgtctgtgcttcaactgcttcgagcccgggcactttgcggataaatgcccgaagccaaggcgtcagcaaggtcaagcgcctccccgccccaacaacggcgggaaggatgtcattcggggtcgtgtgaaccacgtgacggccgaggacgtgctgacaactccggacgtcatcgttggtacgttcctcattcattccatccctgctactattttgttcgactctggagcttcccactcgtttatatctgtgccattcgtggggaaaaatcagttgggggtagaaaggcttagaaaccctctgctcatcaccacccctggaggggttatgatagcaaagtattatagccctgccgttcctatagaaattcaggggattccttttccctcggatctgattctactagacaccaagaacttggatgtgattcttgggatgaattgggagttcggagaggtgtttccggaagaactacccggtatgccgcccaagcgagagattgagttccgaatagatcttgctccaggaaccactcctctgcacaagcgaccctaccgtatggcagccaatgaactggccgaagtcaagaaacagttggaagagttgaaagaaaaagggtatatacgtccgagtacttccccatggggtgctcctgtgatttttgtagagaagaaagacaagacgaagaggatgtgcgtcgactacagagctctcaatgaagttaccatcaaaaacaagtaccctcttccccggatcgatgatctgttcgatcagcttaaaggtgccactgtattctccaagatcgatcttcgttccggatatcaccaattacgtattcgtgaagaagatattccgaagaccgcattcaccacgcgatacggactgtatgaattcacggtgatgtcgttcggtttaaccaatgcacctgccttcttcatgaacttaatgaacaaagtgttcatggaatacttggataagtttgttgtggttttcattgatgacattctgatatactcccaatcagaggaagaccatcagcaccatctccgtctggtgttgggaaagttgcgggaacatcaattgtatgccaaacttagcaagtgtgagttctggttgtccgaagtcaaattcttagggcacgtgatatctgctaaaggagttgctgtggaccccgaaacggtgaccgccgtcactgattggaagccacccaagacagtcactcaagtccgcagtttcttaggtttggaaggatactatcggagattcatcgagaacttctccaaaatcgctcgacccatgacacagttgttgaagaaagaagagaaatttgtgtggagcccgcaatgcgagaatgcgtttcaaactctcaaggaaaagctggtttcctcgccagtgttaatcttgccggatactcgcaagacttcatggtgtattgtgacgcttcacgccaaggattgggcctatgcctcacgtcagctacgacctcatgaaggcaactaccctacacatgacttggagttagccgcggtggttcatgctctaaaaatctggcggcactatctcattgggaatcgctgtgaaatatataccgatcataagagtttgaaatacatcttcacccagtcggatctgaatcttcggcaaaggagatggttagaactcatcaaagactatgatgtgggaattcactatcatcctggtaaggccaacgtggttgccgacgctctaagtcgaaagagccattgcaacactcttaacgtccgtggcattccacccgaacttaatcaacagatggaagccctgaacctaagcatagttggtcgtggattcgtggctgcgttagaagccaagcctatcttgctcgatcaaatccgcgaggctcagaagaatgatccggacatgcatggactcctcaagaatatgaaacagggtaaagccgctggtttcacggaggatgaacacggaaccctatggaacggaaatcgggtatgcgttccagatagcagagaacttaaacagttgatactactggaagctcacgaaagtccttattcaatccaccctggcagtacgaagatgtacttagacttgaaggagaaatactggtgggttagcatgaagcgggaaattgcagagttcgtggctctgtgtgatgtgtgccagcgtgtcaaggcagaacaccaacgaccggccggactcctccaacctctccaagtgccagaatggaaatgggatgaaattgggatggatttcatcaccggacttccaaaaacccaaggcggatatgattctatatgggtagttgtggatcgattaaccaaggtggctcgattcattcctgtgaagaccacctatggagggaacaagctagcggagctctacttcgctaggatcgtgagtctccatggcgttcccaagaaaatcgtatctgataggggaagccaattcacctctcacttttggaagaagctccaagaagagctgggtactcgattgaatttcagcaccgcctatcacccgcagacagatggacagaccgagcgtctaaatcagatcctagaagatatgctccgcgcatgtgtcctagatttcgggaagacctgggataagagtctcccctatgccgagttctcctacaataacagctatcaagccagcatacaaatggcaccttatgaagcgttgtacgggcgcaaatgccggacaccgctcttgtgggaccaagttggagaaagccaagtgttcgggactgatatcctgagagaagctgaagctaaagtcagaatcattcgggataatctaaaggtggcacagtcccggcagaaaagttatgcagataaccgtcgccgtgacctggaattcgcagtgggcgattttgtataccttcgggtcacgccattgcgaggtgtacacaggtttcagacgaaagggaagcttgcacctcggtatgtgggtcctttccgtatcaatgctcggcgcggagaagtcgcttaccagttggagctgcccgcctccttgggcaacgtgcatgatgtgtttcatgtgtcgcaactcaagaaatgtcttcgagtgccatccgagcaggccgactcagagcagattgaagttcgcgaagatttgacctacgtggagaggccagtgaaaatcctggacaccatggaacgcaggaccaggaaccgggtaatccgtttttgcaaggtccagtggagcaaccacgcagaagaagaagctacttgggagcgtgaagacgagctgaaggcagcccatcccgatctcttcgccagttcttccgaatctcggggtcgagattccgtttaa

SEQ ID NO: 5362 - DNA, 4203 bp, Oryza sativa
  Clone ID: PAT_MRT4530_12157C.1
atggacatctctaggataaatgaaggctacacgagctgcggcccggtagtcgagatgtcatggcacagggccggtgtcctgctgctaggggctcagtcctgcctgcctgtcccgagggttccagccgtaggtgggattgggtcggtactcttgtctatggctaggatgggttggaaactatgtcacgtcttccgtccgtataccgtggtgatggccggcagcatcagccgtcgtggtctggacctgactggtttcgtcttggagctgcggggcatgtgcgttgtcctggggtatccacatggagtggactaccagggcaggccgcttccggagcaggagggtgacgatgcagagccccacgctgcttgggaggttactgcagtgatcctcactggctctcccgagcggacttcgttggcagtcaccgcgggtggagattctttccccgccgcttgccagaacgccgctctcctcgccatcggcactcttcaccagcgctacccggacgagttgcagcactcgccctaccgctaccaccctcgccgcggaggagcccgcgacttcgccaccttccgggatgctagctcggaggatgacgctaccatcatgcacctggcgcgcatggtggaggcgtacgacgcggctcgtatcgacttccatcagatggtgcgccgtgggatggtcgagaacaacatgaagatcctggagctgcgtcaagagaatctgcagctgaagaaggaactagacgcagtggaggcgcagctgcatcagctcaagatcgcccagggagaggtctgtcgccccaagcgtcgccgcgtctgccgcagccagaagatcaccgcccgcaagagcacctccaggcccgagcttgttcgtcagtccctggcgtggacttgcttcgtcgagacccctcgtgccgagcccgcgcccgtggttcctcaggagggggaagcctccggcgttggtagcacggaggatgcgctgttgctcaccttccgtcctggcccgtcgcagcggagaagtgctaataccggtgatggcaaccaacccgaaggcagcaaccacaacaaccatggcagtccacctccacctcctcctccgcctccaccaccaccaccagacaccaacgctattctcacccaaatcctcgcccagcaggccaacatgatgactgctttcctccaccacctccaaaatccgccacaacagaatgctcctccaccacccccacaacactgtaaactcgccgagttcctccgcatccgtccaccaaccttctctagctccaataaccccgtggatgcgttggattggttgcatgccgtggggaaaaagctagacactgtgcagtgcagcgatgaggagaaagtcatcttcgccgcccaccagctgcaggggcccgcatctctatggtgggaccatttccaggctacgcagccagaggggcagcctattacttgggctcgcttcaccgccgctttccggagaacccatgtgcccgccggagtcgtggcccttaagaaaagggaattccgagagttgaagcaaggcaaccgctccgtgatggagtatttgcatgagttcaacaacctggcccgttacgccctggaggatgtgcgggaagatgaggaaaagcaggagaagttcttggcaggaatggaccctgagctgtccgtccgtctagtctccggtgactatccggatttccaacgtctggtggacaagagcatccgcttggaagccaagcacaaggaactggagtcgcacaagcgccgcttggcgaatgtccgcaatcaacagggtgctaaccaaagggtccgctacaccaatccctatccagggggatcgtcctcgcagcagcaacagcagcaacaacctcgctccgcgccccgacctcaattcgtggtgcgcgtcccacagccgcagcaacagcagagccagcaagggacccgtgtgccccgtcctcctacgccagctgcgcagtctggtcaaggccgcagggacgcttcaggtccgcagcgtctgtgcttcaactgcttcgagcccgggcactttgcggataaatgcccgaagccgaggcgccagcaaggccaagcgcctccccgctccaacaacggtggtaaggatgtcattcggggtcgtgtgaaccacgtgacggccgaggacgtgctgacaactccagacgtcatcgttggtacgttcctcattcattccatccctgctaccattttgttcgactctggagcttcccactcgtttatatctgtgccattcgtggggagaaatcagttgggggtagaaaggcttaggaaccctctgctcatcaccacccctggaggggttatgacagcaaagtattatagtcctgccgtccctatagaaattcaggggattccttttccctcggatctgattctgctagacaccaagaacttggatgtgatccttgggatgaattggatggctcaattccaaggagtagtggattgcgcgagacgcactgtcactctgtaccgagggccggaacaatcggttgttttctttgcacccccaacctctgtcagtagttcagaacttcatcagataggactgtcagaaatccccatcgtcagggagttcggagatgtgtttccggaagaactacccggtatgccgcccaagcgagagattgagttccggatagatcttgctccaggaaccactcctctgtacaaacgaccctaccgtatggcagcaaatgaattggccgaagtcaagaaacagttggaagagttgaaagaaaagggagctctcaatgaagtcaccatcaaaaacaagtaccctcttccccggatcgatgatctgttcgatcagcttaaaggtgccactgtattctccaagattgatcttcgttccggatatcaccaattacgtattcgtgaagaagatattcctaagaccgcattcaccacgcgatacggactgtatgaattcacggtgatgtcgttcggtttaaccaatgcacctgccttcttcatgaacttaatgaacaaagtgttcatggaatacttggataagtttgttgtggtgttcattgatgacattctggtgtactcacaatcagaggaagaccatcagcaccatctccgtctggtgttgggaaagttgcgggaacatcaattgtatgccaaacttagcaagtgtgagttctggttgtccgaagtcaaattcttagggcacgtgatatctgctaaaggagttgctgtggaccccgaaacagtgaccgccgtcaccgattggaagcaacccaagacagtcactcaagtccgcagtttcttaggttttgcaggatactaccggaggttcatcgagaacttctccaaaatcgctcgacccatgacacagttgttgaagaaagaagagaaatttgtgtggagcccgcaatgcgagaaggcgtttcaaactctcaaagaaaagctggtttcctcgccggtgttaaccttgccagatactcgcaaggatttcatggtgtattgtgatgcttcgcgccaaggattggggtgcgtgcttatgcaggatggtcatgtggtggcctatgcctcacgccagctacggcctcatgaaggcaactaccctacccatgatttggagttagccgcggtggttcatgctctaaaaatctggcggcactatctcattgggaatcgcagtgaaatatatactgatcataagagtttgaaatacatcttcacccagtcggatctgaatcttcggcagaggagatggttagaactcatcaaggattatgatgtgggaattcactaccatcctggtaaggccaacgtggtcgccgacgctctaagtcgaaagagccattgcaacactcttaacgtccgtggcattccacccgaacttaaccaacagatggaagccctgaatctaagcatagtgggtcgtggattcttggttgcgttggaagccaagcccaccttgctcgatcaaatccgcgaggctcagtgtcgcgaccgggaaaattgccttttcccgaacgccagtgtattaatccccgtcccaggaaaagccgggacgggcacaacggagacgaacggcgaggggacggcttcggcggcgatccttggacaaaggcgagacgcggccggcacgaggcttgacgacgcggagccgaggacggaggcgaggacggggctgcagcggctcgcttga

SEQ ID NO: 5363 - DNA, 501 bp, Oryza sativa
  Clone ID: PAT_MRT4530_12158C.1
gtggatccccgggctgaggctctctaaaaggatgtcgctttgtgtgtgtctggatgttgtcatacttttaggatttgacctttatggagtgttagaaatatcaagcttgggcatgcccagaatcatctaggtttaagcaatctgccgatctcctaatctcctttgcttggtcagttattattatacgatgtcataaaatcactattggatggtcaggtcgaaagactgaaatgtgggacattcaccctcatcatgctgccagcagatgaggcgcaaagtctggcacaaaagaatgcgagggactagataattgcttgtttttgaacttaatgttttatcgcctttccttttgaatttagtacttataaatttcaacaaattattctgtctagaagctatttttatttgtgttctgttgtcctgacccctgagtgtgagttttcattgccattcggtacgtaagctttaccatcaccgtgtatagttgcaaacttttttttc

SEQ ID NO: 5364 - DNA, 477 bp, Oryza sativa
  Clone ID: PAT_MRT4530_12159C.1
aaagcccaacggatttaaaggggtcaaaaaaaaaaaaaaaaaacccttgggcaaaaaaaccctcccaaaccccccaaaagggtaaaggaaaccggcttaaaaaaaaaaaggccaaattttcaaccagcctaaaaaaaaggttggcttcaaagagaaacggttttaagcccctgggggaatcccaaaaaactgggggggccccaaaaaattcccctttttgggcaaaccctgggggcccttgggtttggggggggccggggggaaaaaaacccccccggacaggcaaaaaaaaaccccaatggtccccaaaaaggaggcagcctggccccaaaaaggggaattaaccccaacgggggggggcgggtcccctaacccgagcccggaaaacccagggcccaaaaaaccccgtgggcggaaaaacccaaaaaaggttttatatgcccccaccagccccgacggagcaccgggaaaaaggcc

SEQ ID NO: 5365 - DNA, 1389 bp, Oryza sativa
  Clone ID: PAT_MRT4530_1215C.1
atggcccaagacaccggcgacgcagtgctcccttcctcttgcatcacggcagacaggcaccttagccttccttgcaagatcatgccgggcggtgccgtcgtgcgggcgggagagtcgaggccgtggccgcgatatccggagcgatccgtgcacctcttgtccttcgccatggtaggcttgatcccgctgttctccagattcttccatgaagttctggatttctacgaaattcacgccttgcatctcgcacctaatgccgtgatgacgctggccatcttcgcggatttgtgcgagatgttcattggggtgcgaccgacgatttggtggttccaggccttctttatcccgcagctgctgcaaggcgtagaggtggggggatgctacttccagccccgaccgggcacagcgggccagtacatcgagagccacctccacaagaaatgggaggactagaagaaagactggttctacaccgcgttgccggaccatccgcgacttcgagttcccgctggccctcccgaaaggtctgccgcatggttggcgacgtcggagttgggcgaggaatacgacgcggtgtgggatcgcctcaggggcctgcggagcctaggcctcacgggggcgatggtctttggcgattacttccgccgccgcatcgcacctctccaggaacgatcccgtggagcgtgggaatacactggtcccaacgaccccatgcggacgcatgtgggcgatcgctgggactggggtgaggaggacacgaagagggtgattcggcgggtgctgggcctagactccgccgagccaacactaatcccagatgggattcttcccctctgctgcaaccgcgaccgggagagcatcctagccgtgatgtcaaccgtcggcgctggcaggagccgcttctacgcgatcctcaggatgagtattgccttcgagatacgcccggatgtcgtcacgccgatggttgtgcgagcctttcctcgaaggtccctgggggagtggggctcgtgccgacgcaacacgcgacaactcgtcagcaattgtgttgtcgcgtcggggcacgtgccggagttaaagtccgtcgaagtggcgttccatgcgccgtacctcgcggacccgggccccacgcggcagccactcggcgcgcccgagggcggccacgccggggcggtcggcgagaggcggcgcggcggagcggcggccaagagaggggagggaagggggaaaggaggcgacggtccacggctcaccccggggcgacggcggcgacggaggaggcggctggagcggagggaggcgatggcgcggctcgggtcgacggggacggcggcactccggcggtcggcgaccgaaacggagaggtggacgaggtcggcgaggatgcggtga

SEQ ID NO: 5366 - DNA, 6138 bp, Oryza sativa
  unsure (1)..(6138): unsure at all n locations
  Clone ID: PAT_MRT4530_12160C.1
atggcggccggatcttccgcggccgattccccctcatccggccgctctctccccctcccaacactatttaaacgttccccgtgcctccctcctccgtttccgccactcgccgctctttctccccgtcggaatcgagctcgcgccgtcgccctctttctccgccgtcgccgccgagctccggttcgccgccgccgtcgccccggacctcctcccgcttcggcatcgcctccttcggcttcgcccgccgatcaccggaacgccgccgtcctcgtcgacccgagccgcgccgccgccttcctccgctccggtcgccatttccgtcgtcgccgtcgacccggggtgagccgtggaccgccgtttcacttcccccttccctcccctctctcgggcgccgctccgccgcgctggtggtcgccgccggcgaccatcggggcgcgggcgcgtcgcctcccgtcggctgtgccggcgaggccgccttcgggcgcgccccgcggctgccatgtggggcccggccgtcagccgcccgcgccctcgtgtgcggctgacgcgtgggacccacggcgccggccggcgtaagccgcgtgcacccggtccatcgtggacccacctcggccatataaggaccggtcttcgggcctctgttgcaaagcactaccgtacttccacatgtctagtggggcaaatgaaggctacacgagctgtggcccggtagtcgagatgtcatggcacagggccggagtcctgctgctaggggctcagtcctacctgcctgtcccgggggttccggccgtaggtgggattgtgtcaatgtacacctctgatcagagtacaacctattcgaatagccgcgccctcggttatgggcaagccgagcaatgtacccaaaaggccggcagcgtcacccgtcgtggtttggacatgactggtttcgtcttggagctgcggggcatgtgcgtggtcctagggtatccacatggagtggactaccaggccaggccgcttccggagcaggagggtgatgacgcagagccccacgctggttgggaggttactgcagtgatcctctctggctctcccgagcggacttcgctggcagtcaccgcgggtggggattccttccccgccgcttgccagagcgccgctctcctcgccatcggcactcttcaccagcgctacccggacgagttgtacaattggcactaccgttaccacccttgctgtggatgagcccgctactactctcaccttccgggatgctagctcgaaggatgacgctaccatcatgcacctggcgcgcatggtggaggcgtacgacgcggctcgtatcgacttccatcagatggtgcgccgtgggatggtcgagaacaacatgaagatccaggagctgcgtcaggagaacctgcagctcaagaaggacctagacgcggtggaggcgcagctgcatcagctcaagatcgcccagggagaggtctgccgccccaagcgccgccgcgtctgccgcagccagaagatcaccgcccgcaagagcacctccaggcccgagcttgttcgtcagtccctggcgtggacttgcttcgtggagacccctcgtgccgagcctgcgcccgtggttccccaggagggggaagcctccggcgttggtagcacggaggatgcgctgttgctcaccttccatggtgacgaccaggagaaatgctgccaccagtgatggcaaccaacccgaaggcagcaaccacaacaaccatggcagcccacctccacctcctcctccgcctccaccaccaccaccaccaccagataccaacgccattctcacccaaatcctcgcccagcaggccaacatgatgactgctttcctccaccacctccaaaatccgccacaacataatgctccacccccacctccccaacactctaaactcgccgagttcctccgcatccgcccacctaccttctctagctccaacaaccccgtggatgcgttggattggttgcatgccgtggggaaaaagctagacactgtgcagtgcagcgatgaggagaaagtcatcttcgccgcccaccagctgcagggacccgcatctctatggtgggaccatttccaggctacgcagccagagggacagcctattacttgggctcgcttcaccgccgctttccggagaacccatgtgcccgccggagtcgtggcccttaagaaaagggaattccgagagttgaagcaaggcaaccgctccgtgatggagtatttgcatgagttcaacaacctggcccgttacgccccggaggatgtgcgggaagatgaggagaagcaagagaagttcttggcaggaatggaccctgagctgtccgtccgtctagtctccgtggactatccggatttccaatgtctggtggacaagagcatccgcttggaagccaagcacaaggaactggagtcgcacaagcgccgcttggcgaatttccgtaatcaacagggtgctaaccaaagggtccgctacaccaatccctatccagggggatcctcctcgcagcagcaacaacagcagcagcaacctcgctccgcgccccgccctcaattcatggtgcgcgtcccacagccgcagcaacagcagagtcagcaagggactcgtgcgccccgtcctcctacgccaactgtgcagcctggtcaaggccgcagggacgttcaaggtccgcagcgtctgtgcttcaactgcttcgagcccgggcactttgcggacaaatgcccaaaaccgcggcgtcagcaaggccaagtgcctccccgctccaacaacggtggtaaggatgtcattcggggtcgtgtgaaccacgtgacggccgaggacgtgctgacaactccagatgtcatcgttggtacgttcctcattcattccatccctgctaccattttgttcgactctggagcttcccactcgtttatatctgtgccattcgtgggaagaaatcagttgggggtagaaaggcttaggaaccctctgctcatcaccacccctggaggggttatgacagcaaagtattatagtcctgccgtccctatagaaattcaggggattccttttccctcggatttgattctgctagacaccaagaacttggatgtgatccttgggatgaattggttggctcaattccaaggagtagtggattgcgcgagacgcactgtcactctgtaccgaggtccggaacaaccggttgttttctttgcacccccaacctctgtcaggagttcagaactgcatcagataggactgtcagaaatccccatcgtcagggagttcggagatgtgtttccggaagaactacctggtatgccgcccaagcgagagattgagttccgaatagatcttgctccaggaaccattcctctgtacaagcgaccctaccgtatggcagcaaatgaactggccgaagttaagaaacagttggaagagttgacagaaaaggggtatatacgtccgagcacttccccctggggtgctcctgtgatttttgtggagaagaaagacaagacgaagaggatgtgcgttgactacagagctctcaatgaagtcaccatcaaaaacaagtaccctcttccccggatcgatgatctgttcgatcagcttaaaggtgccactgtattctctaagatcgatcttcgttccggatatcaccaattacgtattcgtgaagaagatattccgaagaccgcattcaccacgcgatacggactgtatgaattcacggtgatgtcattcggtttaaccaatgcacctgccttcttcatgaacttaatgaacaaagtgttcatggaatacttggataagtttgttgtggttttcattgatgacattctgatatactcacaatcggaggaagaccatcagcaccatctccgcctggtgttgggaaagttgcgggaacatcaattgtatgccaaacttagcaagtgtgagttctggttgtccgaagtcaaattcttagggcacgtgatatctgctaaaggtgttgctgtggaccccgaaacagtgaccgctgtcactgattggaagcaatccaaaacagtcactcaagttcgcagtttcttaggtttggcaggatactaccggaggttcatcgagaacttctccaaaatcgctcgacccatgacacagttgttgaagaaagaagagaaatttgtgtggagcccgcaatgcgagaaggcgttcaaaactctcaaagaaaagctggttgcctcgccagtgttaatcttgccggatactcgcaaggatttcatggtgtattgtgacgcttcgcgccaaggattggggtgcgtgctcatgcaggacggtcatgtggtggcctatgcctcacgccagctacggccccatgaaggcaactaccctacccatgacttggagttagccgcggtggttcatgctctaaaaatctggcggcactacctcattgggaatcgctgtgaaatatatactgatcataagagtttgaaatacatcttcactcagtcggacctgaatcttcggcagaggagatggttagaactcatcaaggattatgatgtgggaattcactatcatcctggtaaggccaacgtggtcgctgacgctctaagtcgaaagagccattgcaacactcttaacatctgtggcattccacccgaacttaatcaacagatggcagcccggaacctaagcatagttagtcgtggattcttggctgcgttggaagccaagcctaccttgctcgatcaaatccgcgaggctcagaagaatgatccggacatgcatggactcctcaagaatatgaaacagggtaaagccgctggtttcacagaggatgaacacgggaccctatggaatggaaatcgggtatgcgttccaaataacagagaacttaaacagctgatacttcaggaagctcacgaaagtccttattccatccaccctggcagtacgaagatgtacttagacttgaaggagaaatactggtgggttagtatgaagcgggaaattgcagagttcgtggccctttgtgatgtgtgccagcgtgtcaagcaagagcacaacggacgggcgggacttctccaacctctccaagtaccagaatggaaatgggatgaattgggatgggatttcatcaccggacttccaanaacccaaggtggatatgattctatatgggtagttgtggatcgattaacaaaggtagctcgatttattcctgtgaagaccacctatggagggaccaaactagccgaactctacttcgctaggatcgtgagtcttcatggcgttcccaagaaaatcgtatctgataggggaagccaattcacctctcacttttggaagaagctccaagaagagctgggtaaatcagatcctagaagatatgcttcgcgcatgtgtcctagattttgggaagacctgggataagagtctcccctatgccgagttctcctacaataacagctaccaggccagtatacaaatggcaccttatgaagcgttgtacgggcgcaaatgccggacaccgctattgtgggaccaagttggggaaagccaagtgttcgggactgatatcctgagggaagctgaagctaaagtcagaaccattcgggataatctaaaagtggcacagtcccggcagaaaagttatgcagataaccgtcgccgtgacctggaattcgcagtgggtgactttgtgtatcttcgggtcacgccattgcgaggtgtacacaggtttcagacaaaagggaagctcgcacctcggtatgtgggtcctttccgtatcattgctcggcgcggagaagtcgcttaccagttggagctgcccgcctccttgggcaacgtgcatgatgtgttccatgtgtcgcaactcaagaaatgtctccgagtgccatccgagcaggccgactcagcgcaaattgaagttcgcgaagacttgacctacgtggagaggccagtgaaaatcctggacaccatggagcgcaggaccaggaaccgggtaatccgtttttgcaaggtccaatggagcaaccacgccgaggaagaagctacctgggagcgtgaagacgagctgaaggcggcccatcccgatctcttcgccagttcttccgaatctcggggtcgagattccgtt

SEQ ID NO: 5367 - DNA, 247 bp, Oryza sativa
  Clone ID: PAT_MRT4530_12161C.1
aaagaaagaaaattttatttctatttatatcaccttaagtttcacatgtcacatacgatgatacctgagcttattttttcacttccgaactacaattttgggaaaattcagtacaagacaccgccaaggggggtaatgctaccgggtgcactattgtacctagggtagataccatttgtagatgggaagttaaaagccaacagtgtttgagcttgagccaaattccggtcaatgtaaaaatcgccaa

SEQ ID NO: 5368 - DNA, 5340 bp, Oryza sativa
  Clone ID: PAT_MRT4530_12162C.1
atgtcatggcacagggccggtgtcctgctgctaggggctcagtcctgcctgcctgtcccgggggttccggccgtaggaggaatggttggcctgggttggcttgggacgagctgggacccagggtcgggttgccggttcggtctgaatcatcgtaggccttgggttaaggcagatggccggcagcatcagccgtcgtggtctggacctgactggtttcgtcttggagctgtggggcatggcaggccgctcccggagcaggagggtgacgatgcagagccccacgctgcttgggaggttactgcagtgatcctcactagctcacccgagaggacttcgttggcagtcaccgcgggtggagattctttctccgccgcttgccagaacgccgctctcctcgccatcggcactcttcaccagcgctacccggacgagttgcagcactcgccctaccgctaccaccctcgccacggaggagcccgcgacttcgccaccttccgggatgctagctcggaggatgacgctaccatcatgcacctggcgcgcatggtggaggcgtacgacgcgacttgtatcgacttccatcagatggtgcgccgtgggatggtcgagaacaacatgaagatcctggagccgcgtcaggagaatctgcagctgaagaaggacctagacgcagtggaggcgcagctgcatcagctcaagatcgcccagggagaggtctgtcgccccaagcgtcgccgcgtctgccgcagccagaagatcaccgcccgcaagagcacctccaggcccgagcttgttcgtcagtccctggcgtggacttgcttcgttcagacccctcgtgccgagcccgcgcccgtggttcctcaggagggggaagcctccggcgttggtagcacggaggatgcgctgttgctcaccttccgtcctggcccgtcgcagcggagaagtgctaataccggtgatggcaaccaacctgagggcagcaaccacaacaaccatggcagcccacctccacctcctcctccgcctccaccaccaccaccagacaccaacgccattctcacccaaatcctcgcccagcaggcctacatgatgactgctttcctccaccacctccaaaatccgccacaacagaatgctccaccaccacccccacaacactctaaactcgccgagttcctccgcatccgtccacctaccttctctagctccaacaaccccgtggatgcgttggattggttgcatgccgtggggaaaaagctagacaccgtgcagtgcagcgatgaggagaaagtcgtcttcgccgcccaccgactgcaggggcccgcatctctatggtgggaccatttccaggctacgcagccagaggggcagcctattacttgggcccgcttcaccgccgccttccggaggacccatgtgcccgccgaagtcatggcccttaagaaaagggaattccgagagttgaagcaaggcaaccgctccgtgatggagtatttgcatgagtttaacaacctggcccggtacgccccggaggatgtacgggaagatgaggaaaagcaggagaagttcttggcaggaatggaccctgagctgtccgtgcgtctagtctccggtgactatccggatttccaacgtctggtggacaagagcatccgcttggaagccaagcacaaggaactagagtcgcacaagcgccgcttggcgaatttccgcaatcaacagggtgctaaccaaagggtccgctacaccaatccctatccagggggatcgtcctcgcagcagcaacagcagcaacaacctcgctccgcgccccgacctcaattcgtggtgcgcgtcccacagccgcagcaacagcagagtcaacaagggactcgtgcgacccgtcctcctatgccagccgtgcagcctggtcaaggccgcagggacgttcaaggtccgcagcgtctgtgcttcaactgcttcgagcccgggcactttgcggataaatgcccgaagccgaggcgccagcaaggccaaccgcctccccgctccaacaacggtggtaaggatgtcattcgggatcgtgtgaaccacgtgacggccgaggacgtgctgacaactccagacgtcatcgttggtacgttcctcattcattccatccctgctaccattttgttcgactctggagcttcccactcgtttatatcggtgccattcgtggggagaaatcagttgggggtagaaaggcttaggaaccctctgctcatcaccacccctggaggggttatgacagcaaagtattatagtcctgccgtccctatagaaattcaggggattccttttccctcggatctgattcttctagacaccaagaacttggatgtgatccttgggatgaattggttggctcaattccaaggaatagtggattgtgcaagacgcactgtcactctgtaccgagggccggaacaaccggttgttttctttgcacccccaacctctatcagtagttcagaacttcatcagataggactgtcagaaatccccatcgtcagagagttcggagacgtgtttccggaagaactacccggtatgccgcccaagcgagagattgagttccggatagatctttctccaggaaccactcctctgtacaagcgaccctaccgtatggcagcaaatgaactggccaaagttaagaaacagttggaagagttgaaagaaaaggggtatatacgtccgagtacttccccctggggtgctcctgtgatttttgtggagaagaaagacaagacgaagaggatgtgcgttgactacagagctctcaatgaagtcaccatcaaaaacaagtaccctcttccccggatcgatgatctgttcgatcagcttaaaggtgccacggtattctccaagattgatcttcgttccggatatcaccagttgcgcatccgtgaagaagatattccgaagaccgcattcaccacgcgatacggactgtatgaattcacggtgatgtcattcggtttaaccaatgctcctgccttcttcatgaacttaatgaagaaagtgttcatggaatacttggataagtttgttgtggttttcattgatgacattctggtatactcacaatcagaggaagaccataagcaccatctccgtctggtgttggggaagttgcgggaacatcaattgtatgccaaacttagcaagtgtgagttctggttgtccgaagtcaaattcttagggcacgtgatatctgctaaaggagttgctgtggaccccgaaacagtgaccgccgtcactgattggaagcaacccaagacagtcactcaaattcgcagtttcttaggtttggcaggatactaccggaggtttatcgagaacttctccaaaatcgctcgacccatgacacagttgttgaagaaagaagagaaatttgtgtggagcccgcaatgcgagaaggcgttccaaactctcaaagaaaagctggtttcctcgccagtgttaatcttgcaggatactcgcaaggacttcatggtgtattgtgacgcttcgcgccaaggattggggtgcgtgctcatgcatgacggtcatgtggtggcctatgcctcacgccagctacggcctcatgaaggcaactaccctacccatgatttggagttagccgcggtggttcatgctctaaaaatctggcggcactatctcattgggaatcactgtgaaatatatactgatcataagagtttgaaatacatcttcacccagtcggatctgaatcttcggcagaggagatggctagaactcatcaaggattatgatgtgggaattcactatcatcctggtaaggccaacgtggtcgccgacgctctaagtcgaaaaagccattgcaacactcttaacgtccgtggcattccacccgaacttaaccaacagatggaagccctgaatctaagcataaatatgaaacagggtaaagccgctggtttcacagaggatgaacacggaaccctatggaacggaaatcgggtatgcgttccagataacagagaacttaaacaactgatacttcaggaagctcacgaaagtccttattccatccaccctggcagtacgaagatgtacttagacttgaaggagaaatactggtgggttagtatgaagcgggaaattgcagagttcgtggccctttgtgatgtgtgccagcgtgtcaaagcagagcaccaacgaccggccggacttctccaacctctccaagtaccagaatggaaatgggatgaaattgggatggatttcatcaccggacttccaaaaacccaaggtggatatgattctatatgggtagttgtggatcgattaaccaaggtagctcgatttattcctgtgaagaccacctatggagggaacaaactagccgagctctacttcgctaggatcgtgagtctccatggcgttcccaagaaaatcgtatctgataggggaagccaattcacctctcacttttggaagaagctccaagaagagctgggtacccgattaaatttcagcaccgcgtatcacccgcagacggatggacagaccgagcatctaaatcagatcctagaagatatgcttcgcgcatgtgtcctagatttcgggaagacctgggataagagtctcccctatgccgagttctcctacaataacagctaccaagccagtatacaaatggcaccttatgaagcgttgtatgggcgcaaatgccggacaccgctcttgtgggaccaagttggggaaagtcaagtgttcgggactgatatcctgagaaaagctgaagcgaaggtcagaaccattcgggataatctaaaggtggcacagtcccggcagaaaagttatgcagataaccgtcgccgtgacctggaatttgcagtggacgattttgtgtaccttcgggtcacgccattgcggggtgtacacaggtttcagacaaaagggaagctcgcacctcggttcgtgggtcctttccgtatcattgctcggcgcggagaagtcgcttaccagttggagctgcccgcctccttgggcaacgtgcatgatgtgttccatgtgtcgcaactcaagaaatgtcttcgagtgccatccgagcaggccgactcagagcaaattgaagttcgcgaagacttgacctacgtggagaggccagtgaaaatcctggacaccatggagcgcaggaccaggaaccgggtaatccgtttttgcaaggtccaatggagcaaccacgccgaggaagaagctacctgggagcgtgaagacgagctgaaggcagcccatcccgatctcttcgctagttcttccgaatctcggggtcgagattccgtttaa

SEQ ID NO: 5369 - DNA, 765 bp, Oryza sativa
  Clone ID: PAT_MRT4530_12163C.1
atgaccaacgcaggaagcacccccaccattgatgatggatatggaggggttgggatggaggcggagggggacgtggaggaggagatgatggcgtgcggcggcggcggggagaagaagcggcggctgagcgtggagcaggttcgcgcgctggagcggagcttcgaggtggagaacaagcttgagcctgagcggaaggcgcggctggcgcgcgacctcggcctgcagccgcgccaggtcgccgtctggttccagaaccgccgcgcgcggtggaagaccaagcaaacacttgcaagcgactcaagcgcggtgctgaacgacgtggacgcggccggcgccgcgcccgcggcgacggacgcgctggctccggaggcgtgcacgtttctcggcgcgccgcccgccgcgggcgcgggcgcgggcgcagcggcggcggcgagccacgaggaggtgttcttccacggcaatttcctcaaggtggaggaggacgagacggggttcctcgacgacgacgagccgtgcggcgggttcttcgccgacgatcagcccccgccgctgtcgtcgtggtgggccgagcccacggagcactggaattgaagcaaatccggggtaaccgcagccgagagaaagagttggaaaacattatgcctgggggaataaagaattttgcaggaaagcagggttttatctgcaattttgtaaaaaaaatggccctgctgacttatgtagtagttcactcgattgcttcgatatttatgtttcaattccaag

SEQ ID NO: 5370 - DNA, 6010 bp, Oryza sativa
  Clone ID: PAT_MRT4530_12164C.1
atggcggccggatcttccgcgcccgtttccccctcgtccggccgccctctcccactcccaaccctatataaaccttccccgtgcctccctccaccgtttccgccactcgccgctctctctccccgccggaatcgagctcgcgccatcgctctctctctccgccgtcgccgccgagctccggtccgccgccgtcgtcgccccggaccttctcccgcttcggcgtcaccttcttcgggttcgccgcaacctcgccgacctcgtccacctctccgtttcggtcgccgaccgccggaacgccgccgtccccgtcgacccgagccgcgccgccgcctctatccgctccggtcgccgttcccgtcgtcgccgtcgacccggggtgagccgtggatcgccgattcgtttcccccttccctcccctctctcgggcaccgctccgccgcgccggtggtcgccggcggcgaccatcggggcacgagtgcgccgcctcccgtcggctgtgccggcgtggccgccttcgggcgcgccccgcggctgccgcgtggggcccggccgtcagccgcccgcgccctcgggtgcggctgacgcgtgggacccacggcgccggtcggtgcgagcccgggtgcacccggtccaccgtggacccaccttggccatataaggaccggtcttcgggcctctgttgcaaagcactaccgtacttccacatgtctagtgggacaaatgaaggctacacgagctacggcccggtagtcgagatgtcatggcacagggccggtgtcctgctgctaggggctcagtcctgcctgcctgtcccggaggttccggccgtaggtgggattgggtcgatgtacacctctgatcagagtataatctattcgaatagccgcgccctcggttatgggcaagccgagcaatgtacccaaatggccggcagcatcagccgtcgtggtctggacctgactggtttcgtcttggagctgcggggcatgtgcgttgtcctggggtatccacatggagtggactaccagggcaggccgcttccggagcaggagggtgacgatgcagagccccacgctgcttgggaggttactgcagtgatcctcactggctctcccgagcggacttcgttggcagtcaccgcgggtggagattctttccccgccgcttgccagaacgccgctctcctcgccatcggcactcttcaccagcgctacccggacgagttgcagcactcgccctaccgctaccaccctcgccgcggaggagcccgcgacttcgccaccttccgggatgctagctcggaggatgacgctaccatcatgcacctggcgcgcatggtggaggcgtacgacgcggctcgtatcgacttccatcagatggtgcgccgtgggatggtcgagaacaacatgaagatcctggagctgcgtcaagagaatctgcagctgaagaaggaactagacgcagtggaggcgcagctgcatcagctcaagatcgcccagggagaggtctgtcgccccaagcgtcgccgcgtctgccgcagccagaagatcaccgcccgcaagagcacctccaggcccgagcttgttcgtcagtccctggcgtggacttgcttcgtcgagacccctcgtgccgagcccgcgcccgtggttcctcaggagggggaagcctccggcgttggtagcacggaggatgcgctgttgctcaccttccatggtgacgaccaggagaagtgctaataccggtgatggcaaccaacccgaaggcagcaaccacaacaaccatggcagtccacctccacctcctcctccgcctccaccaccaccaccagacaccaacgctattctcacccaaatcctcgcccagcaggccaacatgatgactgctttcctccaccacctccaaaatccgccacaacagaatgctcctccaccacccccacaacactgtaaactcgccgagttcctccgcatccgtccaccaaccttctctagctccaataaccccgtggatgcgttggattggttgcatgccgtggggaaaaagctagacactgtgcagtgcagcgatgaggagaaagtcatcttcgccgcccaccagctgcaggggcccgcatctctatggtgggaccatttccaggctacacagccagaggggcagcctattacttgggcccgcttcaccgccgccttccggaggacccatgtgcccgccggagtcatggcccttaagaaaagggaatttcgagagttgaagcaaggcaaccgctccgtgatggagtatttgcatgagttcaacaacctggcccggtacgccccggaggatgtacgggaagatgaggaaaagcaggagaagttcttggcaggaatggatcctgagctgtccgtccgtctagtctccggggactatccggatttccaacgtctggtggacaagagcatccgcttggaagccaagcacaaggaactggagtcgcacaagcgtcgcttggcgaattttcgcaaccaacagggtgctaaccaaaggatccgctacaccaatccctatccagggggatcttcctcgcagcagcaacagcagcaacaacctcgctccgcgcctcgacctcaattcgtggtgcgcgtcccacagccgcagcaacagcagagccagcaagggacccgtgcgccccgtcctcctacgccagccgcgcagtctggacaaggccgcagggacgcttcaaggtccgcagcgtctgtgcttcaactgcttcgagcccgggcactttgcggataaatgcccgaagccgaggcgccagcaaggccaagcgcctccccgctccaacaacggtggtaaggatgtcatttggggtcgtgtgaaccacgtgacggccgaggacgtgctgacaactccagacgtcatcgttggtacgttcctcatccattccatccctgctaccattttgttcgactctggagcttcccactcgtttatatctgtgccattcatggggagaaatcagttgggggtagaaaggcttaggaaccctctactcatcaccacccctggaggggttatgacagcaaagtattatagtcctgccgtccctatagaaattcaggggattccttttccctcggatctgattcttctagacaccaagaacttggatgtgatccttgggatgaattggttggctcaattccaaggagtagtggattgtgcaagacgcactgtcactctgtaccgagggccggaacaaccggttgttttctttgcacccccaacctctgtcagtagttcagaacttcatcagataggactgtcagaaatccccattgtcagagagttcggagacgtgtttccggaagaactacccggtatgccgcccaagcgagagattgagttccggatagatcttgctccaggaaccactcctctgtacaagcgaccctaccgtatggcagcaaatgaactggccgaagttaagaaacagttggaagagttgaaagaaaaggggtatatacgtccgagtacttccccctggggtgctcctgtgatttttgtggagaagaaagacaagacgaagaggatgtgcgttgactacagagctctcaatgaagtcaccatcaaaaacaagtaccctcttccccggatcgatgatctgttcgatcagcttaaaggtgccacggtattctccaagattgatcttcgttctggatatcaccagttgcgcatccgtgaagaagatattccgaagaccgcattcaccacgcgatacggactgtatgaattcacggtgatgtcgttcggtttaaccaatgctcctgccttcttcatgaacttaatgaacaaagtgttcatggaatacttggataagtttgttgtggttttcattgatgacattctggtatactcacaatcagaggaagaccatcagcaccatctccgtctggtgttgggaaagttgcgggaacatcaattgtatgccaaacttagcaagtgtgagttctggttgtccgaagtcaagttcttagggcacgtgatatccgctaaaggagttgctgtggaccccgaaacagtgaccgccgtcactgattggaagcaacccaagacagtcactcaaattcgcagtttcttaggtttggcaggatactaccggaggttcatcgagaacttctccaaaatcgctcgacccatgacacagttgttgaagaaagaagagaaatttgtgtggagcccgcaatgcgagaaggcgttccaaactctcaaagaaaagctggtttcctcgccagtgttaatcatgccggatactcgcaaggacttcacggtgtattgtgacgcttcgcgccaaggattggggtgcgtgctcatgcaggacggtcatgtggtggcctatgcctcacgccagctacggcctcatgaaggcaactaccctacccatgatttggagttagccgcggtggttcatgctctaaaaatctggcggcactatctcattgggaatcgctgtgaaatatatactgatcataagagtttgaaatacatcttcacccagtcggatctgaatcttcggcagaggagatggttagaactcatcaaggattatgatgtgggaattcactatcatcctggtaaggccaacgtggtcgccgacgctctaagtcgaaaaagccattgcaacactcttaacgtccgtggcattccacccgaacttaatcaacagatggaagccctgaatctaagcatagtgggtcgcggattcttggctgcgttggaagccaagcccaccttactcgatcaaatccgcgaggctcagaagaacgacccggacatgcgtggactcctcaagaatatgaaacagggtaaagccgctggtttcacagaggatgaacacggaaccctatggaacggaaatcgggtatgcgttccagataacagagaacataaagagctgatacttcaggaagctcacgaaagtccttattccatccaccctggcagtacgaagatgtacttagacttgaaggagaaatactggtgggttagtatgaagcgggaaattgcagagttcgtggccctttgtgatgtgtgccagcgtgtcaaggcagagcaccaacgaccggccggacttctccaacctctccaagtaccagaatggaaatgggatgaaattgggatggatttcatcaccggactttcaaaaacccaaggtggatacgattctatatgggtagttgtggatcgattaaccaaggtagctcgatttattcctgtgaagaccacctatggagggaacaaactagccgagctctacttcgctaggatcgtgagtctccatggcgttcccaagaaaatcgtatctgataggggaagccaattcacctctcacttttggaagaagctccaagaagagctgggtacccgattaaatttcagcaccacgtatcacccgcagacagatggacagaccgagcgtctaaatcagatcctagaagatatgcttcgcgcatgtgtcctagatttcgggaagacctgggataagagtctcccctatgccgagttctcctacaataacagctaccaagccagcatactaatggcaccttatgaagcattgtatgggcgcaaatgtcggacaccactattgtgggaccaagttggggaaagccaagtgttcgggaccgatatcctgagagaagctgaagctaaagtcagaaccattcgggataatctaaaggtggcccagtctcggcagaagagttatgcagacaaccgacgccgtgacctagaattcgcagtggatgactttgtgtatcttcgggtcacgtccttgcgaggtgtacacaggtttcagacaaaggggaagctcgcacctcggtttgtgggtcctttccgtatcattgcacggcgcggagaagtcgcttaccagttggagctgcccgcctccttgggcaacgtgcatgatgtgttccatgtgtcgcaactcaagaaatgtcttcgagtgccatccgagaaggccgactcagagtaa

SEQ ID NO: 5371 - DNA, 1852 bp, Oryza sativa
  Clone ID: PAT_MRT4530_12165C.1
ccacgcgtcccggaaaccgagaaagagagagagagagagagaggtagggagggaagaagagtcactccacactccacactctcatcccctggtccctttcttggatcatgagaaaccgcgcaacaaaattgcaattctaggcagcatttggaccggggacttggctacgtggtgtttggccatggatcgcagcgtggaattaagaccggcgaggactcagcgacggaggcacccgcgtcattcctacgcttctgtgcccgtcgtcttctcgcagtgagagagagagagagatcgaccaggcgttcactgaattttactagaactcggcatgaagcgacccggcggtgccggcggcggcggaggcagcccatcgctcgtcacgatggctaattctagtgatgatggatatggaggggttgggatggaggcggagggggacgtggaggaggagatgatggcgtgcggcggcggcggggagaagaagcggcggctgagcgtggagcaggttcgcgcgctggagcggagcttcgaggtggagaacaagcttgagcctgagcggaaggcgcggctggcgcgcgacctcggcctgcagccgcgccaggtcgccgtctggttccagaaccgccgcgcgcggtggaagaccaagcagctcgagcgcgactacgccgcgctccgccattcctacgactccctgcgcctcgatcacgacgcgctccgccgcgacaaggacgccctcctcgccgagatcaaggagctgaaggcgaagctcggggacgaggaggcggcggcgagcttcacgtcggtgaaggaggagccggcggcctccgacgggccaccggcggcgggatttgggtcgtccgacagcgactcaagcgcggtgctgaacgacgtggacgcggccggcgccgcgcccgcggcgacggacgcgctggctccggaggcgtgcacgtttctcggcgcgccgcccgccgcgggcgcgggcgcgggcgcagcggcggcggcgagccacgaggaggtgttcttccacggcaatttcctcaaggtggaggaggacgagacggggttcctcgacgacgacgagccgtgcggcgggttcttcgccgacgatcagcccccgccgctgtcgtcgtggtgggccgagcccacggagcactggaactgaagcaaatccggcgtaaccgcagccgagagagagagttggaaaacactatgcctgggggaataaagaattctgcaggaaagcagggtcttatctgcaattttgtaaaaaaaatggacctctacgtacttctctagtctcttttgccaattctcgcgcacattagctgtagcactgcagtgtagtaaaatcctactactccattacctctccaatttctagctctcacttccctacttaaactcatctgagctctaatgtaagcatatgccatccaaaatggaccataaatatgtcactagcagtaggatggtaattaggacttaaaaaaaaaaaaaaaaaaaaaaaaaaagctgcggaagcagcccatacatcgccacgatggctgattagagcgatgactgatatgggaggctcgtgctcaaggtcaccgacaaccacgagtgcttgaagtttaagacagatcaagctcaggatgcatagaagatggaaaaactgaacaccattttttttactctcatgacccatggacctgatgctgatataagtgatgtttcggggaaggaacaggctgaacaacagcattcatagaaaggccggggcaggaggcagcagtgtattgggtctgtcttgattttgttcaaagtaatcataactggaatgggggttgggactatttggctctttgattgc

SEQ ID NO: 5372 - DNA, 469 bp, Oryza sativa
  Clone ID: PAT_MRT4530_12166C.1
gtttttgtttttttttttttttttttttttatttttttttttttttttttttttttttttttttttttttttttattttttatttttttaatatatattttatttaaatttttaatttttttttgaaaaaaattttttttttaattattaaatgggtttgatttttaaatttttttaattttttaaaagacctataatgtgaaaaaactataaaggacagttaatgatatttattattaaaagcaccgaattcttcccgactaatttctaaaacccgaaaattccggaactatatttccatatattcaaacttttaatattttgactttatttagagctttgctaatttatggtaaaaaatgttatattttaaaaattgttaaaaatttacaatcccaaacaataaacgaaaaagaatggtgaacctaataacctagaaaacttaaataaagagcttaatgacaaaaat

SEQ ID NO: 5373 - DNA, 1170 bp, Oryza sativa
  Clone ID: PAT_MRT4530_12167C.1
atgaggcgcacaatagctatttcgagaaaacaaaacctccaaaaggcaaagggaatggaggtggttgatctggtctcgtccgactccgagtccgaggaagaggacgaggcgcgcgtgcactcgcccgatcggaagcgcgctgcctgcgaggcggatccaagaaccgagtcggagagcttcctcgagcgggagaggatggcgaggctgctgcatcggcatccgcatccgcatccgccgccgagccaggaagtgaagaagggcaaggagaaggtcggcgagggggagatgctggagagagcggtgtcggcgcctgttgatcctttgatcggctcccgtggctgtacattgggagcgggaggcgaaagcaagcctggagatgggggaaatggcggatcaatctccgcgcctcaggatgaatcagacagcaaggggttgcaggagggacatggacagcacgggctgcttcacagtggttccggcacgccggatgacaagtggaaggggattcttggtgcgaggcccgctgatcctgctgtcgacaaactgtcgcattcgcgggacaatggcaagagagaagatgaggttccaatgcatgaaccaagctctgtagccactaatgaagttactggagctggtgatgtttccatggaagatggtagctccacatggctatcgaggatcaaggggctcaactacccacttcttgatgagaatcagttaagaaccagacaaattgaatccgatgaggagtttgcacgcaggcttcaggagcagttaaacaaggagcagccaggctcgcaaaacttagaagaggttgatacaacactagcctggacattgcaagaggaagatgtggaacacgctagaaatgctgtcagagagggccaatctagctctcgcatggcaatactggattcactcgaagaagcatttggaaacttcggagaggaatttatgtcagaatctgatgatgatgactatgagagcctaataagacttgatgacaacaaccatcacaggggtgcttctgacattcaaataaacaacctgccactatctgtagttgagcttggcatcttctctgaatatctgccttctcttccacagtgcattgacaaatggcttcggatgaggatttcatgcccagtatgcaaatctgaggtgatctga

SEQ ID NO: 5374 - DNA, 1401 bp, Oryza sativa
  Clone ID: PAT_MRT4530_12168C.1
atgggttttatagtgacgtactcgtgcctatcaaagctagcatggagcataattttaagtcgtatttcactatcagcaccctcaaagatcattagcctgcaattcttggaaatcactgccttcgtcggggtctacctgaacctgatagtgtaccttcaggacgttcttcatggcgacactgcttcgaacgtggcgacgagcgccgactgcgtcccggcgacgctcagccaggagctggtcttcttcacgggcataatatacctctgcgccttggggatcggcggcgccaaggccgtgctgatcgcgttcgggccggagcagctcgacgacggcggcggcggcggcgagaaggagaggaaggcgtcctacttcagctggtactacgcggtggccaacgtgggcatgcttacggcggggacgctgctggtttgggtggaggacaaggtgagctgggggctcgggtacggcctgtgcgcgtcgttcgtcgcggtcgccgtcgccgtcctcgccgcgacggcgcccatgtaccggatcctgcccccggcggcgccggcgagcagcccgttgaagagcgtgctccaagtgcttgttgtggcattctctcacaaggcaaaattgactttgccggacgatccaactgagctgtacgaggacgacggcgtcaagaagacaagaactcgttgctgcatccggtgtttggacaaggctgccattgtcggcgacgaggatctggaagacggcgacacgcgcgcggcggaggctgtgcacggtgacccaggtggaggagatgaagattctgctgcggctgatcccgatatggctcacgtcggcgggccgtggcgcccgccgctgcagctcatggggttcgggcacgcgacggcggccgtcgcggcgggcgtggccgcgtgcgccgaggcgcgccggctgcgcgcgtccatgggcatcgccgtcgcgtggctgctgccacagtacctcgcgatggccgcctccgacgcgtcgctcaccgtcggacagctggagttcttctacggccagtcgccggagacgatgaggagcgcgtcgacggcgttctgcttcctctcctactcgctcgggaacctgcacaactcccagctggtgactctggtgtcgaaggcagcagcgggaggtgaggggagatggcgacacagaggaagaaggcgtaggcggcgagggctggacaagatggaaggtggcggacttcctgcaccagagcctagcatcgcggaggtgggcgggcgccgtgcggaggaaccgatggcctggttgtcgacaacacccgcgttggtgacggtcgagaaggagcaggacctacatgcagccactgccgttccacctctgttgacgacagcaggaggaggaagaagaggaacagagaaatag

SEQ ID NO: 5375 - DNA, 5442 bp, Oryza sativa
  Clone ID: PAT_MRT4530_12169C.1
ggaaaaagggatttattgcgtcagcggctagggtttcacggtggaccgggcgcacggcgacggttcacgcgaacggacggccgagatcgatccatccaaaacggacggccgagatcgatcggtccacgaccggctcacgggagacggggacgatgacgtcagcgatgacgtcaccaccggcggcggcggctcggcggctcggacggcgcacgctcgccggcgaacggcggctcggtgaccaaagaagcagcggagaagcaacggacagcgccggcgacgaggaagaagcgacggcggagatcgggttgacggcggcgacggagctccggcggtcttcggcggtggcgaagcggtggacggggatggcgacgactttgcgaacccgatggtggcgacggcgaccgacgacggcggctgcaacgacggcggcgactagggctacgcggaggcggcgctagacgcgacggcaggctaaggcaaaggaggcgacggaaggccggcagcgtcacccgtcgtggtttggacatgactggtttcgtcttggagctgcggggcatgtgcgtggtcctagggtatccacatggagtggactaccaggccaggccgcttccggagcaggagggtgatgacgcagagccccacgctggttgggaggttactgcagtgatcctctctggctctcccgagcggacttcgctggcagtcaccgcgggtggggattccttccccgccgcttgccagagcgccgctctcctcgccatcggcactcttcaccagcgctacccggacgagttgcagcactcgccctaccgctaccaccctcgccgcggaggagcccgcgactacgccaccttccgggatgctagctcgaaggatgacgctaccatcatgcacctggcgcgcatggtggaggcgtacgacgcggctcgtatcgacttccatcagatggtgcgccgtgggatggtcgagaacaacatgaagatccaggagctgcgtcaggagaacctgcagctcaagaaggacctagacgcggtggaggcgcagctgcatcagctcaagatcgcccagggagaggtctgccgccccaagcgccgccgcgtctgccgcagccagaagatcaccgcccgcaagagcacctccaggcccgagcttgttcgtcagtccctggcgtggacttgcttcgtggagacccctcgtgccgagcctgcgcccgtggttccccaggagggggaagcctccggcgttggtagcacggaggatgcgctgttgctcaccttccgccctggcccgtcgcagcggagaagtgctaataccggtgatggcaaccaacccgaaggcagcaaccaccaccaccagggcagcccacctccacctcctcctccgcctccaccaccaccgccagataccaacgccattctcacccaaatcctcgcccagcaggccaacatgatgactgctttcctccaccacctccaaaatccgccacaacataatgctcccccgccacctccccaacactctaaactcgccgagttcctccgcatccgcccacctaccttctctagctccaacaaccccgtggatgcgttggattggttgcatgctgtggggaaaaagctagacactgtgcagtgcagcgatgaggagaaagtcatcttcgccgcccaccaactgcagggactcgcatctctatggtgggaccatttccaggctacgcagccagaaggacagcctattacttgggctcgcttcaccgccgctttccggagaacccatgtgcccgccggagtcgtggcccttaagaaaagggaattccgagagttgaagcaaggcaaccgctccgtgatggagtatttgcatgagttcaacaacctggcccgttacgccccggaagatgtgcgggaagatgaggagaagcaagagaagttcttggcaggaatggaccctgagctgtccggtgctaaccaaagggtccgctacaccaatccctatccagggggatcctcctcgcagcagcaacaacagcagcagcagcctcgctccgcgcctcgacctcaattcgtggtgcgcgtcccacagccgcagcagcagcagaatcaacaagggactcgtgcgccccgtcctcctacgccaactgtgcagcctggtcaaggccgcagggacgctcaaggtccgcagcgtctgtgcttcaattgcttcgagcctgggcactttgcggataaatgcccaaagccaaggcgacagcaaggccaagcgcctccccgctccaacaacggtggtaaggacgtcattcggggtcgtgtgaaccacgtgacggctgaggacgtgctgacaactccagacgtcatcgttggtacgttcctcgttcattccatccctgctaccattctgttcgactctggagcttcccactcgtttatatctgtgccattcgtggggagaaatcagttgggggtagaaaggcttaggaaccctctgctcatcaccacccctggaggggttatgacagcgaagtattatagtcctgccgtccctatagaaattcaggggattccttttccctcggatctgattctgctagacaccaagaacttggatgtgatccttgggatgaattggttggctcaattccaaggagtagtggattgcgcgagacgcactgtcactctgtaccgaggtccggaacaaccggttgttttctttgcacctccaacctctgtcagtagttcagaactgcatcagataggactgtcagaaatccccatcgtcagggagttcggagacgtgtttccggaagaactacccgttatgccgcctaagcgagagattgagttccggatagatcttgctccaggaaccactcctctgtacaagcgaccctaccgtatggcagcaaatgaactggccgaagtcaagaaacagttggaagagttgaaagaaaaggggtatatacgtccgagcacttccccctggggtgctcctgtgatttttgtggagaagaaagacaagacgaagaggatgtgcgttgactacagagctctcaatgaagtcaccatcaaaaacaagtaccctcttccccggatcgatgatctgttcgatcagcttaaaggtgccactgtattctccaagattgatcttcgttccggatatcaccaattacgtattcgtgaagaagacattctgaagaccgcattcaccacgcgatacggactgtatgaattcacggtgatgtcattcggtttaaccaatgcacctgccttcttcatgaacttaatgaacaaagtgttcatggaatacttggataagtttgttgtggttttcattgatgacattctggtatactcacaatccgaggaagaccatcagcaccatctccgtctggtgttgggaaagttgcgggaacatcaattgtatgccaaacttagcaagtgtgagttctggttgtccgaagtcaaattcttagggcacgtgatatctgctaaaggagttgcggtggaccccgaaacagtgaccgccgtcactgattggaagcaacccaagacagtcactcaagtccgcagtttcttaggtttggcaggatactaccgaaggtttatcgagaacttctccaaaatcgctcgacccatgacgcagttgttgaaaaaagaagagaaatttgtgtggagcccgcaatgcgagaaggcgtttcaaactctcaaagaaaagctggtttcctcgccggtgttaatcttgccggatactcgcaaggatttcatggtgtattgtgacgcttcgcgccaaggattggggtgcgtgctcatgcaggatggtcatgtggtggcctatgcctcacgccagctacgacttcatgaaggcaactaccctacccatgatttggagttagccgcggtggttcatgctctaaaaatctggcggcactatctcatcgggaatcgctgtgaaatatatactgatcataagagtttgaaatacattttcactcagtcggacctgaatcttcggcaaaggagatggttagaactcatcaaggattatgatgtgggaattcactatcatcctggtaaggccaacgtggttgccgacgctctaagtcgaaaaagtcattgcaacactcttaacctccgtggcattccacccgaacttaatcaacagatggcagccctgaacctaagcatagttagtcgtggattcttggctgcgttggaagccaagcctgccttgctcgatcaaatccgcgaggctcagaagaatgatccggacatgcatggactcctcaagaatatgaaacagggtaaagccgctggtttcacagaggatgaacacggaaccctgtggaacggaaatcgagtatgcgttccagataacagagaacttaaacagctgatactccaggaagcccacgaaagtccttattccatccaccctggcagtacaaagatgtacttagacttgaaggagaaatactggtgggttagtatgaagcgggaaattgcagagtttgtggccctttgtgatgtgtgccagcgtgtcaaggcagagcaccaacgaccggccggacttctccaacccctccaagtacctgaatggaaatgggatgaaattgggatggacttcatcaccggacttccaaagacccaaggtggatatgattctatatgggtagttgtggatcgattaaccaaggtagctcgattcattcctgtgaagaccacctatggagggaacaaactagccgagctctacttcgataggatcgtgagtctccatggcgttcccaagaaaatcgtatccgataggggaagccaattcacctctcacttttggaagaagctccaagaagagctgggtacccgcttaaatttcagcaccgcgtatcacccgcagacagatggacagaccgagcgtctaaatcagatcctagaagatatgcttcgcgcatgtgtcctagatttcgggaagacctgggataagagtctcccctatgccgagttctcctacaataacagttatcaagccagcatacaaatggcaccttatgaagcgttgtatgggcgcaaatgccggacaccgctattgtgggaccaagttggggaaagccaagtgttcgggactgatatcctgagagaagctgaagcgaaggtcagaaccattcgggataatctaaaggtggcacagtcccggcagaaaagttatgcagataatcgtcgccgtaacctggaattcgcagtgggtgatcttgtgtatcttcgggtcacgccattgcgaggtgtacacaggtttcggacaaaagggaagctcgcacctcggtatgtgggtcctttccgtatcgttgctcgacgcggagaagtcgcttaccagttggagctgcccgcctccttgggcaacgtgcatgatgtgttccatgtgtcgcaactcaagaaatgtctccgagtgccatcctag

SEQ ID NO: 5376 - DNA, 1467 bp, Oryza sativa
  Clone ID: PAT_MRT4530_1216C.1
aagaggtctgacctctttggaaactttcctggcgcgaaagaagggcgcgcccacgcgtgcgcacgtcgtcgttggcgccacttttgtgtgtttggcggtaaacccataaccctggaagaattgtggaagcctgacaatggcatggacaaactaggaacagatgctgatgcctacaaggacatatgcctctctttctccctctgtcacctgctacagcgacgcttctttggttttagttgtgctgagtctgaccggccagagacccgtagctttgtgttggaaggcttgcttcaacctaactacgagagggccttcaaggtgattgaggttgagctagccttcatgtacgactacatctacagcagcaacgccttcgtccattactatgaagctggagcttgcaccgcctgggcaatagcttcaatcctgaccacatgttttctatgtgtggctgttgccctacagcaaaaagaagccattattgcatcatctgcggtcactatgttggactcggaggtaattagcacaacgatgacaccagacattgtcatcacccttgtcatactggtgtcccttgcttccctccaagtgttgcagctggtgaactccttgtcgtccaattgggcaagagtctcccttgtctgtcatcttttcaggagaaatgccaacaacctggagccatcgatgggcttgaagctgaggttgttcctttccaggatcaaactattggacaaataccagtggcagaacaagcttgggcagtacgagagctcatcgtggctcaagaaagctctagggtttgtcagcttcaagataggacaatgttgctataagccagtgtttcatttcatgctctactgcgtgcggtgcatgatgcgatggccaaccatttgctgcccatgctatgtggtgtgctctccgctctgcaactgggtgttcaagacaagttaccatggcggtagcgctagtaccattatccccgaatcaaagggcaatcaagccagcatcatcttgacctggcacgctgcgacaggttgctacgacaaagactatgagcaaaggaagaagatgaaggctactacagaatcgccgctacagcacaggcagtatcgtgttgtggccaccgctctatccaagtactgcatgtacttggtagcttatgtgcctcagctgctgcccgggcagcagtcctacacaacatctgtctacaacgattttgtgcgctcgccgtcctacatcttgcagagtggtacccagctgaaagatgagctctgcgaggcggtggtggaagatgaactgaggtggaaggtgctagctgatttctgggtcgagatgttgctctacctcgcgccttctgacaatgtcacggctcacatcgagcaactcgcacaaggtggagagttcatcacccatctctgggctctcctcttccacgccggcatcctgtaccggccgtacaaggaggag

SEQ ID NO: 5377 - DNA, 1854 bp, Oryza sativa
  Clone ID: PAT_MRT4530_12170C.1
atggacgctgaccacgagcgccggcgtcccgagcagggcgctctgaggaggccgcttttagccgacgacgagacttgtggccaccgcactgcagagtgcagaggagtctttccgtttatcgatttctgctctgctgaagattgcgaggcatcttcctcaaatcagagcctggtatctcaggaagatcggggacaagaggtggctgaggtgcagaaggttgagagctgctccaacaaggcactgataatcatcttgagcctgcaattcttggaaatcactgccttctacggggtctacctgaacctgatagtgtatcttcaggacgttcttcatggcgacagtgcttcgaacgtggcgacggtcagttcttgggtcggaactgcctacctcatgcccatcctcggcgccgccgtcgccgactcttgctggggaaagtacacgacggtgttggccggcttctccatagctctcgtcggcatggtcaccatcaccgcgtcggccacgctgccgtctctgagaccgccgtcgtgcgggcagagcgcctactgcgtcccggcgacgctcagccagaagctggtcttcttcacgggcatatacctctgcgccctcgggatcggcggcgcgaaggccgtgctgatcgcgttcgggccggagcagctcgacgacgacgacggcggcggcaagaacgagcgggtgcgggagaggaaggcgtcctacttcagctggtactacgcggtggccaacgtgggcatgctcacggcggggacgatgctggtttggttcgaggacaacgtgagctgggggttcgggtacggcctgtgcgcgtcgttcgtcgcggtcgcggtcgtcgtcctcgccgcgacagcgcccatgtaccggatcctgcccccggcgggcagcccgttgaagagtgtgatccaagtgcttgtggcgttctctcacaaggctaaattgactttgccggacgatccaactgaactgtacgaggacgacggcgtcaagaactcgttgcagcatccggtgcacgaacgattagagcacaccaaccaattcaggtgtttggacaaggctgccattgtcagcgacgaggatctggaagacggcgacaggtggaggctgtgcacggtgtcccaggtggaggaggtcaagattctgctgcggttgatcccgatatggctcacgtcggcggtctacttcatcgcgaacacgcaggctcagaccacgttcgtgcagcagggcaccaagacggacggccggatcgcgcgcggcgcattctccgtcccggccgcgtcgctgtcgtccttccagatggcgttcgtcgccgtcttcgtcacgctctacaacagggccgtgatgcccgcggcgcgccggtgcctcggccgcgccgtggcgttcacgccgctgcagctcatggggttcggccacgcgacggcggtcgtcgcggtgggcgtggccgcgtgcaccgaggcgcgccggctgcacgcggccagggccggggcgcccgccatgggcatcgcgtggctgctgccgcagtacctcgtgatggccgcctccgacgcgtcgctcaccgtcgggcagctggagttcttctacgaccagtcgccggagacgatgcggagcgcgtcgacggcgttctacttcctcgccatatcgctcgggaacctgctcaactctcagctggtgactctggtggcgaaggtgaccgcggtatggggcaatgcagggtggtttccactggacttggatgacggtcacctggattacttcttcctgctcatcgtggccatcaccgcggtgaacttcgcagtttacgtcgccctcgccaagaactacacgccaaagaaggttaggtag

SEQ ID NO: 5378 - DNA, 6032 bp, Oryza sativa
  Clone ID: PAT_MRT4530_12171C.1
atggatgaagtcgggggtcgatggacattctccagggcaaatgaaggctacacgagctgcggcccggtagtcgagatgtcatggcacagggccggtgtcctgctgttaggagctcagtcctgcctgcctgtcccgggggttccggccgtaggtgggattgggtcgatgtacacctctgatcagagtataatctattcgaatagccgcgccctcggttatgggcaagccgagcaatgtacccaaatggccggcagcgtcacccgtcgtggtttgcacatgactggcttcgtcttggagctgcgaggcatgtgcgtggtcttggggtatccacatggagtggactaccaggccaggccgcttccggagcaggagggtgacgatgcagagccccacgctggttgggaggtcactgcagtgatcctctctggctctcccgagcggacttcgctggcagtcaccgcgggtggagattccttccccgccgcttgccagaacgtcgctctcctcgccatcggcactcttcaccagcgctacccggacgagttgcagcactcgccctaccgctaccaccctcgtcgcggaggagcccgcgactacgccaccttccgggatgctagctcggaggatgacgctaccatcgtgcacctggcgcgcatggtggaggcgtacgacgcggctcgcatcgacttccaccagatggtaccccgtgggatggtcgagaacaacatgaagatcctggagctgcgtcaggagaacctgcagctcaagaaggacctagacgcggtggaggcgcagctgcatcagctcaagatcgcccagggagaggtctgccgccccaagcgtcgccgcgtctgccgcagccagaagatcaccgcccgcaagagcacctccaggcccgagcttgttcgtcagtccctggcgtggacttgcttcgtcgagacccctcgtgccgagcccgcgcccgtggttccccaggagggggaagcctccggcgttggtagcacggaggatgcgctgttgctcaccttccgtcctggcccgtcgcagcggtagacgagcagttagtaggcttgcgcatggtgacgaccaggagaaatgctgccaccggtgatggcaaccaacctgaaggcagcaaccacaaccaccagggcaacccacctccaccttctccttcgccttctccaccaccaccagataccaatgccattctcacccaaatcctcgcccagcaggccaacatgatgactgctttcctccaccacctccaaaatccaccacaacagaatgctccaccaccacccccacaacactctaaactcgccgagttcctccgcatccgtccacccaccttctctagctccaacaaccccgtggatgcgttggattggttgcatgccgtggggaaaaagctagacacggcgcagtgcagcgatgaggagaaagtcatcttcgccgcccaccagctgcaggggcccgcatctctatggtgggaccatttccaagctacgcagccagaggggcaacctattacttgggcccgcttcaccgccgctttccggagaacccatgtgccagctggagtcgtggctcttaagaaaagggaattccgagagttgaagcaaggcaaccgctccgtgatggagtatttgcatgagttcaacaatctggcccgttacgccccggaggatgtgcgggaagatgaggagaagcaagagaagttcttggcaggaatggacctcgagctgtccgtccgtctagtctctggggactatccggatttccaacgtctggtggacaagagcatccgcttggaggccaagcacaaggaactggagtcgcacaagcgccgcttggcgaatttccgcaatcaacagtgtgctaaccaaagggtccgctacaccaatccctatccagggggatcctcttcgcagcagcaacaacagcagcagcaacctcgctccgcgcctcgacctcaattcgtggtgcgcgtcccacagccgcagcagcagcagaatcagcaagggactcgtgcgccccgtcctcctacgccaactgtgcagcccggtcaaggccgcagggacgctcaaggtcagcagcgtctgtgcttcaactgcttcgagcccgggcactttgcggataaatgcccgaagccaaggcgtcagcaaggtcaagcgcctccccgctccaacaacggtgggaaggatgtcattcggggtcgtgtgaatcacgtgacggccgaggacgtgctgacaactccagacgtcatcgttggtacgttcctcgttcatcccatccctgctaccattttgttcgactctggagcttcccactcgtttatatctgtgccattcgtggggagaaatcagttgggggtagaaaggcttaggaaccctctgctcatcaccacccctggaggggttatgacagcaaagtattatagccctgccgtccctatagaaattcaggggattccttttccctcggatctgattctgctagacaccaagaatttggatgtgattcttgggatgaattggttggctcaattccaaggagtagtggattgcgcgaggcgcactgtcactctgtaccgagggccggaacaaccggttgttttctttgcacccccaacctctgtcagtagttcagaactgcatcagataggactgtcagaaatccccatcgtcagggagttcggagatgtgtttccggaagaactacccggtatgccgcccaagcgagagattgagtttcggatagatcatgctccaggaaccactcctctgcacaagcgaccctaccgtatggcagcaaatgaactggccgaagtaaagaaacagttggaagagttgaaagaaaaggggtacatacgtccgagtacttccccctggggtgctcctgtgatttttgtggagaagaaagacaagactaagaggatgtgcgttgactacagagctctcaatgaagtcaccatcaaaaacaagtaccctcttccccggatcgatgatctgttcgatcagcttaaaggtgccactgtattctccaagattgatcttcgttccggatatcaccaattacgtattcgtgaagaagatattccgaagaccgcattcaccacgcgatacgggctgtatgaattcacggggatgtcgttcggtctaaccaatgcacctgccttcttcatgaacttaatgaacaaagtgttcatggaatacttggacaagtttgttgtggttttcatcgatgacattctgatatactcacaatcagagggagaccatcagcaccatctccgtctggtgttgggaaagctgcgggaacatcaattgtatgccaaacttagcaagtgtgagttctggctgtccgaagtcaaattcttaggacacgtgatatctgctaaaggagtttctgtggaccccgaaacagtgaccaccgtcaccgattggaagcaacccaagacagttactcaagtccgcagtttcttaggtttggcaggatactaccggagattcatcgagaacttctccaaaatcgctcgacccatgacacagttgttgaagaaagaagagaaatttgtgtggagcccgcaatgcgagaaggcgttccaaactctcaaggaaaagctggtttcctcgccggtgttaatcttgccggatactcgcaaggacttcctggtgtattgtgacgcttcgcgccaaggattggggtgcgtgctcatgcaggacggtcatgtggtagcctatgcctcacgtcagctgcgacctcatgaaggcaactaccctacacatgatttggagttagccgcggtggttcatgctctaaaaatctggcggcactatctcattgggaatcgctgtgaaatatataccgatcataagagtttgaaatacatcttcacccagtcggatctgaatcttcggcaaaggagatggttagaactcatcaaggactatgatgtgggaattcactatcatcctggtaaggccaacgtggttgccgacgctctaagtcgaaagggccattgcaacactcttaacgtccgtggcattccacccgaacttaatcaacagatggaagccctgaacctaagcatagttggtcgcggattcttggctgcgctagaagccaagcctaccttgctcgatcaaatccgcaaggctcagaagaatgatccggacatgcatggactcctcaagaatatgaaacagggtaaagccgctggtttcacagaggatgaacacggaaccctatggaacggaaagcgggtatgcgttccagataaccgagaactcaaacagctgatacttcaggaagctcacgagagcccttattccattcacccgggcagtacaaagatgtacttagacttgaaggagaaatactggtgggttagtatgaagcgggaaattgcagagttcgtggccctttgtgatgtgtgccagcgtgtcaaggcagagcaccaacgaccggccggacttctccaacctctccaagtaccagaatggaaatgggatgaaattgggatggatttcatcaccggacttccaaaaacccaaggtggatatgattctatatgggtagttgtggatcgattaaccaaggtagctcgatttattcctgtgaagaccacctatggagggaacaaactagccgagctctacttcgctaggatcgtgagtctccatggcgttcccaagaaaattgtatctgataggggaagccaattcacctctcatttttggaagaaactccaagaagagttgggaacccgattaaatttcagcaccgcgtatcacccgcagacagatggacagaccgagcatctaaatcagatcctagaagatatgctccgcgcatgtgtactagatttcgggaagacctgggataagagtctcccctatgccgaattctcctacaataacagttatcaagccagcatacaaatggcaccttatgaagcgttgtacgggcgcaaatgccggacaccgctcttgtgggaccaagttggagaaagccaagtgttcgggactgatatcctgagagaagctgaagctaaagtcagaatcattcgggataatctaaaggtggcacagtctcggcagaaaagttatgcagataaccgtcgccgtgacctggaattcgcagtgggtgattttgtataccttcgggtcacgccattgcgaggtgtgcacaggtttcagacaaaagggaagctcgcacctcgggttcacacacatatgccgcgctacaagcctgagtacttgtttggtgttgagggttttgtccaggagttgcgtacgatgtcctttgtcattggatttgggactgcccctttttatgcccagattcctcatgatcgtcatgaagagaagtgccgagtcaaagttactttgaacagcaatagtgaagaggtcccctcagtaatgttcgaagctggaggaagaaactacatccatgcatgtcaggaagtggcaaggatcgccataggagagctccgtgatcgctacagtgatcagttggccgacactgagtatcgctatcatcctcgtcaaccacagggaagtgaccgtggcagttaccttgagactgaaggaattgagaatgatgctaccacaaggcatttggttgagatgttgtgggctatggatgaaagtcgtgcggagactgtgttagcagctcaagatcgtgaagaccggaatcgtggtaagatttgcaagctcgaagacaaggtggatcgtttggagaaggaattagccgcattgaagggagaagctccgccgcagaaggccaggattcgtcttaccgcaaggaagagagctctatttgtccctcgctatcaattggcgccaaaggttcgtgtggtggagaaagaagttgccccagcagatcctccggtcattatcataagtagtgatgaagatgaagaatccaagcgcacccattccaagattgagtgggtagcaactcaagatgatgaagacgagccgaacgagccttcaatcgacctccgatgctcagaagaactagagtga

SEQ ID NO: 5379 - DNA, 5487 bp, Oryza sativa
  Clone ID: PAT_MRT4530_12172C.1
atgtcatggcacagggctggtgtcctgctgctaggggctcagtcctgcctgcctgtcccggtggttccggccgtaggcggggttgggtcggtactcttgtctaaggctaggatgggttggaaactatgtcacgtcttccgtctgtataccgtggtgatggccggcagcgttacccgtcgtggtttgcacatgactggcttcgtcttggagctgcggggcatgtgcgtggtcttggggtatccacatggagtggattaccaggccaggccgctcccggagcaagagggtgaggatgcagagcctcacgctggttgggaggtcactgcagtgattctctccggctctcccgagcggacttcgctggcagtcaccgcgggtggggattccttccccgccgcttgccagaacgccgctctcctcgccatcggcacccttcaccagcgctacccggacgagttgcagcactcgccctaccgctaccaccctcgtcgcggaggagcccgcgactacgccaccttccgagacgccagctcggaggatgacgctaccgtcgtgcatctggcacgcatggtggaggcgtacgacgcggctcgtatcgacttccatcagatggtgcgccgtggcatggtggagaacaacatgaagatcctggagctgcgccaagagaatctgcagctcaagaaggacctcgacgcgttggaggcgcagctgcatcagctcaagatcgcccagggagaggacagccgtcccaagcgtcgccgcgtctgccgcagccagaagatcaccgcccgcaagagcacctccaggcccgagcttgttcgtcagtccctggcgtggacctgcttcgtcgagacccctcgtgccgagcctgcgcccgtggttccccaggagggggaagcctccggcgttggtagctcggaggttttaatcgtcagctctccttctctgtttgctggttctgtgaggggttttcagatggtgacgaccaggagaaatgttaacaccggtgaaggcaaccaacccgagggcagcaaccccaaccaccaaggcaatccacctccacctccgcctccaccaccaccaccagacaccaacgccattctcacccaaatcctcgcccagcaagctaacctgatgaatgctttcctccaccacctccaaaacccgccacaacacaatgctccaccaccccctccccaacactccaaactcgccgaattcctccgtatccgcccacccaccttctctagctccaacaaccccgtggatgcgttggattggttgcatgccgtggggaagaagttagacactgtgcagtgcagtgacgaagagaaagtcatcttcgccgcccatcagctgcaggggcccgcatctctatggtgggaccatttccaggccacgcagccagaagggcaacctattacttggactcgcttcaccgccgctttccggagaacccatgtgcccgccggagtcgtggctcttaagaaaagggaatttcgggagttgaagcaaggcaaccgctccgtgatggagtatttgcatgagttccacaatctagcccgttatgccccggaggatgtgcgggaagatgaggagaagcaagagaagttcttggcaggaatggaccctgagctgtccgttcgtctagtctcttgggactatcctgattttcaacgactggtggacaagagcatccgcttggaagccaagcacaaggagctggaatcgcacaagcgccgcttggcgaatttccgcaatcagcagggtgctaaccagagggtccgctacaccaatccctacccagggggatcctcctcacagcagcagcagcagcagcaacctcgctccgcgcctcgacctcaattcgtggtgcgcgtcccacagcagcaacagcagcagaatcagcaggggactcgtgcgccccgtcctcctacgccaactgtgcagcccgttcaaggccgcagggacgctcaaggtcagcagcgtctgtgcttcaactgcttcgagcccgggcactttgcggataaatgcccgaagccaaggcgtcagcaaggccaagcgcctccccgctccaacaacggcgggaaggatgtccttcggggccgtgtgaatcacgtgacggccgaggacgtgctgacaactccagacgtcatcgttggtacgttcctcgttcattccatccctgctaccattttgttcgactctggagcttcccactcgtttatatctgtgccattcgtggggaaaagtcagttgggggtagaaaggcttagaaaccctctgctcatcaccacccctggaggggttatgacagcaaagtactatagccctgccgtccctatagaaattcaggggattccttttccctcggatctgattctgctagacaccaagaatttggatgtgattcttgggatgaattggttggcccaattccaaggggtagtggattgcgcgagacgcactgtcactctgtaccgaggaccagagcaaccggttgttttctttgcacctccaacctctgtcagaagttcagaactgcatcagataggtctgtcagaaatccccatagtcagagagttcggagacgtgtttccggaagaactacctggtatgccgcccaagcgagagattgagttccggatagatcttgctccaggaaccactcctctgcacaagcgaccctaccgtatggcagcaaatgaactagccgaagtaaagacacagttggaagaattgaaagaagaggggtacatacgtccgagtacttccccatggggtgctcctgtgatctttgtagagaagaaagacaagacgaagaggatgtgcgttgactacagagctctcaatgaagtcaccatcaaaaacaagtaccctcttccccggatcgatgatctgttcgatcagcttaaaggtgccactgtattctccaagattgatcttcgttccggatatcaccaattacgtattcgtgaagaagatattccgaagaccgcattcactacgcgatacgggctgtatgaattcacggtgatgtcgttcggcttgaccaatgctcctgccttcttcatgaacttaatgaacaaagtgttcatggaatacttggacaagtttgttgtggttttcatcgatgacattctgatatactcacaatcagaggaagaccatcagcaccatctccgtctggtgttgggaaagttgcgggaacatcaattgtatgccaagcttagcaagtgtgagttctggttgtccgaagtcaaattcttaggacacgtgatatctgctaaaggagttgctgtggaccccgaaacagtgaccgccgtcaccgattggaagcaacccaagacagtcactcagattcgcagtttcttgggtttggcaggatactaccggaggttcatcgagaacttctccaaaatcgctcgacccatgacacagttgttgaagaaagaagagaagtttgtgtggagcccgcaatgcgagaaggcgttccaaactctcaaagaaaagctggtttcctcgccagtgttaatcttgccggatactcgcaaggatttcatggtgtactgtgatgcttcgcgccaaggattggggtgcgtgctcatgcaggacggtcatgtggtagcctatgcctcacgccagctacgacctcatgaaggcaactaccctacacatgacttggagttagcagcggtggttcatgctttaaaaatctggcggcactatctcattgggaaccgctgtgaaatatatactgatcataagagtttgaaatacatcttcacccagtcggatctgaatcttcggcaaaggagatggttagaactcatcaaggattatgatgtgggaattcactatcaccctggtaaggctaacgtggttgccgacgctctaagtcggaagagccattgcaatactctcaacgtccgaggcattccacccgagcttaatcaacagatggaagccctgaacctaaacatagttggtcgtggatttttggccgcgctagaagcccagcccaccttgctcgatcaaatccgcgaggctcagaagaatgatccggacatgcatggactcctcaagaatatgaaacagggtaaagccgctggtttcacagaggatgaacacggaaccttatggaacggaaagcgggtatgcgttccagatagcagagaacttaaacagctgatacttcaggaagctcacgaaagtccttattccattcacccgggcagtaccaagatgtacttagatttgaaggagaaatactggtgggtcagcatgaagcgggaaattgcagagtttgtggctctatgtgatgtgtgccagcgtgtcaaggcagaacaccaacgaccggccggacttctccaacctctccaagtgccagaatggaaatgggatgaaattgggatggatttcatcaccggccttccaaaaacccaaggtgggtatgattctatatgggtaatagtggatcgattaaccaaggtagctcgatttattcctgtgaagaccacctatggagggaataaactagcggagctctacttcgctaggatcgtgagtctccatggcgttcccaagaaaatcgtatctgataggggaagccaattcacctctcacttttggaagaagctccaagaagagctgggtactcgattgaatttcagcaccgcatatcacccgcagacagatggacagaccgagcgtctaaatcagatcctagaagatatgctccgcgcatgtgtcctggacttcgggaagacttgggataagagtctcccctatgccgagttctcctacaataacagctaccaagccagcatacaaagggcaccctatgaagcgttgtacgggcgcaaatgccggacaccgctattgtgggaccaagtcggagaaagccaagtgttcgggactgatatcctgagagaagctgaagctaaagtcagaatcattcgggataatctaaaggtggcacagtctcggcagaaaagttatgcagataaccgtcgccgtgatctggaattcgcagtgtatgactttgtgtatcttcgggtcacgccattgcgaggtgtgcacaggtttcagacaaaagggaagctcgcacctcggtatgtgggtcccatccgtatcactgctcgacgcggagaagtcgcctaccagctggagttgcccgcctccttgggcaacgtgcatgatgtgttccatgtgtcgcaactcaagaaatgtcttcgagtgccatccgagcaggccgactcagagcaaattgaagttcgcgaagacttgacctatgtggagaagccagtgaaaatcctggacgccatggagcgcaggaccaggaaccgagtaatccgtttttgcaaggtccagtggagcaaccacgccgaagaagaagctacttgggagcgcgaagacgagctgaaggcagcccatcccgatctcttcgccagttcttccgaatctcggggtcgagattccgtttaa

SEQ ID NO: 5380 - DNA, 498 bp, Oryza sativa
  Clone ID: PAT_MRT4530_12173C.1
ttggttgagatcagcaaggtccttggattcaagctggtgactgactgccttgagctccgggcatggttctaccttgcacttgaggagtatgaggctgcagtgcgggatatcagggcgatattgacgttggatcctagttacatgatgtttcatggaaaagtgcatggagaacagctgatcgagatcctccgagggtatgtgcagcaatgggatatggcggattgctggatgcagctctatgaccggtggtcagaggtggatgacatcggctctctggctgtcgttcagcagatgctcaccagggaacctgggaacagtagcttgcggttccgacaatcactgctcctattaagactaaattgtcaaaaggctgcgatgcgtagtttgagatttgcacgaaattgttcggctcatgagcatgagagacttgtatacgaaggatggattttgtacgatactggacaccgtgatgaagcacttgccaaggctgaacattcg

SEQ ID NO: 5381 - DNA, 5848 bp, Oryza sativa
  Clone ID: PAT_MRT4530_12174C.1
agaagtcaagaacccatttttgtgctttgtttctgctgttatgtggagtttagtagagtaaaagcccttttcttttccgttggtcgtgtagacgctgcagcttcggaagatccgctcttcgggaagttgaagccgacgtttgggaaagcgagcaaggcaagtcacatcatcacctctcttcctctttcaaaacccctaaaacctgttttcggtgaggtttgggtgcatgccagttatgggaagtagcaccccggccactataaggattaagctcgggcctctgttgcaaagcactaccgtacttccacatgtctagtgggtaaggcttagtttgtggctcagtctggttataaacaaaagtacacggatggaggtggatgaagtcgggggtcgatggacattctccagggcaaatgaaggctacacgagctgcggcccggtagtcgagatgtcatggcacagggccggtgtcctgctgctaggggctcagtcctgcctgcctgtcccgggggttccggccgtaggtgggattgggtcggtactcttgtctatggctaggatgggttggaaactatgtcacagcttccgtctgtataccgtggtgatggccggcagcgtcacccgtcgtggtttggacatgactggcttcgtcttggagctgcggggcatgtgcgtggtcttggggtatccacatggagtggattaccaggccaggccgctcccggagcaggagggtgaggatgcagagccccacgctggttgggaggttactgcagtgatcctctctggctctcccgagcggacttcgctggcagtcaccgcgggtggagattccttccccgccgcttgccagaacgccgctctcctcgccatcggcactcttcaccagcgctacccggacgagttgcagcactcgccctaccgctaccaccctcgtcgcggaggagcccgcgactacgccaccttccgggatgctagctcggaggatgacgctaccatcgtgcacctggcgcgcatggtggaggcgtacgacgcagctcgtatcgacttccaccagatggtacgccgtgggatggtcgagaacaacatgaagatcctggagctgcgtcaggagaacctgcagctcaagaaggacctagacgcggtggaggcgcagctgcagcagctcaagatcgcccagggggaggactgccgtcccaagcgtcgccgcgtctgccgcagccagaagatcaccgcccgcaagagcacctccaggcccgagcttgttcgtcagtccctggcgtggacttgcttcgtggagacccctcgtgccgagcccgcgcccgtggttccccaggagggggaagcctccggcgttggtagcacggaggatgcgctgttgctcaccttccgtcctggcccgtcgcagcggagaaatgctaacaccggtgatggcaatcaacctgaaggcagcaaccacaaccgccagggcaacccacctccacctcctcctccgcctccaccaccaccaccagataccaacgccattctcacccaaatcctcgcccagcaagccaacatgatgacggctttcctccaccacctccaaaatccgccacaacataatgctccaccaccacctccccaacactctaaactcgccgagttcctccgcatccgtccacccaccttctccagctccaacaaccccgtggatgcgttggattggttgcatgccgtggggaaaaagctagacactgtgcagtgcagcgatgaggagaaagtcgtcttcgccgcccaccagctgcaggggcccgcatctctatggtgggaccatttccaagctacgcagccagaggggcagcctattacttgggcccgcttcaccgccgctttccggagaacccatgtgcccgccggagtcgttgctcttaagaagagggagttccgagagttgaagcaaggcaaccgctccgtgatggagtatttgcatgagttcaacaatctggcccgttacgccccggaggatgtgcgggaagatgaggagaagcaagagaagttcttggcaggattggaccctgaactgtccgtccgtctagtctctggggactatccggatttccaacgtctggtggacaagagcatccgcttggaggccaagcacaaggaactggagtcgcacaagcgccgcttggcgaatttccgcaatcaacagggtgctaaccaaagggtccgctacaccaacccctatccagggggatcctcctcgcaacagcaacaacagcagcagcaacctcgctccgcgccccgacctcaattcgtggtgcgcgtcccacagccgcagcagcagcagaatcagcaagggactcgtgcgccccgtcctcctacgccaactgtgcagcctggtcaaggccgcagggacgctcaaggtcagcagcgtctgtgcttcaactgcttcgagcccgggcactttgcggataaatgcccgaagccaaggcgtcagcaaggtcaagcgcctccccgctccaacaacggtgggaaggatgtcattcggggtcgtgtgaatcacgtgacggccgaggacgtgttgacaactccagacgtcatcgttggtacgttcctcgttcattccatccctgctaccattttgttcgactctggagcttcccactcgtttatatctgtgccattcgtggggagaaatcagttgggggtagaaaggcttaggaaccctctgctcatcaccacccctggaggggttatgacagcaaagtattatagccctgccgtccctatagaaattcaggggattccttttccctcggatctgattctgctagacaccaagaacttggatgtgattcttgggatgaattggttggctcaattccaaggagtagtggattgcgcgagacgcactgtcactctgtaccgagggccggaacaaccggttgttttctttgcacccccaacctctgtcagtagttcagaactgcatcagataggactgtcagaaatccccatagtcagggagttcatagatgtgtttccggaagaactacccggtatgccgcccaagcgagagattgagttccggatagatcttgctccaggaaccactcctctgcacaagcgaccctaccgtatggcagcaaatgaactggccgaagtaaagaaacagttggaagagttgaaagaaaaggggtatatacgtccgagtacttccccctggggtgctcctgtgatttttgtggagaagaaagacaagacgaagaggatgtgcgttgactacagagctctcaatgaagtcaccatcaaaaacaagtaccctcttccccggatcgatgatctgttcgatcagcttaaaggtgccactgtattctccaagattgatcttcgttccggatatcaccaattacgtattcgtgaagaagatattccgaagaccgcattcaccacgcgatacgggctgtatgaattcacggtgatgtcattcggtctaaccaatgcacctgccttcttcatgaacttaatgaacaaagtgttcatggaatacttggataagtttgttgtggttttcattgatgacattctgatatactcacaatcagaggaagaccatcagcaccatctccgtctggtgttgggaaagctgcgggaacatcaattgtatgccaagcttagcaagtgtgagttctggttgtccgaagtcaaattcttaggacacgtgatatctgctaaaggagttgctgtggaccccgaaacagtgaccgccgtcgccgattggaagcaacccaagacagttactcaagtccgcagtttcttaggtttggcaggatactaccggagattcatcgagaacttctccaaaatcgctcgacccatgacacagttgttgaagaaagaagagaaatttgtgtggagcccgcaatgcgagaaggcgttccaaactctcaaggaaaagctggtttcctcgccggtgttaatcttgccggatactcgcaaggacttcatggtgtattgtgacgcttcgcgccaaggattggggtgcgtgctcatgcaggacggtcatgtggtagcctatgcctcgcgtcagctgcgacctcatgaaggcaactaccctacacatgatttggagttagccgcggtggttcatgctctaaaaatctggcggcactatctcattgggaatcgctgtgaaatatataccgatcataagagtttgaaatacatcttcacccagtcggatctaaatcttcggcaaaggagatggttagaactcatcaaggactatgatgtgggaattcactatcatcctggtaaggccaacgtggttgccgacgctctaagtcgaaagggccattgcaacactcttaacgtccttggcattccacccgaacttaatcaacagatggaagccctgaacctaagcgtagttggtcgcggattcttggctgcgctagaagccaagcctaccttgctcgatcaaatccgcgaggctcagaagaatgatccggacatgcatggactcctcaagaatatgaaacaggataacagagaacttaaacagctgatacttcaggaagctcacgagagcccttattccattcacccgggcagtacaaagatgtacttagacttgaaggagaaatactggtgggttagtatgaagcgggaaattgcagagttcgtggccctttgtgatgtgtgccagcgtgtcaaggcagagcaccaacgaccggccggacttctccaacctctccaagtaccagaatggaaatgggatgaaattgggatggatttcatcacaggacttccaaaaacccaaggtggatatgattctatatgggtagttgtggatcgattaaccaaggtagctcgatttattcctatgaagaccacctatggagggaacaaactagccgagctctacttcgctaggatcgtgagtctccatggcgttcccaagaaaatcgtatctgataggggaagccaattcacctctcatttctggaagaaactccaagaagagttgggaacccgattaaatttcagcaccgcgtatcacccgcagacagatggacagaccgagcgtctaaatcaaatcctagaagatatgctccgcgcatgtgtactagatttcgggaagacctgggataagagtctcccctatgccgagttctcctacaataacagttatcaagccagcatacaaatggcaccttatgaagcgttgtacgggcgcaaatgccggacaccgctcttgtgggaccaagttggagaaagccaagtgttcgggactgatatcctgagagaagctgaagctaaagtcagaatcattcgggataatctaaaggtggcacagtcccggcagaaaagttatgcggataaccgacgccgtgatctggaattcgtagtggatgactttgtgtatcttcgggtcacgccattgcgaggtgtacacaggtttcagacaaaagggaagctcgcacctcggtatgtgggtcctttccgtatcgttgctcgacgcggagaagtcgcttaccagctggagctgcccgcctccttgggcaacgtgcatgatgtgttccatgtgtcgcaactcaagaaatgccttcgagtgccatccgagcaggccgactcagagcaaattgaagttcgcgaagatttgacctatgtggagaggccagtgaaaatcctggacaccatggagcgcaggaccaggaaccgggtaatccgtttttgcaaggtccagtggagcaaccatgctgaagaagaagctacttgggagcgtgaagacgagctgaaggcagcccatcccgacctcttcaccagttcttccgaatctcggggtcgagattccgtttaa

SEQ ID NO: 5382 - DNA, 2111 bp, Oryza sativa
  Clone ID: PAT_MRT4530_12175C.1
aatcaagtataatgagttccattttcagacacttctttttgcaattaactgttatctgaacttctctgtgggaatgaaatctgtgctgttgaataggaattattagatattttgaatagtcccttctgtcagctctttattgtacaaatagcctacggttctgatgaacaaatctgtattgaagttcaatccatttatttctccttctgttgcagaagctagtgaagctaccaatctccacattggttgtttttcacatataactaaagctaaactaacgcgctacgatgagcatacgctagagttagctttgttctgaaatctgacagtggaagcctttgaggctttcacagcttgatccttttgtctgcatactttagttcctcttcttactggagagcatgttcttgaaccagaaagctgagtccttggggtacctctttagcgtcttgtagtccacgtagacgatgccaaaacgggaagtgtacccgagcctccactcgaagttgtcaagcaatgaccaagcaaagtatccaatcactttggcaccatcgtctattcactgaatgttggcatcgaggcatttactgtatcaagtattgattattggtacctacaaaggatgagggggacaagcaaccatccgatgtgcaatactcttgccctctgggctgcagcccgatcagccatattgtctcttaatggtgcatacaagctaaaatctaagagatgtccaattctacactttggagaaagctgcttctgttcgcagtatcgcgtcacggcggcagcatgcgaacggaagatatcgtgcatcgtaataactggtccttgtcaggttccatggcccagggtctttcatgtagaaagaggtgtagtgtttgatgccatcatatattattgagtctttcaccatcctggactcctcatcactgaaggttggcatcctgtccttgacgatttcgagcatcggaaatatgggtagaccatggataatggggtcaaggaaccatccgaggtgaaaatctcttgccctctgtgctgcagccctatcagcattgctgtcactgaatggttcataccagacaaaatccaagagaattccaatcctccccttttgataaagctgatacttttcgcggtatcgcttgacggcggcagcatgagaaaggatgagatggtgggcagcaaggtatggttctgtcgtggagttgcctcctgcatcacagccagagcaccttcccggggcatggaagccattgtcatatcctagagcagcaacgcatctcggctcattgaaggtaaaccagtccttcaccctgtctccgaacgtctggaagcagaaatctgcgtagtctgcaaacgcctctacgatgtttgggcttagccagcctaagtactgctcatggagtgctaatggtaggtcatagtggtagaggtttgcgtacggtttgatgcctttcttaaccatgtaatctattaacctgttgtaataatcaactccttcctggttcaccatcccagtcccatttgggaaaattcttgaccaagagatcgaaaatctatacgcatcaaagcccatgttcttcattatgttcacatcttccttgtacctatgatactcatcaaccgtcacatcggctgtggcattattagggatcgtccctggtttctctatgaaagcgtcccagatgctagggccccggccaccctgcttcgccatgccctccacctggtacgccgacgcggccgtgccgaacacgaacccctccgggaaggctcgccggctcagcccgccggcgtcgtagatctccgggttgagccagtagcattgtgccggtggcagcgtcagcagcagatgagctgctgctgctagtgcaagccgcagtgctgctatgaatttcctcatgtctgcattacacacagagggagcaggaagtctggagacaaaaagggctttgtcttccggtggcatataaaagatgggaggaggtaaaagaaaactgagcgcctgaggcttaccaatttttacagttactgattcagtttttcaccctgtgtttattggcagtttgcttctcaaactaagctgggggcagcctgaaacaaaa

SEQ ID NO: 5383 - DNA, 2259 bp, Oryza sativa
  Clone ID: PAT_MRT4530_12176C.1
cttaggaagtgtgagttctggttgtccgaagtcaaattcttggggcacgtgatatctgctaaaggagttgctgtggatcccgaaacagtgaccgccgtcaccgattggaagcaacccaagacagttactcaagtccgcagtttcttaggtttggcgggatactaccggaggttcatcgagaacttctccaaaatcgctcgacccatgacgcagttgttgaagaaagaagagaaatttgtgtggagcccgcaatgcgagaaggcgttccaaactctcaaagaaaagctggtttcctcgccagtgttagtcttaccagatactcgcaaggatttcatggtgtactgtgatgcttcgcgccaaggattggggtgcgtgctcatgcaggacggtcatgtggtagcctatgcctcacgccagctacgacctcatgaaggcaactaccctacacatgacttggagttagccgcggtggttcatgctctaaaaatctggcggcactatctcattgggaatcgctgtgaaatatatactgatcataagagtttgaaatacatcttcacccagtcggatctgaatcttaggcaaaggagatggttagaactcatcaaagactatgatgtgggaattcactatcatcctggtaaggccaacgtggttgccgacgctctaagtcgaaagagccattgcaacaatcttaacgtccgtggcattccacccgagcttaaccaacagatggaagccctgaacctaagcatagttggtcgcggatttttggctacgttggaagccaagcctaccttgctcgatcaaatccgcgaggctcagaagaatgatccggacatgcatggactcctcaagaatatgaaacagggtaaagccgttggtttcacagaggatgaacacggaaccctatggaacggaaatcgggtatgcgttccagataatagagaacttaaacagctgatacttcaggaagctcacgaaagtccttattcaatccaccctggcagtacgaagatgtacttagacttgaaggagaaatactggtgggttagcatgaagcgggaaattgcagagttcgtggctctgtgtgatgtgtgccagcgtgtcaaggcagaacaccaacgaccggccggactcctccaacctctccaagtaccagaatggaaatgggatgagattgggatggatttcatcaccggacttccaaaaacccaaggcggatatgattctatatgggtagttgtggatcgattaaccaaggtagctcgatttattccggtgaagaccacgtatggagggaacaaactagccgagctctacttcgctaggatcgtgagtctccatggcgttcccaagaaaatcgtatctgataggggaagccaattcacctctcacttttggaagaagctccaagaagagcttggtacccgattaaatttcagcaccgcgtatcacccgcagacagatggacagaccgagcgtctaaatcagatcctagaagatatgcttcgcgcatgtgtcctagatttcgggaagacctgggataagagtctcccctatgccgagttctcctacaataacagctatcaagccagcatacaaatggcaccctatgaagcgttgtatggacgcaaatgccggacaccgctattgtgggatcaagttggggaaagccaagtgttcgggactgatatcctgagagaagctgaagcgaaggtcagaaccattcgggataatctaaaggtggcacagtcccggcagaaaagttatgcagataaccgacgccgtgacctggaattcgcagtggatgactttgtgtatcttcgggtcacgcccttgcgcggtgtacacaggtttcagacaaaggggaagctcgcacctcggtatgtgggtcctttccgtatcattgctcgacgcggagaagttgcttaccagttggagctgcccgcctccttgggcaacgtgcatgatgtgttccatgtgttgcaactcaagaaatgccttcgagtgccatccgagcaggccgactcagagcaaattgaagttcgcgaagacttgacctacgtggagaagccagtgaaaatcctggacaccatggaacgcaggaccaggaaccgggtaatccgtttttgcaaggtccagtggagcaaccacgccgaggaagaagctacctgggagcgtgaagacgagctgaaggcagcccatcccgatctcttcgccagttcttccgaatctcggggtcgagattccgtttaa

SEQ ID NO: 5384 - DNA, 361 bp, Oryza sativa
  Clone ID: PAT_MRT4530_12177C.1
tttttgtttttttttttttttttttttttttttttttgtttttttttcgtttttttgttttttttttttgtgttggttgccgtgttcatgagcttgttttgcacgatgttgccgccggcgctgtcgccggcgatgaacagaaaaaaaacgtcgccgtgcaaagaagccagccagcgtgcgaaaaagccggccacaaaagcccggcccaggaatacgacgccggccgacggaagagggggcgccggcgcgaggtggatagcgaccagcaccccaacaacggggggggcaagagccagggggttgacacacctgggggacggggaggagtcggacaactcgcagaggaagccacctggggggg

SEQ ID NO: 5385 - DNA, 1941 bp, Oryza sativa
  Clone ID: PAT_MRT4530_12178C.1
ttaaaaaatctcgcggttaagttgaggaacctcaggtgaacttattccgccaggaaataaaccaggtttcacccaactactattcctgcttagccgtttcaaaaggaggcctttccatagctgctgccgtgatgatagcgcaacatcatcggcctccagcatgcggacgacgctgcccatcgtgggccgcttgtccgctttggggtcgacgcacttgagggcagccacgagcgcgcgcctcagctgccgtttggttggcttggcctccatcgcagggtctactacctcctcggctcttctgctgctagccatcagcttgatccactccagcaggtgcacctcatcggtaggtcgaccatagttaactggatcccttccggtcactgcttccaagagtagcactccaaaactgtagacgtcactcttctcgtttagctgcccagtattagcatattcaggggctacgtacccaaaggttcccataactcgggtagtaatgtggcttttcccagcacgtaagagcttagataatccaaaatcagaaagttttcctgtgaaatctttatcaataaggatattacttgatttgatatcacggtggataacttttggctctatcccctcatgcaaatatgccagtgcttttgcaatgtcaaggataattttcatgcgggcttcccatgtaagaacaccatgttgactccttgcgccatgtaaccactggtctaagttcccattgttgatgtattcatagacaagcatcctgcaacgtgagaagcctaatgatgttttgctgtaaaccatgtcgagctgccagacttgaacattttgtttctttcttaagttgtaattgacttgtgacattgaaggctgtgtaacagcaagaggacatattgtagcagtcactgcaagaaaaatatacaatttcctgtagcttccctcaatgcagtaacctagaagtcgcaccagattcttgtgcctaacatgaccaatagactcaacttcaaccttgaactctttttctgcctgccctatgttgttaaaaagccttttgattgcaacatcagttccatttataagacgaccgtggtaaacaaccccatagccgccctctcctatgatattgtcatcagagaacccatttgttgcgtcctccaaatccctgagagtgaaccaatagccccaacccagatgagagaattctgggagaccaatctgaggagatgtggacattgtggcatactgagagtactccctctcattatgtcctgaggtgccttcgtcactggagtatgagcactgagccttatcattttggtacattgaactgcatccaactaaattatggctaccacttgatttgcagctgaggaaatgagccagcattttccgtgaacctttgttggtctgcctctccttcaatgagagggtgtaactttcttgacgttggacgttttctgcagccactctgtttcttgcttcgtctactgcaatctctttggtaatatctgggatttcaggttcagcagtatcaccaaagcgattacctcgtttcctccagtatataaggaagaagcatatgcaacctaggacaaacagaattgcagcccaaatgctaatgccaagcacaacccatagcctcagaccaaatggaggcgtcctagacaataaccccgcctgtaagttttcgccggttgacatcttcatttccagttgctcggttgctccctctgacgcattaacacaaacagcttccgtgccatgcacaggcacacgaacaaacagctggccatcgtcaatgtcgcggccatgagcggtcatgcgaggacgacgacgacgacgaagacccttatcgcgagctggaggagcagaggccagcagcgccaacccctccgcgccccagccactaccgccaccacctgcacccacgggttccaccat

SEQ ID NO: 5386 - DNA, 611 bp, Oryza sativa
  unsure (1)..(611): unsure at all n locations
  Clone ID: PAT_MRT4530_12179C.1
ttgggtaccccctcgaggggccggccggggcatgtaaggccacatctagttctcgctggcgctcgtccgcacgcctggcgtgcttctgtcgtgtagctgagattcgaagcactggcttgagctcggcgcgatggagctcagggcggtcgactggacgctcgcacgtcctaattctgcaggacgaagggatacctatgacctttacgaagatcgacagcctggagaaggtggacgacattagggcagaggcctactgcacgggtgtcttcaacaatgtacttgagcaccgaataggccatgaccttatggtgtacgatggaacagaaggtggcagttgtttaaggtgctgcttgggctgcccctgcttttgacaccaggcgctgctgttaccacagcatgtcacagagactaatgatgatgtnattagatgagagcgaggaaaacatgtgtgtcacacttggacgactaagaccacacatatggtcgacacgcgcactatgctgtgcaagagtagctaatgctatgtcattaaagatcacttagagcacttttaaggcacgagctcagagatggtgttatcgagaatctgtgtagggtggatgagaacctct

SEQ ID NO: 5387 - DNA, 3096 bp, Oryza sativa
  Clone ID: PAT_MRT4530_1217C.1
atggaagaagatgaagtggaagacgagaacattccggactgggctcagtacgctggatttgaaggaaatcaaacgggcgaggtggacagggatgctgacgataacgacgctgcggatgatcttggtcagatgttgcaggacgccaaggaggaatgcaaaagtgaaaaggaggcccataaattggagcgtacgttagaggacaacagaacgtcgttgtacccaggttgcgagcaggggcacaaaaagttggataccactctggagttcttgcaatggaaggcaaaaaatggactggaagttcagaagattcacgcatgtccgaatgattgtatcctttatcgtggtgaggagtacgagaacctagaagcatgccctgtttgtaaagcactacgatacaagattagacgagatgatccaggtgaagttgacgggcagccaacgaagaagagaatacctgctaaggataggagacaccccgccgatggttcgcagtggggaaacatcgacagaacatttaaagactttggaaaggacgcacgaaacatacggtttggtttaagtacggatggcatgaatccttttggagagataagtagcggccgtagcacttggcccgttacaatgtgtatctacaacctccccccttggctatgcatgaaggggaagtacataatgatgccgattattattcaaggccccaagcaacctgataacgacatcgatgtttacctaagaacactgatcgaagatctgaaactgttgtggaagaaagaaggtgtccccatgtgggacgaggacaaacaggaggagtttaacctacgagcgctgatgttcgtaaccatcaacgattggcctgcacttagcaacctatccgggcagtctaacaaggggtacaaggcttgcactcactgtatggatgaaactgaaagtacgtatcttaagcattgtaggaaggttgtgtacatgggtcatcgtcgattccttgctgcaaaccaccctgtacggaagaaaggcaagcacttcgaacataaggcggaccaccgtacgaagcctaaacatcgcagcgggaatacagtgtttgctatggtgaaagatcttgaagtagtgtttggaaaggggcctggtgtgtgtggaaagtcgaaagatacactggaagcacgtaatgatctgaagcatatggaacaatgcggcgatcttcaccctgaaccaaaggagaaaggaagccattacttgagtccagctagctacactcttagcaagacagagaaggaacgtatgttcgaatgcctggagagcatcaagaagtatgttcgtaactgtgctcgtccagaggcaagcatcgccaaggggtatggaacagaggaggtcaatgaattttgcgtacaatttattgaagaccttcacccaatcggggtgcccgaatcatgccatgaagggagactacggggaatggggactctcggaaggaaagcaataatgacggtagacaacaatttattggtggctccttacatcgaggagcacttggctctagttcacgccaaaaacatcgacgccgccgccgccgccgacgccgccgctactaccgccgccaccactgccgacaccgccactgacaccgccgtcgccgccgtcgccgccgccgagccacgccactgccgctgccgcaccacgccgctgccgcgccacgccactaccgccgccgccgcgccacgccgctgccgccgcgccacgtcgccgcctttgtcgacgccgaagccgccactgcctttgctgacgccgtcgccgccattgccgaacatggctgatcgcgatgacgaacagatactatacaatataattgcagaaggaagcagccagtactggaacgatgaagaggagaacgaggatccaaaccagtacttgaacgaggaagtgaacgaggaggggaacgtggaggaggggaacgaggaggggaacaaggaggagcctagtggaatggaagcctcttctcaaggcacgttccgacctgacagagagaaggacgagctgtcactcgccctgcagactcccgagcatccaggacgaatacgagggaaaggcgtggttccttggaagattggattcaaggaggacatccacacgtacaggagtcagatgaggagcaagagagatactgaggtgaagattgtatatcttgagtacagggtatcgagctacgagctaagcatgcaagaggaggtggcaaggaaggtggatgaacgcatggtcgcacatcagtgccaggatccccagccgtacattcctcctgtaatcgtcagcccctcaggcaatcgtagtagctgcgcctcaacggggcaggtaggatcacagagcatggacgccatgcaaactcaggatgaaaccacatgccccatcgatgaaatcacgcgacggacaccatgtgagctgcatattcccttcaagaacttatcaatcaaggtggcgtcgggaatggccatcccaacggatccttcagggacttaccactgtaggccaatcccagcaggatactcgagggtcgaagttgagctggtggaagcagcgtacaaggacctcgagttggactaccctggaggagacggtgagacgcatctacgagacacaagccacgccattatactttggcgcaagcgctacatcatccttcccgggcaacaagcgacgtctcctgcaccatcacctccgtctccaccatacctccgccacctcctcctgcaccatcacctccggctcctccgcctcctccttcgccgccgcctcctccaactccaccatgtccacctgcacctcccaagacaaggagaagtgaagaaggaactcaagcctcggagtcctgaaaagaagatacctgttgacccgagcgtgaagaacttcttcaagaaaatgtccacaacaaacaaagaggccttaaagctatcggactatgaccgaacacttaagaaagcctattacaagaagtccaaaccagtccctcagcttggagaacaaccaaaccaagaggtcgagccgttggtgaccggcgaagaaattggcataacagaattcatttttgacaccggtctaactgtggattag

SEQ ID NO: 5388 - DNA, 895 bp, Oryza sativa
  Clone ID: PAT_MRT4530_12180C.1
aaagctctcataatcccacacccatggcctccacaaccgccgccgccgaggaccacaagggcaagcgccccctgccgccggaggaggcggacgaggcagcggctgcgccgccccccgccgccgcggaggaggagggcgagaagctggtgctggtgtcggacgacggcgtggaggtgctcgcgtcggtggcggcggcgcgggtgtcgaagacgctccgcggcatgatcgaggacgagtgcgccacgggcgccatccccatcgccggcgtccactccgacgtgctcgccctcctcgtcgagtactgcgagaggcacgcgccgcactacgacccggaggcctccgaccgcgaccgctacccgttcccgcccttccccgtcgagctcccccccaccgcctcctccatcaagcccgtcaccttcgtcgaccccgacgccgacccgcacggcctcaaggcgttcgacaagaagttcctcgacgtcgacaactccaccctcttcgagatcatcatggctgccaactacctgaacatcgaggagctgctcgacgacgcgtgcaccgcggtggcggacaagatgagggggaagaagccggaggagatccgcgacatcttcgagatcgagaacgactacacgccggagcaggaggcggaggtcaggagggagaacgcctgggccttcgaggactgaagggagaggaaggcttggcttgttctgactattagaagataggcctccacagattgagttctgaattactgaaaaaacttccatactggtagaatcaaattaggcatcgaatactgcaaaattttgctgtgagttgtggtggatgttcttctgatctggttcagatcagcacaaaacagttagatagagtaaatcggtatgcttatttt

SEQ ID NO: 5389 - DNA, 4036 bp, Oryza sativa
  Clone ID: PAT_MRT4530_12181C.1
atcacggagtccatagatgggaggattcctactcggatagaactgggtcatcactgtattatgtagggtccgatgtctccaagtcctacttggaggccaactgacctgcggtataaaagggaccccccgggaggacccaaggcatcgaatcgtaccgccaacacatcgaccacagcctacatgatcctcgtaccagcgtaccccaataccctctatatccggtctacgggtatcccccgttgacagtggcgcgccaggtaggggcctttggtgctcaaggttctactactatgtcatcaagcttcgtcgacaacagcgtcaaccctggcttcaaccaaggagtttctacttcaacaatgctggtgtggactcaagtcggtgaaatcgtcttcccggtttacacctcggtgccgatctcgactggtccatcaatggccggaagtgagaacgccgtggttacaaccctggacgactccatgtcgaaggatcctcccgctgaagtagagaacggaacgtcgacaacatccaagcccgagaaggatcctagtgcggccaaaatcttgtccttccgacaagaatcacgagccgacaaggacaacttccgaggtgacagggtcctagtgtcctatccacaaaaccaggaaacacaccttgcaagcttgctgggtttttctcaacgtacaagctgagattcgtgcctgcaaagagcgtgggattcagcgtacttcttcaacccgtgatgtctattgtcctattcacaagacaaagaatcacgacctctcaagctgcaaggtccttctcagcgccatgaagacgtcgcctcctaaggtccagcagttacaaatctctcttagggatgaggacaaggaataaggagcgacgcttgtctcagatcgattcgttggggtaatcgacattgatccccatgagccgtcagtcctacacttgctcgaagaatagggctcatcgtcaacgagtacaccacgcgatgtatttgctatcgatgggaccagcacgtcagcgcgtgctaatgtagaagcggagaatcaagtggttacgccggcccagcatatcagggccatcaacacaatactgagggaaaccccttatgatcccgttctgaacgatgatcttgcacagtggacagaatgactacacgaatcagtggccaacctcagcaacgcgttcgaggaggccgctgccagagcacagctagaacaaccgacagctggcggcgccgatggcgaaccacctgagcagcggacatcacctcaatgagccactcctccacctcgtggtaccggcaatctaaatgaccatctgaatggtcgccgagaagcacgacgcgtgcaagacaacgagaaccgttcccgacatcgcatctcttcacgatgtcacgagaacgaagagcgaggagacgactgccacgatcacgatgatcacgaacagcagatgccgggcgatactggttgaggacgtcgccataacgatgacgacggtggagatcggtgccgggacaataacggggggcgacgacaggattctcgagatcccgaacttcatcctcgtaatcgtacaccggaaccaagtgactcatcatcatcgtcatcatcctcttcatcctcatcgtcagatagacatccacgaaggacatacgatcgctgacaacccaccgcccccagcgtcgggtgtagagctttcagtcgttcgctgcgtgatgtccgatggcctgagagattctaaccgggagcagaagtacgatgggagtaccgacccagaagaattccttcaggtctactccatggtactctacgctgccggagcagacgacaacgtgttggcgaattatttgccgactgcattgaaaggttctgcgcgttcatggctgatacacctctcgccctactcgatttcttcatgggcagatctgtggtagcagttcgttgctaacttcctagtaacttacaagcgccacgcgatcgaagacgacctacacgcgttgacacagaacccgggcgaatccttgagggactatgttcggtgctttaatgagtgcagaaatacaatccctgaaatcaccgacgcttctgtgatccgcgctttcaagtccggtgtcagagatcgctatactacccaggagttggcaacaaggcgcatcacaactactcgaagaatatttgagattgtcgatcgatgcgctcacgtggacgacgcactaagacgcaagaacgacaagccgaaggcagggggagagaagaaaccagccaaggaagcacctgaatcaagcaagaagaaaagtcacaagagtgggaaaaggaaagcccaagcggaagtcctcgcgtcagaatacgcgacaacgaggcatggacaatggcgttcgacggcacactcaacagccaaggagcaggggcaggattcatcttgacatcaccttcgggagatcagggcaagcacgcaattcaccttaacttcagggcaaccaacaacactgccgaatacgaaggactactcgctgggataagagcagcagccgcacctggagtcaagcgtttgatcgtaaaaggggattccaaactagttgcaaaccaggtgcacaaagactacaagtgttctaaccccgagttgtccaagtatctcgcagaagtcaggaagttggaaaaatgatttgatgggatcgaggtccgacacatataccgcaaggacaacatcgaaccagatgatctagcacggcgtgcgtccagatgggagccactcgaacccggcacctttctagacgtcctgacaaagccatcagtgaaacaggcaaacgacgaagatagcccagtcatccccgacgtcagctcgggggctatagaggcagagcgcgccgtcgccgacatcgagaccacggacgactagcggaccccactcattaaattcataagcagcgacgagttgcccgaggacgatgcagaagccgagaaaataacccgtcaagcaaaaatctactgtatgatcggcgacgatctatataagaaggcgccaagcggggtacttctcaaatgtgtctcgtccgacgacggcaaacatctcctccttgacatacatgaagggatctgcgggtcacacgccgccagtcgcacattggtcggaaaagctttttgacaagggtttttttgggcgaccgcccttaaagatgtttgcgaaatgtaaacacacaaagctaccagcacaagcgcagaccatccctcttacttggccgttctcgtgctgggggctcgacatactcggaccattcccatgaggacagggcggctacaggttcctattcgtggcaatcgacaaattcactaagtggattgaagcgacacccacgggggaaatcaaggccgacaacgtcatcaaattcatcaaagggatattctacagatatggattgcctcaccgcatcataacggacaacggctcccagttcatcagtatcgacttccaggattactgcatcaggctgggagtcaagatctgcttcgcctcggtttcttcccctcagagcaatagactggtcgagagggcaaacggcatatcactacaaggaatcaagaccctactatgggccgtacgtactacactgacaacgtccaacaaggagacacatttcttcctcgtgtacggctcagaggccatgctccccaccgagctacgacatcagagtacacgactacagaagtactccgatgaggatcaggaggagcagcgaaacgatgatgtcaatctactcgaagaacatcgagaacgagttgccgtcagagcagctagctaccaacaggcccttcaccgataccccgagaagcgcatcagagcacgcacgctttcaatcggtgactacgtcctccgacgggttcaaagccaagcagggcgaaacaaactctcacccaaatgggaaggaccgtacacgatcacgcaagtcttgcggccaggtgcattcaagattgtagacagcgatggtcgcgagttggtaaattcttggaacattgatcaattacgtaaattctatgta

SEQ ID NO: 5390 - DNA, 429 bp, Oryza sativa
  Clone ID: PAT_MRT4530_12182C.1
tatattctgggacggagggagtggtgggcggcggcgacgagtgtggcggcggtggcggcggcggcgttcatggtgacgttctcgtttgggttcgggtcattcagcgcagatcgagcagcggcggagggtcggcacgcacggtgttgcacgggggcgggtggtgggcggcggcgcgggacacggaccacgggccacaggcgctggcgaggagtgcgctagaggcggcggggctatggcgtcgcggactcacagagagggcgtgagaggcagcgggttgtggcgaggagggcgctccctctccggtgcatcctccaacctcatttgcccctctccccataacgatgatgacgtagcccgcctcctccaacgctctcctcggcgccgcccgccgtgccattcccgcgctctgctgccaccgcccattgccca

SEQ ID NO: 5391 - DNA, 677 bp, Oryza sativa
  Clone ID: PAT_MRT4530_12183C.1
atggtggcggtggaggaggaggcgcgcacgggctgccgttcctggtgctcgcgcgtacggcgttcggggtgcgcagcacgcacttgctggcggtcatcagcgtgctcatcggttgcgggtggttcggcatcgaatcctggatcggtggccgcgccgtgttcctcctcctgccgtccaggctcaagtcgtaccagccgctgctcgcgccagtgccaggcctggggctgcgccgctggagttcgcgtgcttcctcgctttctgggccgcgcagctcggcgtcatcatgcacggcatggagggcatcagcaagctcgagaagtacttggaccatcacgaccaacattcccgccaacgtggtggtgccggcaaacgcgctcgtcagcttgagcccgcggaagttcacgttcgccaaggtggcgctggtcactgcgttgcttcgcatcgccttccagccatggcggctgttcggctccagcgagagcttcatctacacatgcccggtcgagctctcctcaggcaccagcggccgctgggctccccggcgacctataactctgacgcccatgagggcaagggggaggaactccctcctcgtcgccatcgtcgtcgttgtctccggcgagctcgaaggtggcttacggctggcgttggccgtcgggcgcgacttccactcctag

SEQ ID NO: 5392 - DNA, 1617 bp, Oryza sativa
  Clone ID: PAT_MRT4530_12184C.1
atggccatgtccatggcgatgtcgagagctctcgccgcgcggcatcgaagccatttgggccaccgaattgaggtgaagagccaccatgcgtccccgccgcggcttcctcttcttcctcggagtcccgggctcacgctcgcgtcgcgcccgcggatgctaccggcgaggcccaggatgtcgtcgagtgagtcggacctgtcgccgacgccgccgtcggagcgcaccatgacggcctgggacctagccagcctctgggtcggccttgtggtcggcgtgccgtcctactacctcgccggcagcctcgtcgacctcggcatgtcggcgctgcagggcgtcgcgaccgtcgcgttcgccaacctggtggtgctcgtctcgctcgtgctcacggccgcgccggcggtcacgcacgggctgccgttcccggtgctcgcgcgagcggcgttcggggtgcgcggcgcgcacttgccggcggtcatccgcgcgctcgtcggctgcgggtggttcggcatcgagtcctggatcggtggccgcgccgtgttcctcctcctgccgtccaggctcaagtcgtaccagccgctgctcgcgccggtgccaggcctcggtgcagcgccgctggagttcgcgtgcttcctcgcgttctgggccgcgcagctcggcgtcatcatgcacgggatggagggcatccgcaagctcgagaagtactcggcgccggtgctcatcgtgctcacctccgcgctgctggcctgggcctacgtgtccgccggcggcttcgggcgcatcctctcgctgccgccgaggctgacgcgcgccgagttctggaaggtgttcttcccgtcgctcaccgcgaacatcagcttctgggcgacggtggccatcaacataccggacttcgcgcggtacgcgcggagccaggcggaccaggtgctcggccaggccgggctgccggtgttcatgggcatgttcaccttcgccggcctcgccgtgacgtccgccaccgaggccatcttcggccacgtcatctccgaccccatcgagctcctcggccgcatcggcgggccggtgacgacggtgctcgccatcgtcggcatcagcctcgcgaccatcacgaccaacattgccgccaacgtggtggcgccggcgaacgcgctcgtcagcatgagcccgcgcaagttcacgttcgccaagggggcgctggtcaccgcgttgctcggcatcgccttccagccatggcggctgctcagctccagcgagagcttcgtctacacatggctgctcggctactcggctctcatgggcccgatcggagggatcatcctcgccgaccactacatcgtccggcgaaccgcgctggacgtcgacgcgctctactcggaggacagccacgggccttactatttccagggcggtttcaacgtcgccgccatggcggcgatggcggccggagttgcgccgatcgtgccgggattcctgcacaatgttggagttctaccgagcgtctccaaggcatttgagacagcctacaacaacgcttggttcgtcagttttttcgtcgccggcgccgtctactgcctgctctgtcgccggaataggaatgaactgaaacaccagcacgattga

SEQ ID NO: 5393 - DNA, 952 bp, Oryza sativa
  Clone ID: PAT_MRT4530_12185C.1
ggattaactggaataaactaaccagagtcgaacgactgatgttgaagatcacggatgatttgttaggggtgaaatccactcgaacccagagctactggttctccccgaaatgcttgaggcgcacagttgactggacatctaggggtaaagcactgtttcggtgcgggctgcgcgacggtaccaatcgaggcaaaactctgaatactagatatgacccaaaataacaggggtcaaggtcggccagtgagacgagggagagttaagtttgttgtcagcgcatttttttttctggcacgagaagtactttggagaaaacatgggaaagataaaggtggagataaaggtgccatgcggatgaaaggaagaatctaaagttatgcaagtaattgctaaacatagtggaatcttgtcatcacaccgatcgagataaagataaggtgaccatagttgccacgaaaatatggatgtcacatgtttgacaatggaattgaggaaacagatgcggcgtactcacattgtcattgacacggtcacaccggttgatgagaagaaggaaaaggaggagaaggaaaagaaggagaaagaggagaaggagaagaaagagaaagaggagaaggagaagaagaagaaggaagaagagcaaaacaatcccaagattgtttgtacgccgtactatgtgcacatggtggacgagcccagtccatcatgctgccagatgtagctatattgtatgaaatcactatgagtgtgttgtggagaattttggaagatttattatcagccatttgctgcaaattgatacatgtatagttaatgagttcaaataactttagttttctgttttgtttttccttattcttcttcacgcaagtatgaagaactgaattgtacttaaattgggtaggaaactggtggtttttgctactccctacaaaaaaaaaaaaaaaaaaaa

SEQ ID NO: 5394 - DNA, 1201 bp, Oryza sativa
  Clone ID: PAT_MRT4530_12186C.1
atgccactgccgttcctttttccatctcctatctcacgccgtctcgtttcccccgtcagatgtggcgtcatatcacgttatttccctcttctttcttcctgcgaactcggcggccacagcgagcgctcgagggctgaggaggtcagagaggaagacgtacggcgacgcccgcgggggagtggaggagggagcggaggaggtcgcggaggtgcgggagcgcgcggcggcttcctggtcggcctccgcatccgccgggagcttcaacggcctcccatccgccggccgaccattcgttcctcttcttcggcgaggaggccgacgccgccggctgcctcctcccccgggcttgctcctcgtgctccaccgcggcaagagagcgtcgaggagtggaagtcgcggccgacggccaacgccagccgtaagccaccttcgagctcgccggagacaacgacgacgatggcgacgaggagggagttcctccccctggagatccacgacgatgacgaggacggtgacttcctggtcgccgacatccacccacccccgtcgcgccgcagctgctacgtgcccggccggcgcaacgtggcgtcgccaccgtcgcacatggcgacgccgccgtgctcgacgatgagctcggtctcgggagctgccgccgccgccgtcctcgacgatgcaggtgcacgaccttgccctcatggccgtcagagttataggtcgccggggagccgagcggccgctggtgccggaggagagctcgaacggccatgtgtagatgaagctctcgctggagccgaacagccgccatggctggaaggcgatgccgagcaacgcagtgaccagcgccaccttggcgaacgtgaacttccgcgggctcaagctgacgagcgcgtttgccggcaccaccacgttggcgggaatgttggtcgtgatggtccaagtacttctcgagcttgctgatgccctccatgccgtgcatgatgacgccgagctgcgcggcccagaaagcgaggaagcacgcgaactccagcggcgcagccccaggcctggcactggcgcgagcagcggctggtacgacttgagcctggacggcaggaggaggaacacggcgcggccaccgatccaggattcgatgccgaaccacccgcaaccgatgagcacgctgatgaccgccagcaagtgcgtgctgcgcaccccgaacgcc

SEQ ID NO: 5395 - DNA, 321 bp, Oryza sativa
  unsure (1)..(321): unsure at all n locations
  Clone ID: PAT_MRT4530_12187C.1
tcctgaagttgctgccccggatgctgctgctgcagtgtacataatagccccctgtgatntttntggcctcctggcttgtaattctgttctagtttgttttttttttntaattgttacncatttttgggcggtgccggctgttgaaacctaaanagtttnttnttctttttaatctcccccnatttncattgtaaacggcaggcttgtgtagccaaaaatgccaagttgtgtgttgcaagttgcaacttgatgtgttctttaaattagtgtaatacatggagtaataggctgcnaaaaaaaaaaaaaaaaaaaaaaaaaaaa

SEQ ID NO: 5396 - DNA, 670 bp, Oryza sativa
  Clone ID: PAT_MRT4530_12188C.1
cgcgcgcggtgctgccgttgccgtaggcgttggtctgcacacgccactggccgcccctacggctgcccaggaggtcgcgcgcggtgctgccgttgccgtaggcgttggtctgcacacgccactggccgccccaacggctgcccaggaactcgaagtccagctcgtcgtgcgtcttctcgtacacgtccccgtttgacaggtagaaggcaacgacgacgccggccgtgtaagccttgggcaacttgatggacgcgctgaagaagccgtggaggtagtaatccgaggagatgaacccagaaccggagcgccggtcgagcaagaggcggacgctcttatcatccgacgagcggacgaggttgtcgtcgccgaacagcggcgagtacccttcgtcgaaggcgacgctcggcacggcgaaagcagaggccaccgccgataagcacaagcacgtcgcggcgacggcgaacacggccgccaaaaagaacctggcctccaacgccatggctggccgcttttgatgctctagctagctgctccgatctctctctctctctctctctctatctctggctctcgcctcctcacttatattcccctttctttctcaagaaccgaacttttctctccctacgccggacgcgtggtcgcgctgcccaagaacccacgctgtcgt

SEQ ID NO: 5397 - DNA, 243 bp, Oryza sativa
  unsure (1)..(243): unsure at all n locations
  Clone ID: PAT_MRT4530_12189C.1
atgttgtggttttggggnnnnttttctgggggtacattttttttcttgtgtgtcaaacgggaaaacccacgcgggacctaagaggggaaccacaaaacgaatttaaattggnccccaaaaacaaaccaatacctaaaaacccccccctatcttaaaaaaacccgcccccgggggcgccccctgggggaaccctgaggccagcccgggaagcaacccaatgggggccccgtgggtccccccggg

SEQ ID NO: 5398 - DNA, 2850 bp, Oryza sativa
  Clone ID: PAT_MRT4530_1218C.1
atggaagaagatgaagtggaagacgagaacattccggactgggctcagtacgctggatttgaaggaaatcaaacgggcgaggtggacagggatgctgacgataacgacgctgcggatgatcttggtcagatgttgcaggacgccaaggaggaatgcaaaagtgaaaaggaggcccataaattggagcgtacgttagaggacaacagaacgtcgttgtacccaggttgcgagcaggggcacaaaaagttggataccactctggagttcttgcaatggaaggcaaaaaatggccccaagcaacctgataacgacatcgatgtttacctaagaacactgatcgaagatctgaaactgttgtggaagaaagaaggtgtccccatgtgggacgaggacaaacaggaggagtttaacctacgagcgctgatgttcgtaaccatcaacgattggcctgcacttagcaacctatccgggcagtctaacaaggggtacaaggcttgcactcactgtatggatgaaactgaaagtacgtatcttaagcattgtaggaaggttgtgtacatgggtcatcgtcgattccttgctgcaaaccaccctgtacggaagaaaggcaagcacttcgaacataaggcggaccaccgtacgaagcctaaacatcgcagcgggaatacagtgtttgctatggtgaaagatcttgaagtagtgtttggaaaggggcctggtagccatcctatagagagagaagatggtcacgcggcgatgtggaaaaagaactctattttttgggagttaccctattgggaattcttggacgtccgccacgcaatcgacgtgatgcacctcactaagaacctttgtgtaaacctgcttggcttcctaggtgtgtgtggaaagtcgaaagatacactggaagcacgtaatgatctgaagcatatggaacaatgcggcgatcttcaccctgaaccaaaggagaaaggaagccattacttgagtccagctagctacactcttagcaagacagagaaggaacgtatgttcgaatgcctggagagcatcaagaagtatgttcgtaactgtgctcgtccagaggcaagcatcgccaaggggtatggaacagaggaggtcaatgaattttgcgtacaatttattgaagaccttcacccaatcggggtgcccgaatcatgccatgaagggagactacggggaatggggactctcggaaggaaagcaataatgacggtagacaacaatttattggtggctccttacatcgaggagcacttggctctagttcacgccaaaaacatcgacgccgccgccgccgccgacgccgccgctactaccgccgccaccactgccgacaccgccactgacaccgccgtcgccgccgtcgccgccgccgagccacgccactgccgctgccgcaccacgccgctgccgcgccacgccactaccgccgccgccgcgccacgccgctgccgccgcgccacgtcgccgcctttgtcgacgccgaagccgccactgcctttgctgacgccgtcgccgccattgccgaacatggctgatcgcgatgacgaacagatactatacaatataattgcagaaggaagcagccagtactggaacgatgaagaggagaacgaggatccaaaccagtacttgaacgaggaagtgaacgaggaggggaacgtggaggaggggaacgaggaggggaacaaggaggagcctagtggaatggaagcctcttctcaaggcacgttccgacctgacagagagaaggacgagctgtcactcgccctgcagactcccgagcatccaggacgaatacgagggaaaggcgtggttccttggaagattggattcaaggaggacatccacacgtacaggagtcagatgaggagcaagagagatactgaggtgaagattgtatatcttgagtacagggtatcgagctacgagctaagcatgcaagaggaggtggcaaggaaggtggatgaacgcatggtcgcacatcagtgccaggatccccagccgtacattcctcctgtaatcgtcagcccctcaggcaatcgtagtagctgcgcctcaacggggcaggtaggatcacagagcatggacgccatgcaaactcaggatgaaaccacatgccccatcgatgaaatcacgcgacggacaccatgtgagctgcatattcccttcaagaacttatcaatcaaggtggcgtcgggaatggccatcccaacggatccttcagggacttaccactgtaggccaatcccagcaggatactcgagggtcgaagttgagctggtggaagcagcgtacaaggacctcgagttggactaccctggaggagacggtgagacgcatctacgagacacaagccacgccattatactttggcgcaagcgctacatcatccttcccgggcaacaagcgacgtctcctgcaccatcacctccgtctccaccatacctccgccacctcctcctgcaccatcacctccggctcctccgcctcctccttcgccgccgcctcctccaactccaccatgtccacctgcacctcccaagacaaggagaagtgaagaaggaactcaagcctcggagtcctgaaaagaagatacctgttgacccgagcgtgaagaacttcttcaagaaaatgtccacaacaaacaaagaggccttaaagctatcggactatgaccgaacacttaagaaagcctattacaagaagtccaaaccagtccctcagcttggagaacaaccaaaccaagaggtcgagccgttggtgaccggcgaagaaattggcataacagaattcatttttgacaccggtctaactgtggattag

SEQ ID NO: 5399 - DNA, 271 bp, Oryza sativa
  Clone ID: PAT_MRT4530_12190C.1
ccggccggaacaaaaggcattcagttcattagtcctacaacaaacatggcatccataaatcgccccaaagtttttcttcacagtttggcttggttcctcttgtgcgatggctccctagccagcagctattagggcagagcactaatcaatgggagaaagtttccgtcgtggaaagcccaagaggaggaatttgataggttgcaagcatttgagccaattcggagtgtgaggtctcaagctggcacaactagggtcttcgatgttctaatga

SEQ ID NO: 5400 - DNA, 684 bp, Oryza sativa
  Clone ID: PAT_MRT4530_12191C.1
cggaagcttgatccccgggctgcaggaattcgggacgggtgccggccgtgtccacctctcccaccaccacccaagcagccaaggcggaggaggggagccggccggcgacgcgcgcgccaccatcccagcgacgatgccgcagctgagcctgaccaccaacgtgcccgtcgacgccgtcgtcgccgccgacatcatcaaggactgctccaaggcgctcgccaggatcatcggcaagcccgaatcctacgtcatggtgtcgatcagcgggtcggtgcccatgtcgttcgccgccagcgaggagccggcggcctacggcgagctcatgtccattggcggcatcggccccggcgtcaacggaaagctgagcgccgctctcgccgagatcctcgagaccaagctctccgtcagcaggtctaggttctacgtcaaatttgacgatgtcaagggattcaatttggggttcaatgggtcgacattctgaggccaagtccgtcaaaagttggattgctgcgtcgaatcaataaaattctaaggctaaatgttacatgtcatgtgtatcattccgttgcactttcgacatcatccatgaatgtgtttcgtttatgtgagagaccgaactttgcctgctttatttcatcaaaaatacatcgaagtctgtttgctgaacaccaggcaattcccaaa

SEQ ID NO: 5401 - DNA, 752 bp, Oryza sativa
  unsure (1)..(752): unsure at all n locations
  Clone ID: PAT_MRT4530_12192C.1
acgcctcgtcgccgccgccgccgccgccgccgccgcgcgacgtcctagcttcccggaccgcctccgcgtggttggatccggcgagaggggagaactgttgtgttccttggaagcgggagctggatgaaagctgggaggaagaacctacggcgggcgtgcagcgagggcgccgtcacgctgggggagggcgagagcatcatgcaggtcctcgcgctgcgcggctccaacgtcatcgaggtgatggacgccaagggagtgaagtctctggccttgttcccggccaagttccagaagagcttttggatcaagaatgggaattttgtggttgtggatgctagtggccgggatcaggcgctcgaatcagggagcaagatagcctgtgttgtgtcccaagtcctcttccatgaccaagtccgggctatggagaaatctgaggaatggccagctatcttcaagtcaacttctaaggaaggttcagaagctggaacacaagaaggaacaaggccacagattgaggaggaaccggattctgatgaagatgatgatctgccaccgcttgaggcgaacacgaatagacaaagaccatttgaactgtatgccgactcagagagtgattctgactcttagactagtttacatttgaacncgccattgatgatgttgtggtttgtgatggaaaaatacacccggngtacttatggtcaagtnttacattntgccaaaaaaaaaaaaaaaaaaaaaaaaaaaaaaaa

SEQ ID NO: 5402 - DNA, 300 bp, Oryza sativa
  Clone ID: PAT_MRT4530_12193C.1
atgatgacaggtcgcccatgggtgatcgcgccacgcatgggggcgtgcaatctgggaaaatggagggcccgcctggccacatccggaattatcgcttcgcgtcgcatcggtcgcgcgtccgtcaggtgcgcgaaacgagattatcggtgggcccgcctagccacatccgaaatcatcgcgcgcctcacgtcggttacgccgctgtcagccgcattgaatgcgggacatggacgtagtgggacgagcggggcgagtgggacgagcgggcgcgagaatcaagggggcggcagcagcgactga

SEQ ID NO: 5403 - DNA, 1274 bp, Oryza sativa
  Clone ID: PAT_MRT4530_12194C.1
ggtatattccgtcgcgggagccgacgtgtctcgttcctcgtccgtaggagccacaccggggggctaatgctatccttccttccaagttccaactaaacagaagcgacgcagcaaggcacagctgggccgccgacaatggcgatggcggcgcgggcggcgtacctggcggcgacgcgcgcggcgctggcggcgctggagcgcaacgccctccccgacgcggtcacccggcgcctgacgcggctgctgctcgcgcagcgcctccgcctcggctacctcccctcctcctcctcctccgcgccgctccacctccaccacctcctcctcttcgcccacgctctagaagagatgcccatcgcaatcgagacggagaaagctaaagaccagcactacgagttgcccacgacatttttcaagctggttcttggaaggaatctcaagtacagctcatgttacttccctgacgaatcgagcacccttgaagatgccgaggttgcaatgctggagctatattgtgagagggcacaattacaggatggccaaaccattcttgatgtcgggtgtggttggggatccctttctctgtacatagcgaagaaatatagcaagtgtagtataacagggatttgcaactcgacaacacacaagcctggttatgaggaggatgataattccctagtataacgaaatgtaggcaaccttgtgttcagattcgttgtattagaaaatatccgctccaatagtaggttcatttccatagaaatgtttggagtaaataagaaacattaaagcacttctcagacctcacttgatgattcaggaatcgtgctttgcatgacctctatgaacattttcatttttattgcgttaaattgcaagtagtgagatgctttgctgtgttgtttcgtttccaataaactgtagttattttccttcatttttttttcacgtcaatgttgatggttttcctgagtgaacaaggatatagatcgttgtgatttacggattttgtcggcgcacgttcttcatctcagtcgccgagctttttggatacaacaatggcgatgagtggatggttgcgcatttcttgatccggaagaagtagtacaaagttcactactttgggaaactattgcatcattttgacaggtcatttaaatagttattatttttttaaaaaaaatgatataataaatcaatatgatgtatgccattccacaaatatgcaaattcaaattcaatctgaagtgttatttttttttctactcacactaaat

SEQ ID NO: 5404 - DNA, 5415 bp, Oryza sativa
  Clone ID: PAT_MRT4530_12195C.1
atggatgaagtcgggggtcgatggacattctccagggcaaatgaaggctacacgagctgcggcccgatggccggcagcgtcacccgtcgtggtttggacatgactggcttcgtcttggagctgcgaggcatgtgcgtggtcttggggtatccacacggagtggattaccaggtcaggccgctcccggagcaggagggtgaggatgcagagcctcacgctgcttgggaggtcactgcagtgatcctctccggctctcccgagcggacttcgctgacagtcaccgcgggtggcgactccttccccgccgcttgccagaacgccgctctcctcgccatcggcactcttcaccagcgctacccggacgagttgcagcactcgccctaccgctaccaccctcgtcgcggaggagcccgcgactacgccaccttccgagacgccagctcggaggatgacgctaccgtcgtgcatctggcacgcatggtggaggcgtacgacgcggctcgtatcgacttccatcagatggtgcgccgtggcatggtcgagaacaacatgaagatcctggagctgcgtcaagagaatctgcagctcaagaaggacctcgacgcgttggaggcgcagctgcatcagctcaagatcgcccagggagagatcagccgccccaagcgtcgccgcgtctgccgcagccagaagatcaccgcccgcaagagcacctccaggcccgagcttgttcgtcagtccctggcgtggacttgcttcgtcgagaccccttgtgccgagcctgcgcccgtggttccccaggagggggaagcctccggcgttggtagctcggagggtgcgctgttgctcaccttccgtcctggcccgtcgcagcgctcttcttctctgtttgctggttccgtgtggggttttcagatggtgacgaccaggagaaatgttaacaccggtggaggcaaccaacccgaaggcagcaaccccaacccccaaggcaacccacctccaccaccaccaccagacaccaacgctattctcacccagatcctcgcccaacaagccaacatgatgaatgctttcctccaccacctccaaaattcaccacaacagaatgctccaccaccccctccccaacactccaaactcgccgaattcctccgcatccgcccacctaccttctccagctccaacaaccctgtggatgctttggattggttgcatgccgtggggaagaagctagacacggtgcagtgcagcgacgaagagaaagtcatcttcgccgcccatcagctgcagggacccgcatctctctggtgggaccatttccaggccacgcagccagaagggcaaccgattacttggactcgcttcaccgccgctttccggagaacccatgtgcccgctggagtcgtggctcttaagaagagggaatttcgggagttgaagcaaggcaatcgctccgtgatggagtatttgcatgagttcaacaatctagcccgttatgccccggaggatgtgcgggaagatgaggagaagcaagagaagttcttggcaggaatggaccctgagctgtccgttcgtctcgtctctggggactatcctgattttcaacgactggtggacaagagcatccgcttggaagccaagcacaaggagctggaatcgcacaagcgccgcttggcgaatttccgcaatcagcagggtgctaaccagagggtccgctacaccaatccctacccagggggatcctcctctcagcagcagcagcagcagcagcaacctcgctccgcgcctcgacctcaattcgtggtgcgcgtcccacagcagcaacagcagcagaatcagcaagggactcgtgcgccacgtcctcctacgccaactgtgcagcctgttcaaggtcgcagggacgcttcaggtccgcagcgtctgtgcttcaactgcttcgagcccgggcactttgcggataaatgcccaaagccaaggcgtcagcaaggccaagcgcctccccgctccaacaacggtggcaaggatgtcattcggggtcgtgtgaatcacgtgacggccgaggacgtgctgacaactccagacgtcatcgttggtacgttcctcgttcattccatccctgctacaattttgttcgactctggagcttcccactcgtttatatctgtgccattcgtggggagaaatcagttgggggtagaaaggcttagaaaccctctgcttatcaccacccctggaggggttatgacagcaaagtattatagccctgccgttcctatagaaattcaggggattccttttccctcggatctgattctgctagacaccaagaacttggatgtgattcttgggatgaattggttggcccaattccaaggggtagtggattgcgcgaggcgcactgtcactctgtaccgagggccagaacaaccggttgttttctttgcacctccaacctctgtcagaagttcagaactgcatcagataggtctgtcagaaatccccatcgtcagagagttcggagacgtgtttccggaagaactacctggtatgccgcccaagcgagagattgagttccggatagatcttgctccaggaaccactcctctgtacaagcgaccctaccgtatggcagcaaatgaactggccgaagtaaagaaacagttggaagagttgaaagaaaaggggtacatacgtccgagtacttccccatggggtgctcctgtgatttttgtagagaagaaagacaagacgaagaggatgtgcgttgactacagagctctcaatgaagtcaccatcaaaaacaagtaccctcttccccggatcgatgatctgttcgatcagcttaaaggtgccaccgtattctccaagattgatcttcgttccggatatcaccaattacgtattcgtgaagaagatattccgaagaccgcattcaccacgcgatatggactgtatgaattcacggtgatgtcgttcggcttgaccaatgctcctgccttcttcatgaacttaatgaacaaagtgttcatggaatacttggacaagtttgttgtggttttcatcgatgacattctgatatactcacaatcagaggaagaccatcagcaccatctccgtttggtattgggaaagttgcgggaacatcaattgtatgccaagcttagcaagtgtgagttctggttgtccgaagtcaaattcttagggcacgtgatatctgctaaaggagttgctgtggatcccgaaacagtgaccgccgtcaccgattggaagcaacctaagacagtcactcaaatccgcagtttcttaggtttggcaggatactaccggagattcatcgagaacttctccaaaatcgctcgacccatgacacagttgctgaagaaagaagagaagtttgtgtggagcccgcaatgcgagaaggcgtttcaaactctcaaggaaaagctggtttcctcgccagtgttaatcttgccggatactcgcaaggacttcatggtgtattgtgacgcttcgcgccaaggattggggtgcgtgctcatgcaggacggtcatgtggtagcctatgcttcacgtcagctacgacctcatgaaggcaactaccctacgcatgacttggagttagcagcggtggttcatgctctaaaaatctggcggcactacctcattgggaatcgctgtgaaatctataccgaccataagagcttgaaatacatcttcacccagtcggatctgaatcttcggcaaaggagatggttagaactcatcaaggattatgatgtgggaatacactatcatcctggtaaggccaacgtggttgccgacgctctaagtcggaagagccactgcaacactctcaacgtccgaggcattccacccgagcttaatcaacagatggaagccctgaacctaagcatagttggtcgcggatgcttggctgcgttggaagccaagcctaccttgctcgatcaaatccgcgaggctcagaagaatgatccggacatgcatggactcctcaagaatatgaaacagggtaaagccgcaggtttcacagaggatgaacacggaaccttatggaacggaaagcgggtatgcgttccagatagcagagaacttaaacagctgatactccaggaagctcacgaaagtccttattccattcacccgggcagtaccaagatgtacttagacttgaaggagaaatactggtgggtcagcatgaagcgggaaattgcagagtttgtggctctatgtgatgtgtgccagcgtgtcaaggcagaacaccaacgaccggccggacttctccagcctctccaagtgccggaatggaaatgggatgaaattgggatggatttcatcaccggccttccaaaaacccaaggtggatatgattctatatgggtaatagtggatcgattaaccaaggtagctcgatttattcctgtgaagaccacctatggagggaacaaactagcggagctctacttcgctaggatcgtgagtctccatggcgttcccaagaaaatcgtatctgataggggaagccaattcacctctcacttttggaagaagctccaagaagagctgggtactcgattgaatttcagcaccgcctatcacccgcagacagatggacagaccgagcgtctaaatcagattctagaagatatgcttcgcgcatgtgtcctagacttcgggaagacttgggataagagtctcccctatgccgagttctcctacaataacagctatcaagccagcatacaaatggcaccctatgaagcgttgtatgggcgcaaatgccggacaccgctattgtgggaccaagttggagaaagccaagtgttcgggactgatatcctgagagaagctgaagctaaagtcagaatcattcgggataatctaaaggtggcacagtctcggcagaaaagttatgcagataaccgtcgccgtgatctggaattcgcagtggatgactttgtgtatcttcgggtcacgccattgcgaggtgtgcacaggtttcagacaaaagggaagctcgcacctcggtatgtgggtcccttccgtatcatcgctcgacgcggagaagtcgcctaccagctggagttgcccgcctccttgggcaacgtgcatgatgtgttccatgtgtcgcaactcaagaaatgtcttcgagtgccatccgagcaggccgactcagagcaaattgaagttcgcgaagacttgacctatgtggagaagccagtgaaaatcctggacaccatggagcgcaggaccaggaaccgagtaatccgtttttgcaaggtccagtggagcaaccacgccaaagaagaagctacttgggagcgcgaagacgagctgaaggcagcccatcccggtctcttcgctagttcttccgaatctcggggtcgagattccgtttaa

SEQ ID NO: 5405 - DNA, 2477 bp, Oryza sativa
  Clone ID: PAT_MRT4530_12196C.1
ctatgggtgcaactcatcatgataaagcctacaatatttatcaaatatgaaacaaaaaatacagttccctctttcaaataccatgtaatgtaaaagtaaaactcctatatctatactacgaattttaacaacagtagctcaaaaaggatcattcttttttttttaatctcggcaccacaagccaaaaatcaatatacaacaactaatcaacctatgaacataaacaaaaagaaagaaagattacaacaacaaaagaacttatattattcatccagttggtcattggtgtgtgcaatcgaccacacgcccttgaacatcccagctgactgaagtgagaaatccgacacaactctgaacagctccggcaaattcgtcctgagaaggctgagggacttctccctgaccaccctgcactgcttgacatacatctcctccagctccttcatagaaagctccaacttttccatggcagccttccgttccgccatcggatcggggcgtgcaccgtcagggttcctgtcctcaggaaggatacccgcagtttggtggatgtacttttgtgcccagtcatcgaattgcctcctcttcttcccataatccctcctggtatcctcgatcttcatccggagcttcagttcgtcttcctgatgaaccaggattgtctttacgatctctgcaaacgtgtttatcgccttcttggcagcctcatcggggagctttccgaggatttcatgccaagcatgcagcaccctcttgatgggaggtgtggtctcatgtggctgtgatgaatttggcttcaagttggtgtcgatggggatcacattcagcttgatccaggtgtagagggatcccacatactgcttctggtatgtcatgaacttgtcgaactgagtgtgccactcatgtacaacattccacagctgcacggtccggtcatggtgttgctcgcttgtttcccgcggggcgaccgagatgtccaacgacttgagctccaagatgatcttgagctgtgttttgtgatgaaggtacattgcatcccacatgtgccacattcccttcacaagttcaagaagttttgggtataattgttgatctctgagacggttgatctctgcaactgttgactccattgtttgcagatcaactacatattttgtgtgcaagtgactaacaaccgacttggtcttctcaagtgaggaagaagtgacaccacgctgcttctttttgttgagaacagctagcttttgttgatattccctcctgataacctcaaaatccttgacttcatggtatagttttttctcccatgcaagcagcttatcaagagtggtagcatgtgtctcccattcgtcatcgtccatttcattcctcacattttccggttgaggtatccctttaaacgagcgattccaagtgattacttgcatcactctggcagaatggtccacaaatcctcgcgtctcagcgaagttggagtggtagtgcatcctggcggcctcgagcagcttggacacctcgtgcgcgctctgcgacgccttgaggaagtgttcgtccagggcgcggaggatgtcgccgacgcccagcttggccggctgcggctgcggcggcgccaccagcatcaccgccttcgccttccccttcctcgccgccttctgcgtcatcgcccgccgcgtcgtcgccgcctctgccgcggccggcctcttgccctccgccacctctctcgccgccgccgatggctggtgttcgtccggcgcggggggtggtggttctctccgctcggccgacgccgaagacgatggctcggcggcggcggtgtccagagtgggcggcggcatggagtcgaacaaggagctgatgaacccgccgggggtgtccaccttgtggtcattctccggcgggaggggaggcggggagcgggagggaggggggcgctgcgaggggagcggcgggggtggcttcagttcggcgtcgtcgtcacctcgccgtcctcccgcgtcgccgccgtcgccgccctcgtcgtcctcctcctccatgatgggcgcctcgccggacggcttcttcttgatcggctgctgcaggtgcaggtccggcgcgctcatcgacctcgcgagcggcgccgcctcaacgtcgccatgcggaggcagcggcgggggcgggggaggcgggggaagctcgggcggcggcggcggcaggatagccagcacgggcttgccatcggaggacgccgtgacgagcgccgccgccgcggccgaagagtcagccgaccccgaccgcagagccccgccggcgtgggcctcgccctcgccggaggcgtagtcggagagcgcggcgccgacgttcttgagcgcggcggcgtggcccgcgtgcgcgcccgccagcgcgtggcgggcggcgacggcgtcgcgcaggaggtgcttccgctcgcggcaccgcgccacggggccctcgccgtcctcattggactgcgcgcaccccat

SEQ ID NO: 5406 - DNA, 5563 bp, Oryza sativa
  Clone ID: PAT_MRT4530_12197C.1
atggatgaagtcgggggtcgatggacattctccagggcaaatgaaggctacacgagctgcggcccggtagtcgagatgtcgtggcagagggttggtgccctgctgcttggggctcagtcctgcctgcctgtcccggaggttccggccgtaggcgggattgggtcgatgtacacctctgatcagagtataatctattcgaatagccgcgccctcggttatgggcaagccgagcaatgtacccaaatggccggcagcatcaaccgtcgtggtctggacctgactggcttcgttttggagctgcggggcatgtgcgttgtcctggggtatccgcatggagtggattaacagggcaagcagctcccggagcaggagggtgccgatgcagagccccacgctgcttgggaggtcactgcagtgatcctcactggctcacccgagaggacttcgttggcggtcaccgcgggtggagattctttctccgccgcttgccagaacgccgctctccttgccatcggcactcttcaccagcgctacccggacgagttgcagcactcgccctaccgctaccaccctcgtcgcggaggagcccgcgactacgccaccttccgggatgctagctcggaggatgacgctaccatcatgcaccaggcgcgcatggtggaggcgtacgacgtggctcgtatcgacttccatcagatgatgcatcgcgggttggtcgagaacaacatgaagatcctggagctgcgtcaggagaatctgcagctgaagaaggacctagacgcagtggaggcgcaactgcgtcagctcaagatcgcccagggagaggtctgtcgccccaagcgtcgccgcgtctgccgcagccagaagatcaccgctcgcaagagtacctccaggacctgtttcgtcgagacccctcgtgccgagcgcgcgcctgtggttcctcaggaggatggagcctccggcgttggcagcacggaggatgcgctgatgctcaccttccgtcctggcccatcgcagctgtaggcgagcagttagtaggtttgcgcatggtgacgaccaggagaagtgctgctaccggtgaaggcagtcaccccgagggcagcaaccacacaaccatggcagcccacctccacctccccctccgcctccaccaccaccaccagacaccaacgccattctcacccaaatcctcgcccagcaggccaacatgatggctgctttcctccaccacatccaaaatccgccaccacataatgctccaccaccacccccacaacactctaaactcgctgagttcctccgcatccgtccgcctaccttctctagctccaataaccccgtggatgcgttggattggttgcatgccgtggggaaaaagttagacaccgtgcagtgcagcgatgaggagaaagtcatcttcgccgcccaccaattgcaggggcccgcatctctatggtgggaccatttccaggctacgcagccagaggggcaacctattacttgggcccgcttcaccgccgctttctggagaacccatgtgcccgccggagtcatggcccttaagaaaagggaattccgagagttgaagcaaggcaaccgctccgtgatggagtatttgcatgagtttaacaacctggcccggtacgccccggaggatgttcgtgaagatgaggagaagcaagagaagttcttggcaggaatggaccctgagctgtccgtccgtctagtctccggggactatccggatttccaacgtctggtggacaagagcatccgcttggaagccaagcacaaggaactggagtcgcacaagcgtcgcttggcgagtttccgcaaccaacagggggctaaccaaagggtccgctacaccaatccctatccagggggatcctcctcacagcagcagcaacagcagcagcaacctcgctccgcgccccgacctcaattcgtggtgcgcgtcccacagccgcagcaacagcagagtcagcaagggactcgtgcgccccgtcctcctacgccagccgtgcagcctggtcaaggccgcagggacgttcaaggtccgcaacgtctgtgcttcaactgcttcgagcctgggcactttgcggataaatgcccaaagccgaggcgccagcaaggccaagcgcctccccgctccaacaacggtggtaaggatgtcattcggggtcgtgtgaaccacgtgacggccgaggacgtgctgacaactccagacgtcatcgttggtacgttcctcattcattccatccctgctaccattttgttcgactctggagcttcccactcatttatatctgtgccattcgtggggagaaatcagttgggggtagaaaggcttaggaaccctctgctcatcaccacccctggaggggttatgacagcaaagtattatagccctgccgttcctatagaaatctagggaattccttttctctcggatttgattcttcttgacaccaagaacttggatgtgatccttgggatgaattggttggctcaattccaaggagtagtggattgtgcaagacgcactgtcactctgtaccgagggccggaacaaccggttgttttctttgcacccccaacctctgtcggtagttcagaacttcatcagataagactgtcggaaatccccatcgtcagagagttcggagacgtgttttaggaagaactacctggtatgcctcccaagcgagagattgagttccggatagatcttgctccaggaaccactcccctgtacaagcgaccctaccgtatggcagcaaatgaactggccgaagttaagaaacaattggaagagttgaaaggaaaggggtatatacggccgagtacttccccctggggtgctcctgtgatttttgtggaaaagaaagacaagacgaagaggatgtgcgttgactacagagctctcaatgaagttactatcaaaaacaagtaccctcttccccggatcgatgatctgttcgatcagcttaaaggtgccactgtattctccaagattgatcttcgttccggatatcaccagttgcgcatccgtgaagaagatattccgaagaccgcattcaccacgcaatacggactatatgaattcacggtgatgtcgttcggtttaaccaatgctcctgccttcttcatgaacttaatgaacaaagtgttcatggaatacttggataagtttgttgtggttttcattgatgacattctggtatactcacagtcagaggaagaccatcagcaccatctccgtctggtgttgggaaagttgcgggaacatcaattgtatgccaaacttagcaagtgtgagttctggttgtccgaagtcaaattcttagggcacgtgatatctgctaaaggagttgctgtggaccccgaaacagtgaccgccgtcaccgattggaggcaacccaagacagtcactcaaattcgcagtttcttgggtttggcaggatactaccggaggttcatcgagaacttctccaaaatcgctcgacccatgacacagttgttgaagaaagaagagaaatttgtgtggagcccgcaatgcgagaaggcgttccaaactctcaaggaaaagctggtttcctcgccagtgttaatcttaccggatactcgcaaggacttcatggtgtattgtgacgcttcgcgccaaggattggggtgcgtgctcatgcaggaaggtcatgtggtagcctatgcctcacgccagctacggccccatgaaggcaactaccctacccatgatttggagttggctgctgtggttcatgctctaaaaatctggcggcattatctcattgggaatcgctgtgaagtatatactgatcataagagtttgaaatacatcttcactcagtcggatctgaatcttcggcagagaagatggttagagctcatcaaggattatgatgtgggaattcactatcatcctggtaaggccaacatggtcgccgacgctctaagtcgaaaaagccattgcaacactcttgacgtccgtggcattccacccgaacttaatcaacagatggaagccctgaacctaagcatagttggtcgtggattcttggctacgctggaagccaagcctaccttgctcgatcaaatccgcgaggctcagaagaatgatccggatatgcgtggactcctcaagaatatgaaacagggtaaagccgctggtttcacagaggatgaacacagaaccctatggaacgggaatcgggtatgcgttccagacgacagagaacttaaacagctaatacttcaggaagctcacgaaagtccttactccatccaccctggcagtacgaagatgtacttagacttgaaagggaaatactggtgggttagtatgaagcgggaaattgcagagttcgtggccctttgtgatgtgtgccagcgtgtcaaggcagagcaccaacgaccggccggacttctccaacctctccaagtaccagaatggaaatgggatgaaattgggatggatttcatcaccggacttccaaaaacccaaggtggatatgattctatatgggtagttgtggaccgattaaccaaggtagctcggtttattcttgtgaagaccacctatggagggaacaaactagccgagctctacttcgctaggatcgtgagtctccatggcgttcctaagaaaatcgtatctgataggggaagccaattcacctctcacatttggaagaagctccaagaagagttgggtacccgattaaatttcagcaccgcgtatcacccgcagacagatggacagaccgagcgtctaaatcagatcctagaagacatgcttcgtgcatgtgtcctagatttcgggaagacctgggataagagtctcccctatgccgagttctcctacaataacagctaccaagccagcatacaaatggcaccctatgaagcgttgtatggacgcaaatgccagacaccgctattgtgggaccaagttggggaaagctaagtgttcgggactgatatcctgagagaagctgaagctaaagtcagaaccattcgggataatctaaaggtggcacagtcccggcagaagagttatgcagataaccgacgccgtaatctggaattcgcagtggacaattttgtgtacctttgggtcacgccattgcgaggtgtacacaggtttcagatgaaagggaagctcgcacctcggttcgtgggtcctttccgtatcattgctcggcgcggagaagtcgcttaccagttggagctgcccgcctccttgggcaacgtgcatgatgtgttccatgtgtcgcaactcgagaaatgccttcgagtgccatccgagtaggccgactctgagcagattgaagttcgcgaagacttgacctacgtggagagaccagtgaaaatcctggacaccatggaacgcaggaccaggaaccgggtaatccgtttttgcaaggtccaatggagaaaccacgctgaggaagaagctacttgggagcgtgaagacgagctgaaggcagcccatcccgatctcttcgcccgttcttccgaatctcggggtcgagattccgtt

SEQ ID NO: 5407 - DNA, 2273 bp, Oryza sativa
  Clone ID: PAT_MRT4530_12198C.1
atggatgaagtcgggggtcgatggacattctccagggcaaatgaaggctacacgagctgcggcccggtagtcgagatgtcatggcacagggttggtgccctgctgtaggggctcagtcctgcctgcctgtcccggaggttccggccgtaggcgggattgggtcgttgtacacctctgatcagagtataatctattcgaatagccgcgccctcggttatgggcaagccgagcaatgtacccaaatggccggcagcgtcacccgtcgtggtttggacatgactggcttcgtcttggagctgcggggcatgtgcgttgtcctggggtatccacatggagtggactaccaagccaggccgcttccggagcaggagggtgacgatgcagagccccacgctggttgggaggtcactgcagtgatcctctctggctctcccgagcggacttcgctggcagtcaccgcgggtggagattccttccccgccgcttgccagaacgccgctctcctcgccatcggcactcttcaccagcgctacccggacgagttgcagcactcgccctaccgctaccaccctcgtcgcggaggagcccgcgactacaccaccttccgggatgctagctcggaggatgacgctaccatcgtgcacctggcgcgcatggtggaggcgtacgacgcggctcgtatcgacttccatcagatggtgcgccgcgggatggtcgagaacaacttgaagatcctggagctgcgtcaggagaacctgcagctcaagaaggacctagatgcggtggaggcgcagctgcatcagctcaagatcgcccagggagaggtctgccgccccaagcgtcgccgcgtctgccgcagccagaagatcaccgcccgcaagagcacctccaggcccgagcttgttcgtcagtccctggcatggacttgcttcgtcgagacccctcgtgctgagcccgcgcccgtggttccccaggagggggaagcctccggcgttggtagcacggaggttgtgtggggcatggttatgccgatggtgacgaccaggagaaatgctaacaccggtgatggcaaccaacccgaatgcagcaaccacaaccaccagggcaacccacctccacctcctcctcctcctccaccaccaccaccagacaccaacgccattctcacccaaatcctcgcccagcaagccaacatgatgaccgctttcctccaccacctccaaaacccgccacaacaaaatgctccaccaccacccccacaacactctaaactcgccgaattcctccgcatccgcccacctaccttctctagctccaacaaccccgtggatgctttggattggttgcatgccgtggggaaaaagttaggcactgtgcagtgcagcgatgaggagaaagtcatcttcgccgcccaccagctgcaaggacccgcatctctatggtgggaccacttccaggctacgcagccagagggacagcctattacttgggctcgcttcaccgccgctttccggagaacccatgtgcccgccggagtcgtggcccttaagaaaagggaattccgagagttgaagcaaggcaaccgctccgtgatggagtatttgcatgagttcaacaatctggcccgttacgctccggaggatgtgcgggaagatgaggagaagcaagaaaagttcttggcaggaatggaccccgagctgtccgtccgtctagtctctggggattatccggattttcaacgactggtggacaagagcatccgcttggaagctaagcacaaggagctggagtcgcacaagcgtcgcttggcgaatttccgcaatcaacagggtgctaaccaaagggtccgctacaccaatccctatccagggggatcctcctcgcagcagcaacaacagcagcagcaacctcgctccgcgccccgacctcaattcgtggtgcgcgtcccacagccgcagcagcagcagaatcagcaagggactcgtgcgccccgtcctcctacgccaactgtgcagcctggccaaggccgcagggacgctcaaggtcagcagcgtctatgcttcaactgcttcgagcccgggcactttgcggataaatgcccaaagccaaggcgtcagcaaggccaagcgcctccccgctccaacaacggcgggagggatgtcattcggggtcgtgtgaatcacgtgacggccgaggacgtgctgacaactccggacgtcatcgttggacggtcatgtggtagcctatgcctcacgtcagctacgacctcatga

SEQ ID NO: 5408 - DNA, 5469 bp, Oryza sativa
  Clone ID: PAT_MRT4530_12199C.1
atgtcatggcacagggccggtgtcctgctgctaggggctcagtcctgcctgcctgtcccggaggttccggccgtaggtgggattgggtcggtactcttgtctatggctaggatgggttggaaactatgtcacgtcttccgtctgtataccgtggtgatggccggcagcgtcacccgtcgtggtttggacatgactggcttcgtcttggagctgcggggcatgtgcgtggtcctggggtatccacatggagtggactaccaggccaggccgcttccggagcaggagggtgacgatgcagagccccacgctggttgggaggtcactgcagtgatcctctctggctctcccgagcggacttcgctggcagtcaccgcgggtggagattccttccccgccgcttgccagagcgccgctctcctcgccatcggcactcttcaccagcgctacccggacgagttgcagcactcgccctaccgctaccaccctcgccgcggaggagcccgcgactacgccaccttccgggatgctagctcagaggatgacgctaccatcgtgcacctggcgcgcatggtggaggcgtacgacgcggctcgtatcgacttccatcagatggtgcgccgtgggatggtcgagaacaacatgaagatcctggagctgcgtcaagagaacctgcagctcaagaaggacctagacgcggtggaggcgcagctgcatcagctcaagatcgcccagggagaggtctgccgccccaagcgccgccgtgtctgccgcagccagaagatcaccgcccgcaagagcacctccaggcccgagcttgttcgtcagtccctggcgtggacttgcttcgtcgagatccctcgtgccgagcccgcgcccgtggttccccaggagggggaagcctccggcgttggtagcacggaggatgcgctgttgctcaccttccgtcctggcccgtcgcagcggagaagtgctaacaccggtgatggcaaccaacctgaaggcagcaaccaccaccaccagggcagcccacctccacctcctcctccgcctccaccaccaccaccagacaccaacgccattctcacccaaatcctcgcccagcaggccaacatgatgactgctttcctccaccacctccaaaatccgccacaacataatgctccaccaccacccccacaacactctaaactcgccgagttcctccgcatccgcccacctaccttctctagctccaacaaccccgtggacgcgttggattggttgcatgccgtggggaaaaagctagacactgtgcagtgcagcgatgaggagaaagtcatcttcgccgcccaccagctgcagggacccgcatctctatggtgggaccatttccaggctacgcagccagaagggcaacctattacttgggcccgtttcaccgccgctttccggagaacccatgtgcccgccggagtcgtggcccttaagaaaagagaattccgagagttgaagcaaggcaaccgctccgtgatggagtatttgcatgagttcaacaacttggcccgttacgccccggaggatgtgcgggaagatgaggagaagcaagagaagttcttggcaggaatggaccctgagctgtccgtccgtctagtctccggggactatccggatttccaacgtctagtggacaagagcatccgcttggaagccaagcacaaggaactggagtcgcacaagcgccgcttggcgaatttccgcaatcaacagggtgctaaccaaagggtccgctacaccaatccctatccagggggatcctcctcgcaacagcaacaacagcagcagcaacctcgctccgcgcctcgacctcaattcgtggtgcgcgtcccacagccgcagcagcagcagaatcaacaagggactcgtgcgccccgtcctcctacgccaactgtgcagcctggtcaaggccgcagggacgctcaaggtccgcagcgtctgtgcttcaactgcttcgagcccgggcactttgcggataaatgcccaaagccgaggcgtcagcaaggccaagcgcctccccgctccaacaacggtgggaaggatgtcattcggggtcgggtgaaccacgtgacggccgaggacgtgctgacaactccagacgtcatcgttggtacgttcctcattcattccatccctgctaccattctgttcgactctggagcatcccactcgtttatatctgtgccattcgtggggagaaatcagttgggggtagaaaggcttaggaaccctctgctcatcaccacccctggaggggttatgacagcaaagtattatagtcctgccgtccctatagaaattcaggggattcctttttcctcggatctgattctgctagacaccaagaacttggatgtgatccttgggatgaattggttggctcaattccaaggagtagtggattgtgcgagacgcactgtcactctgtaccgagggccggaacaaccggttgttttctttgcacccccaacctctgtcagtagttcagaacttcatcagataggactgtcagaaatccccatcgtcagagagttcggagacgtgtttccggaagaactacccggtatgccgcccaaacgagagattgagttccggatagatcttgctccaggaaccactcctctgtacaagcgaccctaccgtatggcagcaaatgaactggccgaagtcaagaaacagttggaagagttgaaagaaaaggggtatatacgtccgagtacttccccctggggtgctcctgtgatttttgtggagaagaaagacaagacgaagaggatgtgcgttgactacagagctctcaatgaagtcaccatcaaaaacaagtaccctcttccccggatcgatgatctgttcgatcagcttaaaggtgccactgtattctccaagattgatcttcgttccggatatcaccaattacgtattcgtgaagaagatattccgaagaccgcattcaccacgcgatacggactgtatgaattcacagtgatgtcattcggtttaaccaacgcacctgccttcttcatgaacttaatgaacaaagtgttcatggaatacttggataagtttgttgtggttttcattgatgacattctgatatactcacaatccgaggaagaccatcagtaccatctccgtctggtgttgggaaagttgcgggaacatcaattgtatgccaaacttagcaagtgtgagttctggttgtccgaagtcaaattcttagggcacgtgatatctgctaaaggagttgctgtggaccccgaaacagtgaccgccgtcactgattggaagcaacccaagacagtcactcaagtccgcagtttcttaggtttggcaggatactaccggaggttcatcgagaacttctccaaaatcgctcgacccatgacacagttgttgaagaaagaagagaaatttgtgtggagcccgcaatgcgagaaggcgttcaaaactctcaaagaaaagctggtttcctcgccagtgttaatcttgccggatacttgcaaggatttcatggtgtattgtgatgcttcgcgccaaggattggggtgcgtgctcatgcaggatggtcatgtggtggcctatgcctcacgccagctacggcctcatgaaggcaactaccctacccatgatttggagttagatgcggtggttcatgctctaaaaatctggcggcactatctcattgggaatcgctgtgaaatatatactgatcataagagtttgaaatacatcttcactcagtccgacctgaatcttcggcaaaggagatggttagaactcatcaaggattatgatgtgggaattcactatcatcctggtaaggccaacgtggtcgccgacgctctaagtcgaaaaagccattgcaacactcttaacgtccgtggcattccactcgaacttagtcaacagatggaagccctgaacctaagcatagttggtcgcggattcttggctgcgttggaagccaagcctaccttgctcgatcaaatccgcgaggctcagaagaatgatccggacatgcatggactcctcaagaatatgaaacaaggtaaagccgctggtttcacagaggatgaacacggaaccctatggaacggaaatcgagtatgcgttccagataacagagaacttaaacagctgatactacaggaagctcacgaaagtccttattccatccaccctggcagtacgaagatgtacttagacttgaaggagaaatactggtgggttagtatgaagcgggaaattgcagagttcgtggccctttgtgatgtgtgccagcgtgtcaaggcagagcaccaacgaccggccggacttctccaacctctccaagtacctgaatggaaatgggatgaaattgggatggatttcatcaccggacttcgaaagacccaaggtggatatgattctatatgggtagttgtggatcgattaaccaaggtagctcgatttattcctgtgaagaccacctatggagggaacaaactagccgagctctacttcgctaggatcgtgagtctccatggcgttcccaagaaaatcgtatctgataggggaagccaattcacctctcacttttggaagaagcttcaagaagagctgggtacccggttaaacttcagcaccgcataccacccgcagacagatgggcagaccgagcgtctaaatcagatcctagaagatatgcttcgcgcgtgtgtcctggatttcgggaagacctgggataagagtctcccctatgccgagttctcctacaataacagctatcaagccagcatacaaatggcaccttatgaagcgttgtatgggcgcaaatgccggacaccgctcttgtgggatcaagttggggaaagccaagtgttcgggactgatatcctgagagaagctgaagctaaagtcagaaccattcgggataatctaaaggtggcacagtcccggcagaaaagttatgcagataaccgtcgccgtgacctggaattcgcagtggacgattttgtataccttcgggtcacgccattgcggggtgtacacaggtttcggacaaaagggaagctcgcacctcggtatgtgggtcctttccgtatcgttgcccgacgcggagaagtcgcttaccaattggagctgcccgcctccttgggcaacgtgcacgatgtgttccatgtgtcgcaactcaagaaatgccttcgagtgccatccgagcaggccgactcagagcaaattgaagttcgcgaagacttgacctacgtggagaggccagtgaaaatcctggacaccatggagcgcaggaccaggaaccgggtaatccgtttttgcaaggtccagtggagcaaccacgtcgaagaagaagctacctgggagcgtgaagacgagctgaaggcagcccatcccgatctcttcgccagttcttccgaatctcggggtcgagattccgtttaa

SEQ ID NO: 5409 - DNA, 2933 bp, Oryza sativa
  Clone ID: PAT_MRT4530_1219C.1
ctttttttttttttatagataaccaaatcaagaaatattattcaataacatttcagtttacaatttcactgttttacacgcaaagtttagacctgagctaaaaaaagcttcctgacactatcaaggtatattctaccgaatccgtcatgtccccaggaagtcccatatgaatttagatagatcagataacattcaccgtcccgaatcccaaaaccaacaacaacgacacaatgagaacagggattaccttttttattcaattcatattggggatcttcttctggaattttgtagatttgatgaggtagcaacctgaagtaaccagttgttacccggaaactagcaatgagcacctttccatccattatatggctctcaataactttctttatcttcgtcagaaatatgtgctccttcattctcatcttttttctgaacctcctttttttcttctttcctatacacttcttgtcaacaatgcttacttcttccttatcacgttccctcatcgcaatctcaagattgagctcttcgtattgtttgattttgtatctttctgtggactgagcctgagggttcatatatgattcttccgaaataacgccttcatttttcatcttatctaaacaaacattcaaccttttcgaacccttgactttatgcctggtataaaaatcttctactatatcttccaactgagctcttgacagattaaccagaaattcatcaggctgtccaatcttatcttttaagatagtagggtatgatgcatattctcttttatacaaggactcaactgatgatagtgtcgcgtaatatgatctcgtcccagaagtttgttgcctcactggagggagaattaatctgttatgaaacttccttgttctccaactaaaacagagatcagtgctgtgctctttcaaactctcaaaagcatatgcatcggcattgaagctcccctctataaactggtttgagacaatgggcacaacttcagatagaccatacatttgagtcattttgtcaactttagcacggatgtcaccaaggaaattgattatctggaacaaatttatctgtgtagacttctccataatagtttgttgatatctagcaaagcgaacaaggcatctcactttgccattaaagatacttccaaactctctcatttcagaattaattccatcgataagtttcaaatgtctggtggaattattcatgaacagttcaacaatttgaagtgtcttgatcatttcatatactgcacaactggttacttcacctggagcaaactcagctatatcgaccttcagctgcaaaacttcatcttctaattttcctatttctgaggaggtatccatgatttttctgaatgaagcctgcaaatttgagcctaactgtgacacccagacttcttcatcttgtactcttaaatttaacttctgaagcatctggtgcaaactggatgataaatccatcgcagacgtgttctccttatcgagtttcttgacttgtgaatccagacgaacataggcaattgaactaaaccgtggttcctcaatcatcaactccaaataattattaagacacctcaaagcacagttattatgttcagcagtttcaactgattgtcgaatagatggtccatatttgttgttgaagtctgtcagatgttgaatctgagccttttccaatttgccttccatcttccaaattcgttttttacctttgtttattttttgtctcacagtggccaaatcaagtaatactgactcaagcaattttgccaacttatcaataactctgaacattgattcacgaaaccatttcctagacacactgtgacgtagacaccaaatatgaggaatcttttgtcggtagagccttgtgcttgacctggttatcttggtggaacatttcttgctttttcgttcatccaattctctgatgaagatactttttttgtctgaagacacagcctgggaattcattaccatattttgcctttgtatttctgcaagatattgagagtaggatcccagaaaattatgatgaacacctaaattcaaggagatatgttcatcttcaacaatctttctgtctttctgaaggaacattctacatagagacttgtaggcctgtggtaaattcagttcatcattctgttctatcaaatattcgtacatcatcaacccacttcttgtaccgcatggtgtttggccttcatgaaactctaaacagagtttcacgcccaagatagatgtgcctgtctgtattctgcaagcatcaacgcacttccaatatccattctttgcctttctgaaaacattgttctcgtcatcatagcatagctggttatcaggccaattcaagaaccaaagggttccaggggagtcccgtggatcaatcatagtaaggtcaacccccaccagtatgttctgtggaagaggatcccatgtttttctctcagccaagaacatgatgatttcagtatcagaccaagagtcccccatagcaatgccaagtggtggtagtaccctagaaaataactccattttcagcaatgcactgcgataagatgcaatggtgtttctcacgtcctccctgccgcgcttgtacacctcctgcgccttctccgctagcgcgcctgccgccgccgccgccgccactgcctttgtcttggcgagctcgagctcggccttcacgctccacagctcctcccgcaacgcgtccgcctccgcgccagcatcgcgctctcgcgccctcatgtagtaggttgaggcgatcacgtccacctccaccccgctgtcatgcttgcccgtcgctgctctgccgctgccctctacctgcttcgccttccgctcgctttgaagaggaagagaagagagaaaagagaagagaaggagaagaaaagaggagagggtggctgacat

SEQ ID NO: 5410 - DNA, 566 bp, Oryza sativa
  Clone ID: PAT_MRT4530_121C.1
ggggattgacattattttgttgaattgcttcacgctggaacttaacgaacgatttacacaggttgggcacggacagaccgaaccttttttctatttccctttttgtctttgttcttaatatcgtcctgtcactaaccatcctttttttttttgaactgctcgtgaagcatgtggctgaaagctaacatctctttgacctgtgcaaaatgccaccaatcataatttgtcaactaacattggggggattttgttgtcaatgggatcactctcctctggatatagtttaatgcacttcatgtcccgattaaaagcctcttggacttgatatgcgcaaggctgagtaggaagtctaggacaatatgctcataacctgacattttcctatatccaccaaaaagggtgatgccaatgacataggacccaacctttttttcatgctctctaatcatatcaaagaaaaacagtctaagacccagactgcgctggagctccttacgaagattgtctataagtggctgtggaggaatgtcatccctagatgggtcaacttctgcatcttgtgcacc

SEQ ID NO: 5411 - DNA, 6391 bp, Oryza sativa
  Clone ID: PAT_MRT4530_12200C.1
tggtttagtcttttgtttttttttccgctgcgtagaactttgttgtaatgtgtcacgtcctgataaattcatcccgaaattaaaaatcattttcacccctccccgccgtcgcccttctctttcccccgcgccggccgcctccagccgcctctccctcctcgcccgagcgccgtccggccgtgccgtcgcctcctccagcgtcgcagccgcctcctctccaccggcctgccctccgtttcgcgcggtgaccaccggaggcgcgttcccgccgtcgtccagtgccgttgccgccactgtaccacctccagccgcccctgccgcgccgctcaggtgcgggccggccgcgccgtctcctccttcggcgtcgccgcgtcgacctccaccccggcctgctctttgattcgtctggagaccgccgtcgcccgtgccggcctctccatcctcgtcgtcgccaacgtccatttggccgccccttcctcctccccggctcgtcggctcgctgcgccgccaccgtcatcgtcatcgcagcggcgtgttcagcgccgcctcttctccgtgcagccgctctggctgccctcgtcgcctcctcaccggccccggtggtcatcatcgtcgtcctctcgtcgttcccggtcgtcgtggcgttcgtccctccgtcgagccgttctcgtccgtcgtccgcgtccgccaagcaagccgcggcagccccgtcctcgtcttcgtcctcgactccgcgtcgtcaagccttgtccaaggatcgccgccgccgtgtaccggtgtcggtagtcgttcgtgggtgcgtgtggtgaccgtgtttgtgtgcccgctcggtagccgcgtgatttccacgtgtgcaacccgcgtggtgtctagtggagtccgtttgtcggccactcgcctcggttggcacacggggtccgcttccgtcgacccgtggaccgtctctgtgtactcggttttctttttatgtattgttatttcttctttataggcttgtagctttgcttgtgtgcttcgcgtagcttctatcgttccggaggttccagaagcgtggttcgcgggtgtcgccgaaggttcggaaggccgttctccctctcttcctctttcaaaacccctaaaacctgttttctggtggggtttgggtgcatgccagttgtgggaagtagcaccccggccaatataaggattaagctcgggcctctgttgcaaagcactaccgtacttccacatgtctagtggggcaaatgaaggctacacgagctgcggcctggtagtcgagatgtcatggcacagggccggtgtcctgctgctaggggcttagtcctgcctacctgtcccggaggtttcggccgtaggtggggttgggtcaatgtacacctctgatcagagtataatctattcgaatagccgcgccctcggttatgggcaagccgagcaatgtacccaaatggccggcagcatcaaccgtcgtggtctggacctgactggcttcgttttggagctgcggggcatgtgcgttgtcctggggtatccgcatggagtggactaccagggcaagcggctcccggagcaggagggtgacgatgcagagccccacgctgcttgggagattactgcagtgatcctcactggctcacccgagaggacttcgttggtagtcaccgtgggtggagattccttctctgccgcttgccagaacgccgcactcctcgccatcggcactctccaccagtgctacccgaacgagttgcagcactcgccctaccgctaccacccttgccgcggaggagcccgcgactacgccaccttccgggatgctagctcggaggatgacgctaccatcatgcacctggcgcgcatggtggaggcgtacgacgcggcccatatcgacttccatcagatggtgcgtcgtgggttggtcgagaacaacatgaagatcctggagctgcgtcaggagaatctgcagctgaagaaggacctagacgcagtggacgcgcagctgcgtcagctcaagatcgcccagggagaggtctgtcgccccaagcgtcgccgcgtctgccgcagcctgaagatcaccgcccgcaagagtacctccaggcccgagcttgttcgtcagtccctggcgtggacctgcttcgtcgagacccctcgtgctgagcccgcgcccgtggttcctcaggaggatggagcctccggcgttggcagcacggaggatgtgctgctgctcaccttccatggtgacaaccaggagaagtgctgctaccggtgaaggcagtcaccccgaaggcagcaaccacaacaaccatggcagcccacctccacctcctcccccgcctccaccaccaccaccagacaccaactccatcctcacccaaatcctcgcctagcaggccaacatgatggctgctttcctccaccacatccaaaatccgccacaacataatgctccaccaccacccccacaacactctaaactcgccgagttcctccgcatccgtccacctaccttctctagctccaataaccccgtggacgcgttggattggttgcatgccgtggggaaaaagttagacaccgtgcagtgtagcgatgaggagtaagtcatcttcgccgcccaccaactgcaggggcccgcatctctatggtgggaccatttccaggctatgcagccagaggggcagcctattacttgggcccgcttcaccgccgctttccggagaacccatgtgcccgccggagtcatggcccttaagaaaagggaattccgagagttgaagcaaggcaaccgctccgtgatggagtatttgcatgagtttaacaacctggcccggtacgccctggaggatgttcgtgaagatgaggagaagcaagagaagttcttggcaggaatggaccctgagctgtccgtgcgtctggtctccggggactatctggatttccaacgtctggtggacaagagcatccgcttggaagccaagcacaaggaactggagtcgcacaagcgtcgcttggcgaatttccgcaaccaacagggggctaaccaaaaggtccgctacaccgctacaccaatccctatccagggagatcctcctcgcagcagcaacagcagcagcaacctcgctccgcgccccgacctcaattcgtggtgcgcgtcccacagccgcagcaacagcagagtcagcaagggactcgtgcgccccgtcctcctacgccagccgtgcagcctggtcaaggccgcagggacgttcaaggtcagcagtgtctgtgcttcaactgcttcgagcctgggcactttgcggataaatgcccaaagccgaggtgccagcaaggccaagcgcctccccgctccaaccacggtggtaaggatgtcatacggggtcgtgtgaaccacgtgatggccgaggacgtgctgacaactccagacgtcatcgttggtacgttcctcattcattccatccctgctaccattttgttcgactctggagcttcccacttgtttatatttgtgccattcgtggggagaaatcagttgggggtagaaaggcttaggaaccctctgctcatcaccacccctggaggggttatgacagcaaagtattatagccctgccgttcctatagaaattcagggaattcctttttcctcggatctgattcttctagacaccaagaacttggatgtgatccttgggatgaattggttggctcaattccaaggagtagtggattgtgcaagacgcactgtcactctgtaccgagggccggaacaaccggttgttttctttgcacccccaacctctgtcggtagttcagaacttcatcagataagactgtcggaaatccccatcatcagagagttcggagacgtgtttccggaagaactacccggtatgccgcccaagcgagagattgagttccggatagatcttgctctaggaaccactcctctgtacaagcgaccctaccgtatggcagcaaatgaactggccgaagtcaagaaacagttggaagagttgaaagaaaaggggtatatacggccgagtacttccccctggggtgctcctgtgatttttgtggagaagaaagacaagacgaagaggatgtgcgttgattacagagctctcaatgaagttactatcaaaaacaagtaccctcttccccggatcgatgatctgttcgatcagcttaaaggtgccacggtattctccaagattgatcttcgttccggatatcaccagttgcgcatccgtgaagaagatatcccgaagaccgcattcacctcgcgatacggactatatgaattcacggtgatgtcgttcggtttaaccaatgctcctgccttcttcatgaacttaatgaacaaagtgttcatggaatacttggatatgtttgttgtggttttcattgacgacattctggtgtactcacaatcagaggaagaccatcagcaccatctccgtctggtgttgggaaagttgcgggaacatcaattgtatgccaaacttagcaagtgtgagttctggttgtccgaagtcaaattcttagggcacgtgatatctgctaaaggagttgctgtggaccccgaaacagtgaccgccgtcactgattggaagcaacctaagacagtcactcaaattcgcagttttttgggtttggcaggatactaccggaggttcatcgagaacttctccaaaatcgctcgacccatgacacagttgttgaagaaagaagagaaatttgtgtggagcccgcaatgcgagaaggcattccaaactctcaaggaaaggctggtttcctcgccggttttaatcttaccggatactcgcaaggacttcatgttgtactgtgacgcttcgcgccaaggattggggtgcgtgctcatgcaggaaggtcatgtggtagcctatgcctcacgccagctacggccccatgaaggcaactaccctacccatgatttggagttggccgctgtggttcatgctctaaaaatctggcggcattatctcatcgggaatcgctgcgaaatatatactgatcataagagtttgaaatacatcttcactcagtcagatctgaatcttcggcagagaagatggttagagctcatcaaggattatgatgtgggaattcactatcatcctggtaaggccaacgtggtcgccgacgctctaagtcgaaaaagccattgcaacactcttgaagtccgtggcattccacccgaacttaatcaacagatgcaagccctgaacctaagcatagttggtcgtggattcttggctacgctggaagccaagcctaccttgctcgatcaaatccgcgaggctcagaagaatgatccggatatgcgtgaactcctcaagaatatgaaacagggtaaagccgctggtttcacagaggatgaacacagaaccctatggaacggaaatcggatgtgcgttccagacgacagagaacttaaacagctgatacttcaggaagctcacgaaagtccttattccattcaccctggcagtacgaagatgtacttagacttgaaagggaaatactggtgggttagtatgaagcgggaaattgcagagttcgtggccctttgtgatgtgtgccagcgtgtcaaggcagagcaccaacgaccggccggacttctccaacctctccaagtaccagaatggaaatgggatgaaattgggatggatttcatcaccggacttccaaaaacccaaggcggatatgattctatatgggtagttgtggaccgactaaccaaggtagctcggtttattcctgtgaagaccacctatggagggaacaaactagccgagctctacttcgctaggatcgtgagtctccatggcgttcctaagaaaattgtatctgataggggaagccaattcacctctcacttttggaagaagctccaagaagagctggatttcgggaagacctgggataagagcctcccctatgccgagttctcctacaataacagctaccaagccagcatacaaatggcacactatgaagcgttgtatggacgcaaatgccggacaccgctattgtgggaccaatttggggaaagccaagtgttcgggactgatatcctgagagaagctgaagctaaagtcagaaccattcgggataatctaaaggtggcacagtcccggcagaagagttatgcagataaccgacgccgtaatctggaattcgcagtggacgattttgtgtaccttcgggtcacgccattgcgaggtgtacacaggtttcagacgaaagggaagctcgcacctcggtttgtgggtcctttccgtatcattgctcgacgcggggaagtcgcttaccagttggagctgcccgcctccttgggcaacgtgcatgatgtgttccatgtgtcgtaa

SEQ ID NO: 5412 - DNA, 7112 bp, Oryza sativa
  Clone ID: PAT_MRT4530_12201C.1
cacctcggccatataaggaccggtcttcgggcctctgttgcaaagcactaccgtacttccacatgtctagtgggacaaatgaaggctacacgggctgcggttcggtagtcgagatgtcatggcacagggccggtgtcctgctgctaggggctcagtcctgcctacctgtcccgggagttccggccgtaggtgggattgggtcgatgtacacctctgatcagagtataatctattcgaatagccgcgccctcggttatgggcaagccgagcaatgtacccaaatggccggcagcgtcagccgtcgtggtttggacatgactggcttcgtcttggagctgcggggcatgtgcgtggtcctggggtatccacatggagtggactaccaggccaggccgcttccggagcaggactgtgacgatgcagagccccacgctggttgggaggtcactgcagtgatcctctctggctctcccgagcggacttcgctggcagtcaccacgggtggagattctttccccgccgcttgccagagcgccgctctcctcgccatcggcactcttcaccagcgatacccggacgagttgcagcactcgccctaccgctaccaccctcgccgcggaggagcccgcgactacgccaccttccgggatgctagctcggaggatgacgctaccctcgtgcacctggcgtgcatggtggaggcgtacgacgcggctcgtatcgacttccatcagatggtgcgccgtgggatggtcgagaacaacatgaagatcctggagctgcgtcaagagaatctgcagctcaagaaggacctagacgcagtggaggcgcagctgcatcagctcaagatcgcccagggagaggtctgccgccccaagcgtcgccgtgtctgccgcagccagaagatcaccgcccgcaagagcacctccaggcccgagcttgttcgtcagtccctggcgtggacttgcttcgtcgagacccctcgtgccgagcccgcgcccgtggttccccaggagggggaagcctccagcgttggtagcacggaggatgcgctgttgctcaccttccatggtgacgaccaggagaagtgctaacaccggtgatggcaaccaacctgaaggcagcaaccaccaccaccagggcagcccaccttcaccttcttcttcgccttcaccaccaccaccagataccaacgccattctcacccaaatcctcacccagcaggccaacatgatgactgctttcctccaccacatccaaaatccgccacaacataatgctccaccaccacccccacaacactctaaactcgccgagttcctgcgcatccgcccacctaccttctctagctccaacaaccccgtggatgcgttggattggttgcatgccgtggggaaaaagctggacactgtgcagtgcagcgatgaggagaaagtcatcttcgccgcccaccagctgcaggggcccgcatctctatggtgggaccatttccaggctacgcagccagaggggcaacctattacttggacccgtttcaccgccgctttccggagaacccatgtgcccgccggagtcgtggcccttaagaaaagagaattccgagagttgaagcaaggcaaccgctccgtgatggagtatttgcatgatttcaacaacctggcccgttacgccccggaggatgtgcgggaagatgaggagaagcaagagaagttcttggcaggaatggaccctgagctgtccgtccgtctagtctccggggactatccggatttccaacgtctggtggacaagagcatccgcttggaagccaagcacaaggaactggagtggcacaagcgccgcttggcgaatttccgcaaccaacagggtgctaaccaaagggtccgctacaccaatccctatccagggggatcctcctcgcagcagcaacaacaacagcagcaacctcgctccgcgcctcgacctcaattcgtggtgcgcgtcccacagccgcagcaacagcagagtcagcaagggactcgtgcgcctcgtcctcctacgccaactgtgcagcctggccaaggccgcagggacgcttcaggtccgcagcgtctgtgcttcaactgcttcgagcccgggcactttgcggataaatgcccaaagccgaggcgtcagcaaggccaagcgcctccccgctccaacaacggtgggaaggatgtcattcggggtcgggtgaaccatgtgacggccgagaaggtgttgacaactccagacgtaatcgttggtacgttcttcattcattccatccctgctaccattttgttcgactctggagcttcccactcgtttatatctgtgccattcgtggggagaaatcagttggggatagaaaggcttaggaaccctctgctcatcaccacccctggaggggttatgacagcaaagtattatagtcctgccgtccctatagaaattcagggaattccttttccctcggatttgattctgctagacaccaagaacttggatgtgatccttgggatgaattggttggctcaattccaaggagtagtggattgcgcgagacgcactgtcaccctgtaccgagggccggaacaaccgattgttttctttgcacccccaacctctgtcagaagttcagaacttcatcagataggactgtcagaaatccccatcgtcagagagttcggagacgtgtttccagaagaactacccggtatgccgcccaagcgagagattgagttccggatagatcttgctccaggaaccactcctctgtacaagcgaccctaccgtatggcagcaaatgaactggccgaagtcaagaaacagttggaagagttgaaagaaaaggggtatataggtccgagtacttccccctggggtgctcctgtgatttttgtggagaagaaagacaagacgaagaggatgtgcgttgactacagagctctcaatgaagtcaccatcaaaaacaagtaccctcttccccggatcgatgatctgttcgatcagcttaaaggtgccactgtattctccaagatcgatcttcgttccggatatcaccaattacatattcgtgaagaagatattccgaagaccgcattcaccacgcgatacggactgtatgaattcacggtgatgtcgttcggtttaaccaatgcacctgccttcttcatgaacttaatgaacaaagtgttcatggaatacttggataagtttgttgtggttttcattgatgacattctgatatactcacaatccgaggaagaccatcagcaccatctccgtctggtgttgggaaagttacgggaacatcaattgtatgccaaacttagcaagtgtgagttctggttgtccgaagtcaaattcttagggcacgtgatatctgctaaaggagttgcggtggaccccgaaacagtgaccgccgtcactgattggaagcaacccaagacagtcactcaagtccgcagtttcttaggtttggcaggatactaccgaaggtttatcgagaacttctccaaaatcgctcgacccatgacacagttgttgaagaaagaagagaaatttgtgtggagcccgcaatgcgagaaggcgttcaaaaccctcaaagaaaagctggtttcctcaccagtgttaatcttgccggatactcgcaaggatttcatggtgtattgtgacgcttcgcgccaaggattggggtgcgtgctcatgcaggatggtcatgtggtggcctatgcctcacgccagctacggcctcatgaaggcaactaccctacccatgatttggagttagctgcggtggttcatgctctaaaaatctggcggcactatctcattgggaatcgctgtgaaatatatactgatcataagagcttgaaatacatcttcacccaatcggatctgaatcttcggcaaaggagatggttagaactcatcaaggattatgatgtgggaatttgtcaccggcccggtagtcgagatgtcatggcacagggccggtgtcctgctgctgggggctcagtcctgcctacctgtcccgggggttccggccgtaggtgggattgggtcggtactcttgtctatggctaggatgggttggaaactatgtcacgtcttccgtctgtataccgtggtgatggccggcagcgtcagccgtcgtggtttggacatgactggcttcgtcttggagctgcggggcatgtgcgtggtcctggggtatccacatggagtggactaccaggccaggccgcttccggagcaggagggtgacgatgcagagccccacgctggttgggagcggacttcgctggcagtcaccgcgggtggagattctttccccgccgcttgccagagcgccgctctcctcgccatcggcactcttcaccagcgatacccggacgagttgcagcactcgccctaccgctaccaccctcgccgcggaggagcccgcgactacgccaccttccgggatgctagctcggaggatgacgctaccctcgtgcacctggggcgcatggtggaggcgtacgacgcggctcgtatcgacttccatcagatggtgcgccgtgggatggtcgagaacaacatgaagatcctggagctgcgtcaagagaatctgcagctcaagaaggacctagacgcagtggaggcgcagctgcatcagctcaagatcgcccagggagaggtctgccaccccaagcgtcgccgtgtctgccgcagccagaagatcaccgcccgcaagagcacctccaggcccgagcttgttcgtcagtccctggcgtggacttgcttcgtcgagacccctcgtgccgagcccgcgcccgtggttccccaggagggggaagcctccggcgttggtagcacggaggatgcgctgttgctcaccttccgtgctggcccgtcgcagcggagaagtgctaacaccggtgatggcaaccaacctgaaggcagcaaccaccaccaccagggcagcccacctccacctcctcctccgcctccaccaccaccaccacataccaacgccattctcacccaaatcctcgcccagcaggccaacatgatgactgctttcctccaccacatccaaaatccgccacaacataatgctccaccaccacccccacaacactctaaactcgccgagttcctccgcatccgcccacctaccttctctagctccaacaaccccatggatgcgttggattggttgcatgccgtggggaaaaagctagacactgtgcagtgcagcgatgaggagaaagtcatcttcgccgcccaccagctgcaggggcccgcatctctatggtgggaccatttccaggctacgcagccagaggggcaacctattacttgggcccgtttcaccgccgctttccggagaacccatgtgcccgccggagtcgtggcccttaagaaaagagaattctgagagttgaagcaaggcaaccgctccgtgatggagtatttgcatgagttcaacaacctggcccgttacgccccggaggatgtgcgggaagatgaggagaagcaagagaagtacttggcaagaatggaccctgagctgtccgtccgtctagtctccggggactatccggatttccaacgtctggtggacaagagcatccgcttggaagccaagcacaaggaactggagtcgcacaagcgccgcttggcgaattgccgcaaccaacagggtgctaaccaaagggtccgctacaccaatccctatccagggggatcctcctcgcagcagcaacaataacagcagcaacctcgctccgcgcctcgacctcaattcgtggtgcgcgtcccacaaccgcagcaacagcagagtcagcaagggactcgtgcgcctcgtcctcctacgccaactgtgcagcctggccaaggccgcagggacgcttcaggtccgcagcatctgtgcttcaactgcttcgagcccgggcactttgcggataaatgcccaaagccgaggcgtcagcaaggccaagcgcctccccgctccaacaacggtgggaaggatgtcattcggggatgggtgaaccatgtgacggccgaggacgtgctgacaactccagacgtcatcgttggtacgttcctcattcattccatccctgctaccattttgttcgactctggagcttcccactcgtttatatctgtgccattcgtggggagaaatcagttggggatagaaaggcttaggaaccctctgctcatcaccacccctggaggggttatgacagcaaagtattatagtcctgccgtccctatagaaattcaggggattccttttccctcggatctgattctgctagacaccaagaacttggatgtgatccttgggatgaattggttggctcaattccaaggagtagtggattgtgcgagacgcaccgtcactctgtaccgagggccgggacaaccggttgttttctttgcacccccaacctctgtcagtagttcagaactgcatcagataggtctgtcagaaatccccatagtcagagagttcggagacgtgtttccggaagaactacctggtatgccgcccaagcgagagattgagttccagatagatcttgctccaggaaccactcctctgtgcaagcgaccctaccgtatggcagcaaatgaactggccgaagtcaagaaacagctggaagagttgaaagaaaaggggtacatacgtccgagcacttccccctggggtgctcctgtgatttttgtggagaagaaagacaagacgaagaggatgtgcgttgactatagagctctcaatgaagtcaccataaaaaacaagtaccctcttccccggatcgatgatctgttcgatcagcttaaaggtgccactgtattttccaagattgatcttcgttccggatatcaccaactgcgtattcgtgatgaagatattccgaagaccgcattcaccacgcgatacggactgtatgaattcacggtgatgtcattcggtttaaccaatgcacccgccttcttcatgaacttaatgaacaaagtgttcatggaatacttggataaatttgttgtggttttcattgatgacattctgatatactcacaatccgaggaagaccatcagcaccatctcg

SEQ ID NO: 5413 - DNA, 360 bp, Oryza sativa
  Clone ID: PAT_MRT4530_12202C.1
ggcccaaagggggccttgttaaaaacaaccctccaaaaatcaagctataccagggcgaaatgaaccggggttttcaagccaaacccaaacggttgtaacaaaaaccccccccgggggccaaattttttcttggtgattaggggggaaacccctttttttatacatgggccggggtacaccccctaggggggggcctttgccccccaaaaaaaaactggggccaactttaatttttacagggggcccctcaggaggggggggttttaacccaaaacccctttccacccctaagggtcaaagaaaggagaactttttgggtggacccccgggagggaccccgggtgcccaaaaaactttccc

SEQ ID NO: 5414 - DNA, 5237 bp, Oryza sativa
  unsure (1)..(5237): unsure at all n locations
  Clone ID: PAT_MRT4530_12203C.1
acggccgggcccacctggcagccgcggggcgcgcccgaaggcggcctcgccggcacggccgacggaaggcggcgcacccgcgccccgatggtcgccgccggcgaccaacggcgcgacggagcggcgcccgagagaggggagggaagggggaagtgaaacaacggtcctcggctcaccccgggacgacgaggacggcggaaacgacgaccggagcggaggaaggcggcggcgcggttcggatcgacgaggacggcggcgctccgacggtcggcgggcgaaacggaggcgcggacgaggtcgacgaggacgcggcgaagccgatggaggtgacgccgagacgggaggaggtccggggcgacgacggcggcgaactgaagctcggcggcgacggcggagagagaggacgacggcgcgagcacgaatccgacggggagagtccttttttccccccttccctcttgggccggctcggcccacttccctccctctctctcctctcccccgcggcccaatcggcctcctccccgccgcgtgccgctgacgggcgggcccgcccgccaccctcgctgacgggtggggcccacccgcacgcacgtaaggaacgcccgttggtgatcctcgctggctctcccgagcggacttcgctgacagtcaccgcgggtggagattctttccccgccgcttgccagagcgccgctctcctcgccatcggcactcttcaccagcgctacccggacgagttgcagcactcgccctaccgctaccaccctcgccgcggaggagcccgcgactacgccaccttccgggatgctagctcggaggatgacgctaccatcatgcacctggcgcgcatggtggaggcgtacgacgcggctcgtatcgacttccatcagatggtgcgccatgggatggtcgagaacaacatgaaaatcctggagctgcgtcaagagaacctgcagctcaagaaggacctagacgcggtggaggcgcagctgcatcagctcaagatcgcccagggagaggtctgccgccccaagcgtcgccgcgtctgccgcagccagaagatcaccgcccgcaagagcacctccaggcccgagcttgttcgtcagtccctggcgtggacttgcttcgtcgagacccctcgtgccgagcccgcgcccgtggttccccaggagggggaagcctccggcgttggtagcacggaggatgcgctgttgctcaccttccgtcctggcccgtcgcagcagagaaatgctgccaccggtgatggcaaccaacccgaaggcagcaaccacaaccaccagggcagcccacctccacctccacctcctcctccgcctccaccaccgccagataccaacgccattctcacccaaatcctcgcccagcaggccaacatgatgactgctttcctccaccacctccaaaatccgccacaacataatgctccaccaccacctccccaacactctaaactcgccgagttcctccgcatccgcccacctaccttctctagctccaacaaccccgtggatgcgttggattggttgcatgccgtggggaaaaagctagacactgtgcagtgcagcgatgaggagaaagtcatcttcgccgccaaccagctgcaggggcccgcatctctatggtaggaccatttccaggctacgcagccagaggggcaacctattacttgggctcgcttcaccgccgctttccggaggacccatgtgcccgccggagtcgtggcccttaagaaaagagaattccgagagttgaagcaaggcaaccgctccgtgacggagtatttgcatgagttcaacaacctggcccgttacgccccggaggatgtgcgggaagatgaggagaagcaagagaagttcttggtaggaatggaccctgagctgtccgtccgtctagtctccggggactatccggatttccaacgtctggtggacaagagcatccgcttggaagccaagcacaaggaactggagtcgcacaagcgccgcttggcgaatttccgcaatcaacagggtgctaaccaaagggtccgctacaccaatccctatccagggggatcctcctcgcagcagcaacaacagcagcagcaacctcgctccgcgcctcgacctcaattcgtggtgcgcgtcccacagccgcagcagcagcagaatcaacaagggactcgtgcgccccatcctcctacgccaactgtgcagcctggtcaaggcagcaggcacgctcaaggtccgcagcgtctgtgcttcaactgcttcgagcccgggcacttcgcggataaatgcccgaatccgaggcgtcagcaaggccaagcgcctccccgctccaacaacggtgggaaggatgtcattcggggtcgggtgaaccacgtgacggccgaggacatgctgacaactccagacgtcatcgttggtacgttcctcattcattctatccctgctaccattctgttcgactctggagcttcccactcgtttatatctgtgccattcgtggggaggaatcagttgggggtagaaaggcttaggaaccctctgctcatcaccacccctggaggggttatgacagcaaagtattatagccctgccgtccccatagaaattcaggggattccttttccctcggatctgattctgctagacaccaagaacttggatgtgatccttgggatgaattggttggctcaattccaaggagtagtggattgtgcgagacgcactgtcactctgtaccgagggccggaacaaccggttgttttctttgcacccccaacctctgtcagtagttccgaacttcatcagataggactgtcagaaatccccatcgtcagagagttcggagacgtgtttccggaagaactacccggtatgccgcccaaacgagagattgagttccggatagatcttgctccaggaaccactcctctgtacaagcgaccctatcgtatggcagcaaatgaactggccgaagttaagaaacagttggaagagttgaaagaaaaggggtatatacgtccgagtacttccccctggggtgctcctgtgatttttgtggagaagaaagacaagacgaagaggatgtgcgttgactacagagctctcaatgaagtcaccatcaaaaacaagtaccctcttccccggatcgatgatctgttcgatcagcttaaaggtgccactttattctccaagatcgatcttcgttctggatatcaccaattacgtattcgggaagaagatatccctaagaccgcattcaccacgcgatacggactgtatgaattcacggtgatgtcattcggtttaaccaatgctcctgccttcttcatgaacttaatgaacaaagtgttcatggaatacttggataagtttgttgtggttttcattgatgacattctggtatactcacaatcagaggaagaccatcagcaccatctccgtctggtgttgggaaagttgcgggaacatcaattgtatgccaaacttagcaagtgtgagttctggttgtccgaagtcaaattcttagggcacgtgatatctgctaaaggagttgctgtggaccccgaaacggtgaccgccgtcactgattggaagcaacccaagacagtcactcaagtccgcagtttcttaggtttggcaggatactaccggaggttcatcgagaacttctccaaaatcgctcgacccatgacacagttgttgaagaaagaagagaaatttgtgtggagcccgcaatgcgagaaggcgttcaaaactctcaaagaaaagctggttgcctcgccagtgttaatcttgccggatactcgcaaggatttcatggtgtattgtgacgcttcgcgccaaggattggggtgcgtgctcatgcaggatggtcatgtggtggcctatgactcacgccagctacggcctcaagaaggcaactaccctacccatgatttggagttagccgcggtggttcatgctctaaaaatctggcggcactatctcattgggaatcgctgtgaaatatatactgatcataagagtttgaaatacatcttcactcagtcggacctgaatcttcggcaaaggagatggttagaactcatcaaggattatgatgtgggaattcactatcatcctggtaaggccaacgtggtcgccgacgctctaagtcgaaaaagccattgcaacactcttaacgtccgtggcattccacccgaacttagtcaacagatggaagcccctgacacctaagcaatagttggtcgcggatttttggctgcgtggaggnnnnnnnnnnnnnnnnnnnnnnnnnnnnnnnnnnnnnnnnnnnnnnnnnnnnnnnnnnnnnnnnnnnnnnnnnnnnnnnnnnnnnnnnnnnnnnnnnnnntagaattcacggagttncgnaccctttgtgatgtgtgccagcgtgtcaaggcagagcaccaacgaccggccggacttctccaacctctccaagtacctgaatggaaatgggatgaaattgggatggatttcatcaccggacttccaaagacccaaggtggatatgattctatatgggtagtggtggatcgattaaccaaggtagctcgattcattcctgtgaagaccacctatggagggaacaaactagccgagctctacttcgctaggatcgtgagtctccatggcgttcccaagaaaatcgtatctgataggggaagccaattcacctctcacttttggaagaagctccaagaagagctgggtacccgattaaacttcagcaccgcataccacccgcagacagatgagcagaccgagcgtctaaatcagatcctagaagatatgcttcgcgcatgtgtcctggatttcgggaagacctaggataagagtctcccctatgccgagttctcctacaataacagctatcaagccagcatacaaatggcaccttatgaagcgttgtatgggcgcaaatgccggacaccgctcttgtgggatcaagttggggaaagccaagtgttcgggactgatatcctgagagaagctgaagctaaagtcagaaccattcgggataatctaaaggtggcacagtcccggcagaaaagttatgcagataaccgtcgccgtaacctggaattcgcagtggacgattttgtgtatcttcgggtcacgccattgcgaggacaaaagggaagctcgcacctaggtttgtggatcctttccgcatcattgctcgacgcggagaagtag

SEQ ID NO: 5415 - DNA, 631 bp, Oryza sativa
  Clone ID: PAT_MRT4530_12204C.1
ggaagctgaagttcagaaactcaaggagatgaacaaggaattggagaggaaacaggcagatatcatggaaatgcagaaaaatgaggtaattgctttcgtcgtttgtttatgtcaaatgtgtgcccttgacacttttctctgtttttacagttacaactataataaatgtcaagataacgctatgtgctgtctgcttaattttttactatgtttttagcttaatttcatttcactttctgttgttcgcataatttagtctgaggttggaatgctggatgtgcatttgtgggacaaatgcttcaatacttacaagttacaacacaaatatttcgcacatgtaaactttgcattctctttcaggttattgcctacagatgctatcttccagttcgtttgttgaattgttgtccattctttttgtttcaaaacatttatttttaggtgttatgcttcttgtattcattacatgaagaaaaatctaggtcatttgctgctttcagttaaaacccttgcttctcattgtatgcacaagtatttttacatgctagcttattcgtgttctcattttctcattagtagactactttttatctcgtgtgttttcatggcactatatgatggattttttttt

SEQ ID NO: 5416 - DNA, 288 bp, Oryza sativa
  Clone ID: PAT_MRT4530_12205C.1
atggcggacggctatcgacggcgggcactcacggtggcttcgaccctcgttccggccacgtgcggtagcgcgggaggcatgccgtgcgtaccggcggcgaggggaggcgggcgtagccggtccggatatgcagctgccgctccgctttacacaagggaactcccgggggagtcgatgtggaccatagccgaggagctcggctccggggcagtgcgcgtggctagagtccagaaacaatcttcaacagcccacggcatgcagctccggccgtacatgcaagacaattaa

SEQ ID NO: 5417 - DNA, 189 bp, Oryza sativa
  Clone ID: PAT_MRT4530_12206C.1
atggcgtgcgagctcgtggcgctggacatggaaactcgcgagttcgaggtcatcgtccaaggcccgccgtgccgccatggcgagggcaagatgaccgtcctcgagctccacggcgcgctctgcgtcgcatgctcggacatggtgaattgtgacgccgtgacggcgcttggtcgatcgagtaccgtgtag

SEQ ID NO: 5418 - DNA, 324 bp, Oryza sativa
  Clone ID: PAT_MRT4530_12207C.1
atgcgtacatcactcacctaccgccctcgccagaaactgtgctccgctccatcctctccctctccatcgcttcgctgcaacgccaaccggcgcgccgccgccgatttccgcttcccctccatcgcgcctccaaatcggtgcctccagatcgacgttgccagcgcccgtcacaaccgtcgacaggtaatcgtcgtgttgcgccgcatcccgaccctcccccttcgttgcatcctgcgcctcaccgtcgcccacctttattcgccgtcaccgctgattccttgccagaataattgcttccccctctcacatcgcactccttcctag

SEQ ID NO: 5419 - DNA, 348 bp, Oryza sativa
  Clone ID: PAT_MRT4530_12208C.1
atggcggcggcgcaaatacggcggcagcaaccgggtcaacagcggcagcggcaagagcgcaggacggaaggcgtggtggcggctaggaaggattgccctagtcaacgggcatacgttgctacagaagatggctacaacagcacctccgacattgaagatggtgagaaggaagagaagaaagacgaagaggaaaaagccctatctatagctccatgcatgcttgaagaatgttcaattgaccaagcgcctgtaatttctgaagatgagaaaaaaaaggttggtttgcaagaagggaagtgttgtggtttcgactacaaagatttcaggatccaactatatggccattaa

SEQ ID NO: 5420 - DNA, 841 bp, Oryza sativa
  Clone ID: PAT_MRT4530_12209C.1
gggtccaacgttaggaaactcattggcccctagtgtaccatcttgtttccgtggtaaatgcgttcccagttttatatacaagtcgaatactgtttagctaataaatactaagtttgcaaaacttatcaattgataattctagaatgtgactgtaacaaagtattttgcttctcagttttcgtctttttatatttaggtaactgaactaacatatattaggttatcagaacaacatcactggagtggtaggatttatgatgaaatggatgaggaaggtgcagtcgaagacatattgaagggttgtttctctatataatgattagcggttctatccataagacctccagatcgaagaatatttttttgtcatatgtaacattgcagctcgggtgtcccagttagattaggtatcacaatgtatccctgaatattttattacaatcgattcaagaatgatatcattattcttgtactgattgttttgaaatattgctatgttgtgcaataatatatgagattgttaactccaaaatgtgcacttgcaattatttccatccataagacctccagatcgaagaatatttttttgtcatatgtaacattgaagctcgggtgtcccagttagattaggtatcacaatgtatccctgaatattttattacaatcgattcaagaatgatatcattattcttgtactgattgttttgaaatattgctatgttgtgcaataatatatgagattgttaactccaaaatgtgcacttgcaattatttccaagggagtaatggatcttattgtgaattaataatggtgttaatgatgtatcctgaaatttcctaa

SEQ ID NO: 5421 - DNA, 1737 bp, Oryza sativa
  Clone ID: PAT_MRT4530_1220C.1
atggcgccgccactcgccggagttcgattccctcctcgtcgccggcccgcgcctcggcccgctcaagcaggcccacgcgcgcctcgtcgtcgccggccacggggctcgctcccgctcgtcaccaagctcgccaccctcgccgtggccgccggcgccgcgccctacgcgcacctcctcgcggcgtcccaccccgcctgcgactccttcctcctctcctccctcgcccgcgccgccgcgcatcgcggcctccccggcgaggccatcgctttctacgggcgcctcctcgccgccgcgctccctttctccagcttcgccttcacggccgccgccaaggcctgcgccgacctctccgcgctccgcaccggcatggcggtgcacgcgcactccgtccttctcgggttcggctccgaccggttcgtgcagacggcgctggtcgtgctctactccaagtgcggccagctacccgttgcacgcaagctgttcgacgcaattcgtgacaggagcgtggtcgcttggaacgccatgatttctgggtatgagcagaatgggcttgctgagcgtgcgattgaggtgtatagggagatgcaggtggctcaggtggttcctgattccgcaacgtttgtcgctacgctctctgcttgtgcgcaggctggtgctctggatttgggacgtgaagtggaaagacgtatcgtctctgaccagatggacgtgtctgtgtttcttggcagtgctcttgtcaacatgtatgccaggtgcggtcttgtgagcaaggctcgcgattggtttgacaggctccaagagaggaatgtggtcacatggacttccatgatcgcagggtatggaatgcatggccatggtcgcgaggcgatcaagctgttccacttgatgagacgtgaggggccaacacccaatgatgtcacttttgtggctgtcttagctgcgtgtgcgcatgctgggttagttaatgagggtcgcaatgcttttgattccatgaagagggtctatggacttgtccctcgtgccgagcactactgttctatggttgatatgtatggaagagctggacttcttgatgacgcaatgcagtttatatgtgattccataccagaagaaccaggacctgaagtttggacagcgatgcttggagcgtgcaagatgcacaagaatttcaatcttggggtggaggtggctgagcgattgattgctcttgagcctgagaatccatcccatcgagtgctgctttcgaatatatatgctctttctggtaaaatgaatcacgtcgagaaggtgaggaatgtcatgatcaagagaagattgaagaagcaaatcggatacagcttgattgagctaggaggtacttcacatttgttccgcatgggcgagaagtctcatcagcaaacgagagaaatttaccggtacttggaggaactgattcataggattagtgatgctggctatgtacctgaaactgactcagtgctgcatgagttggaagaagaggagagggaggttgcactgagatatcacagtgaaaaattggcagtagcatatggcctcatgatgagcagtgggagcaccgctccaatcagggtaataaaaaacctgcggatatgtggcgattgccatctcgcaatcaaattcatgtcatcagtggagagcagagagataattgtcagggacaagcaccgctttcaccattttaaagatggcaagtgttcctgtttggaatattggtaa

SEQ ID NO: 5422 - DNA, 1684 bp, Oryza sativa
  Clone ID: PAT_MRT4530_12210C.1
cgacgatgcatcgggagagagagagttgtatttttttttttttttttttttttttttttttttttgctgtatcaatcatatttatcacgattatgattgctattatgtcaccaaatccattatttataccggtaaaaacttgtccctgatttttttccctttttacatagatgaagcagaacaaatcggcatcctaaggtaatacctcgggctgagcccttttatcaaaccaatacatcaaatttgtcattccgattttctggaggtgatttatgcaatgctgaggatgacaacatcatgacgttgcttttggtcacctgcccatgcctggcaatggcaatcctttgatggagaagaatgggaatgtgcaggccttctttcggaacctataacatgctaatttgaaccggttgttgtaacacaaggggcagaagacgcagaagtgttgccactacttgtcgctgcagtagttggattgttttctgtaactctctcattgcttgattctgtactgggaataacttcagaagtggatattgctgggccatcacttgttctaccattactacctctagtttccagacgctccatcatccttgatacggatgcaattccagcattaacttctcttcttacttcagaaccaagatctgccacagatgaatgacgcgaaaaaagtctctccttccatcctcgagtactttttgtaatagattccttgtacttcatagagacagcatttaagcgagacttcagagagtctgagaaagactgaagatctgaaggcccagctctgtcgttgtttactggagttgattgcccagtggaatgcctcctgttgaaaaacctagggctagatacaggggtactatttccagatgaaacaacagcatcttgatcagcatcgtaggtaagcatcccaggactttgattgcctgcttcttcatgggtgttagcatgcagtgataattcaccagttgtgtggacaggacttgattcattatccacttccccttgaacggacgatgaagaaactgaaccagcagaaggcatgtttggatgcgaagaaaaaactaagaactgtggacgaccatgagagccggaacgacccctgtgtccttctcttctaccaaggtggtgtgaccttcccattgcagcggctgctgctaggtgctgtaatatacgctcttcaagttcagcatcattaccaacaacaggtaaatgctgaacctcaaaatctccaagagcaggatgatgaaatatagttgtatttcgagtttgattggtccttacattcctttcacgctgccactgcctcgagcagctcttgacacacactctgacaccattcaagaatgcattggaggtggaactcgtgtttgcaaccagtcaatgtggaagggtcactctcacagaacgcctcaaggcagatactacatgcatcatcacatgcatcctgaatcccaccctcaacaaaggctgcagctgatgtcaaaccctccatcttggctttctcatcagttccagatgccattgcaacggaatcacaacactgatatcaggggcaccgccgccgacgccgacgaggacgcccgatcggatcccgctgcgcgcgcgaggcgatggggagcacgaaaccctagctagctagctagcctcttcgcctcctcctccaacctcctct

SEQ ID NO: 5423 - DNA, 439 bp, Oryza sativa
  Clone ID: PAT_MRT4530_12211C.1
aaacacaacataaatcttttgatcatatatagacgaccaaacagcttgcagtgacacatgcattgacaattcggaaagaaaatagtgagatcttgatggaccacaaaactcgggttttcgtcaaatacacaaatgtattctcttgtagtcctaacaaaaaaacaacataatagtaaacttagtactgaatatatcaacttttaggacctgttcagattgtagccaaaataaaccttgcaaattttggtaagcaataccaaaattttggtaagttggcaatattgccaaaattttgacaggatttcttatgtatttactaaaatttggcaacaaactaaacatagccacatttttggcaactatgcccaaaaatggtatggttgaaaatgacatcaatctgaacaggcccttagataaagtgccacacattttcaaatag

SEQ ID NO: 5424 - DNA, 517 bp, Oryza sativa
  Clone ID: PAT_MRT4530_12212C.1
ttaaaaagggcccccccttttttttttttttttttttttttttttttttttttttttttttttttttttttttttttttttttttttttttttttttttttttttttttttttttttttttttttttttttttttttttttaatgtcaaaactctgaccgatcttgaaacagttaaaaagaacagattgatgctctggtgccatttcaacattgtgacaagagaaacctcctgaacagaagcttcagaagaatctcttctctctctgtttttttttcatggcgtctttgcagagcacacaggggaacaagcaaatgcctgacacctaatttcaattctaacttgctaaggcagtaaggctaatcatctcctaaagccccaaatgtttagcttcttgtttgaggcagcagcagaagaagaagaactatgtccaagaattgagaaagccaccaaaaaaaatcctaggagttaatcatcctctccatgatccaacatggcgagcgagcgatcatctgata

SEQ ID NO: 5425 - DNA, 4665 bp, Oryza sativa
  Clone ID: PAT_MRT4530_12213C.1
atggcatctccgggtgaaatgtcagtaagcaatccattacgcttccaaggctttccttgtaatctgggaaaaagaaatggtttcattgctgcaaggagttctggactgggaaggtcgcgaattgctcaacagtgctttcagcaacatcatatttgttatccaggtgttcgaagagcttcagttcctaatgtccgaatgctgccagctcctggtgctttggtttccaggggggttgacagttcattggttcccaaaactggtaatgcatcagaagctggagttattcagttatatcgtataccatatcttcaagagagtgaaacaattgagctactcaggcaagttcaagcaaaggtttcttctaatattgtgggtataaagactgaacaatgcttcaacattcaattggacaatgcattaactccagagaagcttgcaacacttcagtggctcttagcagaaacctatgaacctgataagttacaagcacaaagctttttggaggaggaaatctctaggagcccttatagtgtcattgttgaggttggtccccggatgactttttcaacagcgttctcgaccaatgctgtctcaatatgtaaatctctctcgttgatggaagtaactcgcttggagagatcaaggagataccttttgtgcctggatcctggcaatggtccacttgatgaaagccagcttaatgactttgctgctttggttcatgatagaatgacagagtgtgtttatcctaacaagctcacatcatttcattcagatgtagttcctgaacctgtccgtattgttccagtcattgaaaggggaagggaagctttggaagaaataaatgtgaagatgggacttgcttttgatgaacaagatatcaagtactatacccacctcttcagagatgacatcaaaaggaatccaaccactgttgaactttttgatatcgcacaatccaatagtgaacacagcaggcattggtttttcaatggaaagcttgtgatagatggagaaaccatgccgaaaaccttgtttcagttagtgaagagtcccctgaaggccaaccccgataataactctgtcatcggattcaaggacaactcaagtgcaataaagggatacccagcaaatcagctgcgcccaacaattccaggctccacttcaccattatctgttatgatgcgtgagcttgatattttattcacagcagaaacccataattttccatgtgctgtggcaccttacccaggagctgagacaggtgcaggtggtcgcataagagacacacatgccaccggaaagggttcttttgttgttgcttctactgctggctattgtgttggtaatctccgaatggaaggttcatatgcaccctgggaggatccatccttttcatatccgtcgaatttggcctcccctttgcaaattctggttgatgctagcgatggtgcttctgactatgggaataagtttggtgaacctctaattcagggctttactagaaattttgggatgaggctgcttaatggggaacggcgtgagtggctgaagccaataatgtttagtggggcaatcgggcaaatcgatcatgcacacatatctaagggggatccagagattgggatgctagttgtgaagattggtggcccagcatacagaattggtatgggtggtggtgctgcctcaagcatggttagtggacagaatgatgcagagctcgatttcaatgcagtgcagcgtggagatgctgaaatggcacaaaaactatatcgtgtggtcagggcatgtgcagaaatgggagagagcaaccccattatcagcattcatgaccagggtgctggaggaaattgcaatgtagtgaaggaaattatctatcctaagggtgctgaaattgatatacgatcaattgttgtcggtgatcatacattgtctgtcttggagatatggggtgctgagtaccaggaacaagatgcacttctggtgaagcctgagagcagaagcctgttagagtcactttgtgaaagggaaagggtttcaatggctgtcattggtacaattgatggatgtggaaagattgttttgattgacagtgctgctatggagcatgccaagataaatggccttcctcctccaacccctgttgaggatcttgaacttgaaaaggttctaggagatatgccccaaaagacctttgaattcaagcgagtgtctctagtcagcgagcccttagacattgcccctggagtaacaatcatggatgctctgaagcgagtattgagtcttccgtccatatgttctaagcgtttcttaaccacaaaagttgacaggtgtgtgacaggtcttgttgcacaacagcagacagttggacctctccaacttcctctcgcagatgtggctgtgattgcacagacatatactgacttgacaggtggtgcctgtgccattggagaacaaccagcaaaaggtttacttaatcccaaggccatggcaagacttgctgttggggaggccttgactaatctggtctgggctaaagtttcatcactttctgatgtcaaagcaagtggtaactggatgtatgctgcaaagcttgatggagaaggtgcagatatgtatgatgctgctgttgcattggctgactgcatgattcaacttggtattgcaatcgatgggggaaaggacagtctttccatggcagctcaatgtgatggtgaggttgtcaaggctcctggaaatctggtcatcagtgcttatgtgacatgtcctgatataacattgacagtaactcctgatttgaagcttggcaatgatggagttttgctgcacattgacctgggcaaaggaaagcgcaggcttggtggttctgctcttgcacaggcttttgatcaaattggaaatgactgcccagacattgatgatgttccctacttaaagaaagcttttgaggccgttcaggaattgcttagtcagcgccttatctcagctggccatgacattagtgatgggggtcttattgtgagtgttcttgagatggcatttgctggtaattgcggtgttaagctgaacattgactcagaagattcgggccttcttcaagcactctttgccgaggagcttggccttcttcttgaagtgcacttgaaagatctcagtgttgtgaagcaaaagcttgaagcaggaggcatttccgctaatgtaattggacaagttacagcatcaccagatattgagctagttgttgatggcaggctgcatctcaaggaaaaaacttcagatctcagggatatctgggaggaaacaagcttccagcttgaggggctacaacgcctgaaatcttgtgtcagacttgagaaagaaggactaaagcacagaacatcaccatcgtggtctttgtctttcactcccaaatttacagatgaaaaactgctgactgcttcctcaaagccaaaagttgccatcattcgtgaagaagggagcaatggtgatagggagatggctgctgcattctatgctgctggatttgaaccatgggatatcacaatgtcagacctcttagctgggaagtcttctctagaggagtaccgtgggattgcatttgttggtggttttagctatgcagatgttcttgattcagctaaagggtgggctgcatcaatcaggtttaatcagcccctcatacagcagttccagaatttctataataggccagatactttcagccttggagtgtgcaatggttgtcagctaatggctcttcttggctgggtaccaggatcagatgtcggaagttctcttggttcaggtggggacatgtcccagccaagatttattcacaatgaatctggtcgttttgagtgtcggtttacaagtgtctctatagggacctctcctgctatcatgttcaaaggaatggaaggttctacactgggcatttggagtgctcatggtgaggggagagctttcttcccagatgaaaatgttctagctagtgttgtgaactctaacctggctcctgtgcggtactgtgacgatgctaataacattaccgaagtctacccgttcaatcccaatggctctccccttggcattgcagccctttgctcccctgatggaagacatcttgctatgatgccacacccagagcgttgcttcatgatgtggcaatatccatggtatcccaaggaatggcagcttgagaagtgtggtcccagtccctggctgcgcatgttccagaatgccagagaatgttgtttaacataccgggacctaattgatggtcatatgatgacagaagcttggagctatggactcttttggatacttaaaccttgcataatttttgctttgagttttgctgctggtttgaaactaggaatcctgttctgctattggatttttgtaactgcgcagcaatttgcagtcctgctgttgatgaaccgtattgtcgaaggtgtagatttacatttgattgtacgcttgtttaccggttactgtcagtggcttttgggggttttgtgttgttgtttgaccacccaacccaacaccaagaggtttcatttcaccgtgcgatcgatacatatggggatagacacaagagaattggagaagtcaaaaagttttttaagcatttgggatgaattagtaatagaacttgtgtgctga

SEQ ID NO: 5426 - DNA, 509 bp, Oryza sativa
  Clone ID: PAT_MRT4530_12214C.1
cagttgatgaccatattcccatatgttcaatcaaagcctattcagacaaccagaattgatgtgcatctcacaatgaggattttaatctcaactctgaacactagctcctaattggtcaacaatcactctacaagaacaagaaaagcaagagggcttgaggcagatcatgttgatcggacatttggaaattatcctggctaattgaattgacaagttacaaaaaggaacatctcttggtagcagcattcgtgactgcagaaggtcttctcacccctggagaagaaaatcagtaattcagaattggacagatgatcaattaattcttttgtagataatgatcacttgatcaaatggcatcgaaggatgtgaacaatattgtatcttaagtgccagatgatacttgatagtagttcagttggttggcgatgtagtcatcaatgtgtaaatatgcatattagacatgataagcttttcacttgatcgtcaaattggctgcataaagtttgacc

SEQ ID NO: 5427 - DNA, 434 bp, Oryza sativa
  Clone ID: PAT_MRT4530_12215C.1
actcatgcattcacacagacaacttcgatgggggcttttttagcgcacactctgtttctaccagaggttgattgtgagtgtatgggcacgagatcaaattgaggcagttgatacttgattgtcagaaaagaagtcttgcggatcattagctttgatcaatacacctggggcctggaggaaatagctaagattgaatccatttaactttgagtaactaccgtgacaaaactgttagcatacgggctacctcaagaactgacctgagttacatgaccacatgagggctagatttgtcggacaaggaaagtcatgtagaaaacaaggttcaaactttttaggttggtatttttagatgcataggctattcatttcaaaatttttggttcgtacctaccattattaataaacttcaataaaagaagaacaattttttg

SEQ ID NO: 5428 - DNA, 546 bp, Oryza sativa
  Clone ID: PAT_MRT4530_12216C.1
atgtttgtgtcgacctcgccgtctgtcaagccgagcacgcggtggccgcgatgcagcttgttctggcgccgccgccatggtccacccgtctggcgccaccttggcgtcgtcgtcgtcgtcccgtggaggctacatgttgagcgaccggctctacagcccatctcacgtccgccgccagcagatgctgctgctacaacagcagcagctgctgcaggggcaacggccgccttcgtcctccccctcgccggcgacggcgcccagggcggcgaggcagaagccgctgccatcgccgccgccgcctccctttccggcggaggcggcgaggcagaaggaggtagagaggcaggtggacgcggttgttcagtcaaagccgtggtgtcgccgttgccgtcctccgcggatgtgaagaggccgccggcagcggaatcggtgccggagccagcgcgagcggaggaggaggcggccgtgatgcagcttgttaatcgaccagggaacatgcatcgtctcatcgaccgctggagtgtgttgtccacgactgagacctga

SEQ ID NO: 5429 - DNA, 453 bp, Oryza sativa
  Clone ID: PAT_MRT4530_12217C.1
agagaactcatttcaaatagagtgaataaaaatcgaatcctcatgtcattacatcttaggaatcaacaagatacctatcaagcacaagttcacaactaaagaaaactactacattcccctgagaaaccttattttgctgagaggccaagacctgaaacaaattattgagacagcctctaaatggaatctgggactgaaattattgaggcaaaataaacggatcaactgcaaaaaatgggaatccttagtttccaactcttttcagactcccagcacgcccagatatatacatacaggcatagcagaaatgtatgtacagatattctgaagccacaacgttagaacagctcaaaaccacactatgttagttggtgcccagaatcattctgttccagccctacctagacttctcattgtgcacctcgattgtacctaaatcaacctatttctaaa

SEQ ID NO: 5430 - DNA, 1025 bp, Oryza sativa
  Clone ID: PAT_MRT4530_12218C.1
atgcccaactacatggaatcctcatatgagctgacaaaagggaacaaaaggcttagttcaatgaacataaatgactggaattattgcaatgaacgtccaaacagtctagctccttccctttatatgcggataaatggcaattgggcaattgatctccacccggtgatctccacccaagctcaacttgaattagatatgcttatgacgactttacaatcccagcagatacatcctgaaagaccagataacagaagctgtacactgagcccggttggatttacgacaacagcatactatgagctaataacatatcatggcatcctatggcgcccggcacacttcatctggattaaagcaataccaaacacctgcaaaatcttcctttggctagcctttcggggaaggctaaacacaaatgataacagggtgaagaaatgctgggcatctgatccacattgtgcggtttgcccggctatagaaacagctaatcacatcattctacgctgcaagttagccactgaaatctggaacaaactcaacctccttgatcaggcaattcagagtgctgacattctacagttcaccgagcatgtcctgggaattctaccgactcaacttaaactgggatggccaatatgcttcgctgcctgttcacacagcttatgaaaagcacgcaatcatagaaccttcagagaagaagaactctccgtaactaatgtgacgcatcaaatcaaggactgcctacacttatggaaaaaccgagttaaaccacatgtcagccgccatatgtagttgggcagctctactagcatagatgttgtttttctgtttgtttgtggttctctctaatccctttcttccttcttttctacctcttctttttcttgcctttctgcttgaatgtatttttgttatatctttttttaccaccattaataccatggttataaggtagagcctctctaccttttcagtcaaaaaaaatatggataaatgcaagcagttttcatcaaaaaaaaaaaaaa

SEQ ID NO: 5431 - DNA, 387 bp, Oryza sativa
  Clone ID: PAT_MRT4530_12219C.1
atggggaagagggccgacctcgagtgcacggtggcgatgatggtggcggcggcggcggaaggggccgccctcggcgccggccgtggtggatgggcgtgggcagcggcgacaggagaaggaaggaacgaggggagcggcatgggggcggctcgggacggccttgccggcggcgagcggcggaggggctggctagggcggaggaaggggtggctagaggaggtcctcgcgctacacctaggggcggaggcgcagccgggggtgtctaaaggcagcgagcgccatggccggcgttggcggcggttctggacgtcggccgccggcgtgctacgatcgacagcgattcgattccttgctaggggagggcctagggactacgagaatccttaa

SEQ ID NO: 5432 - DNA, 128 bp, Oryza sativa
  Clone ID: PAT_MRT4530_1221C.1
gtttgcttcagtggctacgatctctagcccgggggggctataccaagcactacggtagtctcctaatccaaatactatatgtcctatcgtgtgcgtttctaaaacgaaccttccgtatggcaatcctg

SEQ ID NO: 5433 - DNA, 240 bp, Oryza sativa
  Clone ID: PAT_MRT4530_12220C.1
atggagatgaagccagctagaagaaaggggtcgtcgtcttcggcggccgaggtggacaacgacggcacggcgtcggcgaggtctccgtcgccctcgcgatccaccagtgccatcgtccttgcatgctgctcccgccacctccttgccgatgaagttgctgaagcgcagttcctggagatggtcaccgccgacttccggccggacctcaccatcttctgcgtccgtgccacggccttccaa

SEQ ID NO: 5434 - DNA, 765 bp, Oryza sativa
  Clone ID: PAT_MRT4530_12221C.1
atcaaacagttcaaagacgactattaaaatgtaagtgattgagcatgatcacaataatctgaaaaagtccatgaaaccagacaattatagttccaaagtacagcgcaatcatatgcggccacataactgtgcattacatcaaccttctgtcatagaaagtatcatgttaacttgcccgaaaaaactaaaagctttggccatactacatcaaacatgggtatccagttatttagcccccaccaacttgccgtttccaggagtcctctacaatgagctcatcaactccccagtcctcatagcttccatcaggtaaataccgcctgattgtgaaagggatcttgcgtgctctcaattctttcatggcaatctcaagtggatcagtctccccttcaagctcgaccataacaggagcattcatgcttatctgcaaggcacgtgtaccaagaatgcgtgcacgctcgtattttgtcatatactttgatgttttccgtggacgagccgtcttttcctgctccttgtcatcttcagccccaaccacatcatccacagcatcctcattgttattctcaggctcttcctcagctccttcctcaatctcaggttctgggggctcatcctcgtaccccatgtccatgtcgttgtagtcgtcctccgccatggcgctcgctcctcctccgccgccgccgcctgggcgctcgcttcgctagggcttccgaaggcggcgatgaggggacgcgtgggcggacgcgtgggcggacgcgtggg

SEQ ID NO: 5435 - DNA, 705 bp, Oryza sativa
  Clone ID: PAT_MRT4530_12222C.1
atggccatggccgccgccgccggggatggggacgagcacctcctctccctcttcgcctccgccctctcccaccgcaggtttggggaccaggagctccgcctactcgacgccgcgctttccgccggcgccgacgtcccctcgctgctccacactcgctcatccgcccgctgtctgctgcgcaaggccgccgcccaggcattctcctccgtccccgatttgggtaccaccctctccacggccgacttcttcgcgcgcgccttcgccctcgccggagatgtcgagagttgccttgctatgagatatgaagctctgctcctgagacaagccgaatactccgatgaccttcatttgcaagtatccaatgaagaatggctaacttttgcaaaggactctcttgataatggtttttacaccattgcttccaaggcttttgcaaatgctcttgtgcgtattgatcccaaccacccagaatacttggactcaaccaattctattctgaagaaagataagatcaatgatataagtggactccaaaacttggccaagtcattatccgcactgcgttctggtgaacattttcgtgcaatgggaattttgatcctgatgtcgtggatgggtatttgggatcctgagacaatgagggtatcacttgcctcttctactgctgtttcactgggaacgtttattatgcacggcaccaaatga

SEQ ID NO: 5436 - DNA, 1231 bp, Oryza sativa
  Clone ID: PAT_MRT4530_12223C.1
atggagagcacgaagcgcgagagcgcctcgaggaagagcgccgcctggtaccccccggcggcggcgacgagctccgaaagaacgcctcgacggagcctgttggcatcgagggcgacgtccttgagctcctccaagaacgcctccacgtcagccgcgccggacacctcggcggagatgaaggcctcctggacacggcggaggcggtcggagattgaggggacggccgcgcggatccggcggtcgacgcggtcggtagcggcgaggagccgcggggagggcgaaagcgaccggaggagggaggttacgagggacgggtggaggtcgccgacccacaggaaggggagctcgagaggcgagcgccagtctccagcggagacgggcctgggcggggttctggcgggcggcggcgtcaagggcggaccagtgcgcctggaagtgggcctcgacggcggcggcggcggaggaaagcgggtcgtcccagcctccggccaaggaggaggaggaggaggagagcgcgcggcggagcagcggcaagagcggcgaacggagggtggatagccaggcggcgaagaactcccgcatcggccgcctggcccccggagccccgcgaccaggaggaggaggaggaggaggcctcggcattcttgcggctgcggtggcgcggcgaggggaggcggtggttggccgtgcccggcgttagggattccgggggagatcgccgccgattggagattcggagggagggaagcgtgggtggggaacggagacggaggtgggcagggcatggctgggggggggggggggcagggcatctcaccgcggagaaacgagggacggcgtcgtcgtatcaatttacctgtaggacgccgtgggaggcgtcgtgggggaggcagtggcggcagagcgcggcggcgccggcgcggacggagtcgtactccttgctgggcacgggctcggcgtcggctccggcgccggaggttgcggcggcgctgcgggaggccccaccggcccgagcgcgcacggcggcggcgccggcggcggcggtggaagctaccgcggcggcggaccaagcgggacaggaggaggcgacgacggcggaacggatgccgccttagccttgggcttcctcggcttggccggacttaccttcgaactcgccgccggcttggctgagggaggggggggcttagggggtatccataggttttgtgggtgtagggggattgaatcc

SEQ ID NO: 5437 - DNA, 174 bp, Oryza sativa
  Clone ID: PAT_MRT4530_12224C.1
atggagaagactgagagggagaggagagaagagttggagctaagggtgttggcaagacacaagaaggaagaacgcgccgaatatcaggcaagaaagttggctagggcgcagcgtgcaaaggatgcggggtcggaagcggcaaggaagggcaagtacccttggtgcacccagtag

SEQ ID NO: 5438 - DNA, 351 bp, Oryza sativa
  Clone ID: PAT_MRT4530_12225C.1
aaaactaacatacccaaactgtttttttcacaattttagcccatgacaatggaaagagtaatttaggtacaagcggtttattgacggtggaaacaaaacattgttttcaccacaacacccaccattggccccaacaaggagcgctttcctttataggacgagagaaaaagtaaaacattacgttttgaagtgaaactgaataattttagtacaccattattattatggataggctctttaggacccccgccgcccttagcgttttgctgctcccattttgtccactggaaggctcactcggaattgttttaatcctttttggtgcccttggcgtaattcttataattgacc

SEQ ID NO: 5439 - DNA, 606 bp, Oryza sativa
  Clone ID: PAT_MRT4530_12226C.1
gatagaaattggttatatattcggactaatagttatcttcttaaccttcattaagtgtacttgagctcgattctaggatgttgttcttatagtgatagttgctgcaaaatggtttccagctgctggctgggagtagcttatgtctagttgaacttaaaaaaaatatatgtttgatttatattcattctgaacacatggtttgatcgaaacgcttcaatatcgttaataaccatacattattatcttttggttttattctcctgtcatctaaaagcaacaatatattgaaccacttgaaaaaattattggaaaaagctctggttgtttttgcactatctgcagagtgtctcaaggccaaggcttgaattgcataactggtctatattagcaaatgccttctttaaatgacactaataacagtaggatttatgctaacactgatcaatttgttgcatgtcatagtaatataaatttggacttaattgcctgagttgatatttcttgtggtactgtaaatttatcgcttattgtttatgctatatttagaaagcgtgcatcagatatgaatgctatgatattcttccattctttcctattgctcttatt

SEQ ID NO: 5440 - DNA, 1071 bp, Oryza sativa
  Clone ID: PAT_MRT4530_12227C.1
atgctgagctcgtcgccctcggcggcggcgccggggataggagggtaccagccgcagcgcggggcggcggtcttcacggcggcgcagtgggcggagctggagcagcaggcgctcatttacaagtacctcgtcgccggtgtccccgtcccgggcgatctcctcctcccaatccgcccccactcctccgccgccgccacctactccttcgccaaccccgccgccgcgcccttctaccaccaccaccaccacccctctctgagctattatgcctactatggcaagaagcttgaccctgagccgtggcgttgccgccgcaccgacggcaagaagtggcggtgctccaaggaggcgcaccccgactccaagtactgcgagcgccacatgcaccgtggccgcaaccgttcaagaaagcctgtggaatccaagaccgctgcccctgcgccccagtcgcagccccagctgtccaatgtcacgaccgcgactcacgacaccgatgcgcctctcccgtcactcactgtgggtgctaaaacccacggtctgtcccttggtggtgctggctcgtcgcagttccatgtcgacgcaccatcgtacggcagcaagtactctcttggagctaaagctgatgtgggtgaactgagcttcttctcaggagcatcaggaaacaccaggggcttcaccattgattctccaacagatagctcatggcattcactgccttccagtgtacccccatacccgatgtcaaagccaagggactctggcctcctaccaggtgcctactcctactcccaccttgaaccttcacaggaacttggccaggtcaccatcgcctcgctgtcccaagagcaggagcgccgctcttttggtggtggagcgggggggatgctaggaaatgtgaagcacgagaaccagccgctgaggcctttcttcgatgagtggcctgggaggcgagactcgtggtcggagatggatgaggagaggtccaaccagacctccttctcgacaacccagctctcgatctccatcccgatgcccagatgtgggtcccctatcggtccgcgtctaccttga

SEQ ID NO: 5441 - DNA, 237 bp, Oryza sativa
  Clone ID: PAT_MRT4530_12228C.1
aatgatgatgagcatgatgtgatgatgattggatgatgatgcatgcatacatgagcccaaaacaaagctggcatgactgattgattgatgagggcaggcaatgccaccaggcgccgacccccatgcttgagcttgagtgggccacccgttgttgaggatgcggcgagcggccggctgtgagagggatgccaagctgacgacggcggtggcatggcgacgtgcatagtgttgtatgag

SEQ ID NO: 5442 - DNA, 237 bp, Oryza sativa
  Clone ID: PAT_MRT4530_12229C.1
atggcaaggaaatcagaaagccaaaccagagcaggaagggtgtttgagctccaggaagaggagcagggacttcatctcctggagttggtactccagctcaagaaccaagttagatcaataacaccaagcaggaggattagctgcaggaggaagagaatcaccagtagcagatcaagcaagatgacggagagcaggtccaggaaccaaacggagaagaaccagagaagcaccaaatag

SEQ ID NO: 5443 - DNA, 267 bp, Oryza sativa
  Clone ID: PAT_MRT4530_1222C.1
atggacttgaataccgcaaagagtatgatgctggacgacagcaacatcagcccaagaaagaagacattcacgacacgtaagaacaccatgctgagcataagcagaaacatcaatccagcagaccaagaaatgctcaaaacatacaagaggagaagagtgaacagggcttccatccctcagttgttagacgacactggtggagaaaccatctttggtcggtcgaccagatttcacaatagtcccggttatattaaaaaccgcgactaa

SEQ ID NO: 5444 - DNA, 484 bp, Oryza sativa
  Clone ID: PAT_MRT4530_12230C.1
gttcttggcccggtacagccgtgacaaggtcgagagggcgcttctcccgctgctcgcccacgtcgccgggacaggagacgcgtgcaacctgcaggacgtgttcctgaggctgacgtttgacacgacgaccacgctggtgttcggcgtcgaccccggatccgtcgcgatcgacttgccggaggtgcccttcgcgcgcgccatggacgacgccatgaccatgcttctcctccggcacatcgtcccgctgtcgtggtggaggttagcgaggaggctggggatcgggtacgagcggaagatgccggtggcgtggcgaaccatggaccggttcgtcgccgacacgatcgtcaagcggcgggcggagaaggccagaaccgggatcgacgactcggcggacctgctctcctcctacatcaacgacgacgaagaggacgccggcacggtggacgccttccttcgcgacacgaccattaacctcatgctttgc

SEQ ID NO: 5445 - DNA, 588 bp, Oryza sativa
  Clone ID: PAT_MRT4530_12231C.1
gcacgaggcaagttcatcatggcatctggaatcctcgtcaagatcttgttgcacactgatgtcgcgggaatatctcgaattcaaggttgttgatggaagttatgtcttcatgggaggaaaggtccacaaagtcccagctaacgatactgaagcattgaaatccgacttgatgggattgttcgaaaagagaagagcaaagaacttcttcaccttgagtcaaaattatgatgtcaacaatccaaagacccacagcggtttccctgatctcaataagaccaccatgaaagaaatctttgcacactttgggcttgtagatgacaccatcaactttatcggacactctttggcattgcacagagatgatgactacctcactcaaccagcaaaaccaaccattgaaaagtgcagattgtatgcagaatccctctcaagattcggaaaatccccatacatctatcctctttatggattgggagaacttcctcaaggatttgctcgtttgtctgctatctatggaggtacctacatgttgaacaagccatacgaaggagtcgtctttgatgagaacggaagagtctctggagtaaa

SEQ ID NO: 5446 - DNA, 416 bp, Oryza sativa
  Clone ID: PAT_MRT4530_12232C.1
ctgaggctttcgacagccttaggtccacgtgcttgaaactgaaccccgaaaagtgtgtgttcggtgtgccggcgggcaatctcctcggttttatggtcttgtctcgaggcatagaagctaatcccgagaaaataagcttagggatgtgcagtgtgtcaccggatgcatggccgccctaagtcgatttatatcgagactgggagagagggcgctatccctattcaagctcctcaagcgctcagggccgttcgtgtggacggaggaggccgagtgagccctcaaccagttgaaggcctacctcacctcccctccgatcctggtggccccgaggccagaggagccgccgctactctacttggccgtgaccccccacgcggtgagcgccgccctcgttgcttcaattaacaaagacaagt

SEQ ID NO: 5447 - DNA, 335 bp, Oryza sativa
  Clone ID: PAT_MRT4530_12233C.1
acagattagctggcttgtttcagtccttcttgtccatatgaatttacatcaagagcttttttggctacaaacccgataacacgtggcgatgaaaaacattacatcattgactgccctttgctcacttttgagaagagtgcacagctatgaaaaggtacgatctgtgaacactccgcggggttagaacaaagagagacctgatgcttgcagttttcaggagcctgcaaagttgctctaagtttatatttggatccccgccaatgtcagacttcttcaggaggggatcaacaaaacctttcagtcctgtatgcattaggagggaatcagatgtgata

SEQ ID NO: 5448 - DNA, 380 bp, Oryza sativa
  Clone ID: PAT_MRT4530_12234C.1
tcgtttgagctccccgtgcggcggcgcaagaggggagctacgcgggggaggcggcgaggtaaccacgagctgcgcagcggagcgcgctctggcgaggcagcaggcggaagcgtgcggcgcggcggcggacggcggcaggtagcaggcgaagcgcgcggcgccgcgagcgcgagcagccgagcaggtgcagcaacaggccagctggatgggaaaggacgcatgctagcgaaaagcgtggcgcacacctgggagcacgctagccagaggcaggaccagccgagcaacaggcaggcagcagctggccaacggttgcaaaataactaaacaagcgagcaagattgatcccaaggtgctggtgctgattaccttccaaaccatgt

SEQ ID NO: 5449 - DNA, 792 bp, Oryza sativa
  Clone ID: PAT_MRT4530_12235C.1
atggtgatgctccggctcggccgagtgaacaccgtcgtcatctccactgccgacgcggcgcgcgaggtgatgcgcgaccaggacagcgccttcgctagccgcccccggctcaccgtgcctcgccgcctcctgtacggctgcaccgacattgcctttgcgccacatggtgcgtactggcgcgccgcacgcagggcgagcgtgctccacctgctcggcccggccagggtccggggctaccgcgccgtgcgggaggaggaggtaggggagctcctccagctagtggaggtggcggcgagcggtggcgtcatgcggctcagcgagctactgagcgcgttcgccaaggacgttgccgtgcggaatgtgctgggtatacgtggcggggtgaagactgaagacgagcaggttggtgaggtcgaacccggcggcgatgaggaggaccgcgagctgctggcgctcggccggcggccacggcactggcaacctgctattcccagatgtcgctcaactacatacccggacaaggaggacttcagtgatctcgagggctgtcaccacctctgcgcccacctcaaacgtgttggtatgacggcgagcgaaggggaaatgtccgaagtgccctccaaccgccatcagggatgcatctgggacgtccacgccaaaccccagcctggatggctgagattgtggttcggccgaaccagggggttcggccgaacctgggccaggcccatctggcctagcctttggcccaagtccttccctggcaacgctggcttcggccaacaggagtag

SEQ ID NO: 5450 - DNA, 519 bp, Oryza sativa
  Clone ID: PAT_MRT4530_12236C.1
atggcttgcggcgtcgcgacgggaggaggtctcgagcaggccggattcgcgggaatgcgtgacgtcgtggtctcgtgccgacgcggaagattggaatggaaatcggagagagcaggggcggtgggcggtgggcccgtgctcgccgcagctcatgcaaaagagggggtcgtggcttccgagtgggccccacttgcagtgacggacactttccttcctcaaatcctcagttctgttggtcttctttttctctccggtggggatagcctagagactagtcaatggcttgtccttcccgcgatgtcagcagcatctgtgatctctcagtgggacccacgtgtcattgggcgaagactgatcagcgccgggagggccaagagcgggacgattcaaactttgggctttgagattcgtgtagacccattgtctggcagcggcgatcgtccgatcggctggtcgtgtgggtccgccaggagcagggtgatcacctcgttttctgaaaaaaaattttgctcggcatga

SEQ ID NO: 5451 - DNA, 882 bp, Oryza sativa
  Clone ID: PAT_MRT4530_12237C.1
ttttgtgtatcgggcctagctaccggcccattgtgccgggccagcccaacgtgcttgtggagaggcctaggcacggccagatggttgggccgggccggcatgggcccgacctctatcgggccatgccgtgcttgggccgggccaaaatggagtgccatgggccgggtccaccaccggctgttttcatttggttgagttggggaactcatcctctcggcatggaaaacgcaattttctggaccaaaaatagacttctttccggcccttgccggtcagcccatggccttttgcgctcgcgcgggcgcgcttcccctccccaggccgcaacctaggcttgggccagaaaagtggcctcgctctcgatccctcttgggccgatttcgacccggccgactctggccgtccgatctctagggttttgatcggacggccgagcgtcgagatcgaggaaacaaaccccccctctctctctctcctcggccgctgaaaccctagcccatttccttccctcccttctctcttcgtcgccctcccctccgcgccccgatgctctctccatctctctcaaccttcccccgagtggcggcgttggcggcgtcagcggcgcccttccccccgagcggcggcgacggtgcccctcctctctcgagtggcggcggcgcccttcctcccgcgagcggtggcgacgcccttccacaccaccggcagcggcggcggcggcccgtcggtgtcccaacggcggcgacgctctcccctccgccggatccagcagggggaagccgccagcggccaactgtcccggcggcggcgacggcgacgacctccttcgatcttttttttttttggatttggatatatttgtgtacatgctttctccgattt

SEQ ID NO: 5452 - DNA, 219 bp, Oryza sativa
  Clone ID: PAT_MRT4530_12238C.1
tcgttgtttactttgcttaatttgcttgccctcatcctcatggctgcggcggcggcggctgcttctgcttcccatctactgctgccggcgcacgcctccaccttcccacacgcaggacgagcacgtacgtcggaactggcaccggccccaacggcaggtcagatcatgtccgcgccggtgcctccaacggcgggcatgaccgaagatgcaagaccacta

SEQ ID NO: 5453 - DNA, 447 bp, Oryza sativa
  Clone ID: PAT_MRT4530_12239C.1
acggtatactcgcgcgtatacggatagtttccgtatacgttaaggaaatttatcacgtaatagaaacagaatctacggatggaaggaatcctactcggacgagactgggcctataccatatcgtgaggggtccgatatctccgagttctacttggagatcaactgacccgcgatatataagggaccccctgggtaggacctaggacatcgaatattactgccaacacacccaccacaacctacggagccggagcgcacaggaaccaagtcgccgggagatctagtcggaccaactcgactacggtctcgtcgatcctcgtaccaacggaccccaataccttctatatccggtctgcgggtatcccccacttgatgcatgtacgtacgtacgtacggctgttgggaggcttcaatcgaacccgtgatgcactgcagatttcataaaga

SEQ ID NO: 5454 - DNA, 174 bp, Oryza sativa
  Clone ID: PAT_MRT4530_1223C.1
tttgttcgtttcccgtatcggtagggtgaggccaatattctctctctctggaacactctgtgggctggcacttgccaaaatgattgagtcaaacacgagtggtgatgggacatggagacggatgaagcgctcggatccgacgacgcactcggccaccggatgcaactggcggcc

SEQ ID NO: 5455 - DNA, 324 bp, Oryza sativa
  Clone ID: PAT_MRT4530_12240C.1
ccaagctgcagctgcgcatcgcaacctccgctctctcctaaaccccctctctccaatggccggctacaccgcaaatgccggctccggctacccctacggcggcgccggcggctacggcgccccggcaccgtcgtacggatgctcccacggccccttcggcccggcgtacggcgcgaagcctaccaaggaagggaagacctcctgctctgccgccccttactacggcggcggaggcggctacggtgccccgacatccacccagccctacagcagcggaggcggatacagcgcgccggcctgcaccagacgtactgcgcgccgtac

SEQ ID NO: 5456 - DNA, 506 bp, Oryza sativa
  Clone ID: PAT_MRT4530_12241C.1
aagaaccatggcacaaatcagactcgaattggatgaggtacaaggcttgttttgaagattccagacagctcggtaggaattttttttgtcctacaaggactagtatcttcccatgggtataaatatgtacacccggggtcattgtaaatatctctggatcaatacaactactcttggcgcatcgctaccctctttaccgaggtttttacttatcatccggcggaatttggcacctgacgcggggctgcatcggttcagtttgatctccagcgaaggggtaagtcctatgttccgctggccctggtgaatctatcggctacgttggtgttgtttaaggttgcattgcttcgatctcttggatcgctctagtttggttgatctatttgcctacctgatatctgtggctctggttgtctcttgttgcttcgcaccatcatgtctacttcatatgtcctaaaaaaactatgatacatcgtagtaatacaaatctagtaagaaagctgtac

SEQ ID NO: 5457 - DNA, 1070 bp, Oryza sativa
  Clone ID: PAT_MRT4530_12242C.1
gcacgaggatcaaatcctccaccaccgcctccctttgctcttttcaattctcttcttgtggttcccggccggggcttttcccaaactccccgtgcgcctcgcgacgaggggaggaggacggcgactgacagggccgcgaggagatcgaatcgcgatcgccgtcatccatgtcgacgtcgcgcaggaggaccctgctcaaggtcatcgtcctcggcgacagcggggtggggaagacgtcccttatgaaccaatacgttcacaagaagtttagccagcagtacaaagctacaattggtgcggatttcgtcaccaaggaggttctcattgaagataggcttgtgactctgcagatctgggacactgcggggcaggagaggtttcagagtcttggtgtggcgttttacagaggagcagattgttgtgtgctcgtctatgacgtcaattctaaaaggtcatttgacacgctcaacacatggcatgatgagttcctcaaccaagctagcccatcagatcccaaaacttttccattcatattactcggcaacaagattgacatagatgcaggaaacagacgtgccatccctgagaaaaagcaatggagtggtgcgtctccaaaggcaatattccttatttcgaaacttctgcaaaagaggaccgcaatgtcgacagtgcgttcttgtctgtcgctaagcttgctttagagcatgagcgtgatcaggacatctacttccagacggttgttccagatcctgttccagaggctgaacaaaaaagtggatgtgcatgctagcagctagttattgccgttgcaggttatgcttactgattgtgatatttttttgaagtgatgttgtgcattctttgatgtacactaaggttcctatgcggccattctactcccttttgtagtcattgtacgatagttagccactactgttttggcccaagagtactcatgcggagtccttttcctccaattgggcaataagaatgtacagaggctgataatttggaataatgccctatctgctgtttatctcatggccttaacttattatatccgtgcggtt

SEQ ID NO: 5458 - DNA, 960 bp, Oryza sativa
  Clone ID: PAT_MRT4530_12243C.1
atgtcgacgtcgcgcaggaggaccctcctcaaggtcatcgtcctcggcgacagcggattcacggcagtagttggcactttgatatgcttgactttagttagatatgttcacaagaagtttagccagcagtacaaagctacaattggtgcggatttcgtcaccaaggaggtcctcattgaagataggctcgtgactctgcagatctgggacactgcggggcaggagaggttccagagtcttggtgttgcgttttacagaggagcagattgttgtgtgctcgtctatgacgtcaattctaacaggtcatttgacacgctcaacacatggcatgatgagttcctcaaccaagagcctggagggtttgggcggctcatttctccacatttaaaatgcttctctctctcccaccccctctcaacagcgatttccgcaagtgacaggcttacagcctcctctgaactggaagatcaatttgagatcttcgagcatattcgagtgttcaatgtgactactgtcacttcaaccaatacaaaagatgagactttactactgtggagcggctttttgctaaaagatgagggggaaatccttgctgagttcattgagaattttacggctagcccatcagatcccaaaacttttccattcatcttacttgggaacaagattgacgtagatggagggaaaagcagagtggtttctgagaaaaaagcaatggagtggtgttcatccaaaggcaatattccttattttgaaacttctgcaaaagaggaccgcaatgtcgacagtgcgttcttgtctgtcgctaagcttgctttagagcatgagcgtgatcaggacatatctagcttgatcttttttggttactcaccgtcatttttcctggccttcagctacttccagacggttgttccagatcctgttccagaggctgaacagagaagtggatgtgcatgctag

SEQ ID NO: 5459 - DNA, 2814 bp, Oryza sativa
  Clone ID: PAT_MRT4530_12244C.1
atggcgaccgcctcggcgccgctgcagctggccaccgcgtcccggccgctccccgtcggcgtcggctgcggcggaggaggaggcggggggctccacgtgggtggtgcccgcggcgggggcgcggcaccggcgcggcggcggctggcggtgcggagcgtggcgagcgatcggggcgtgcaggggtcggtgtcgcccgaggaagagatttcaagtgtgctaaattccatcgattcctctaccattgcatcaaacattaagcaccatgcggagttcacaccagtattctctccagagcacttttcacctctgaaggcttaccatgcaactgctaaaagtgttcttgatactctgataatgaactggaatgcaacatatgactattacgacagaacaaatgtgaagcaagcgtattacctgtccatggagtttttacagggaagagctctcactaatgccgttggtaaccttgagctaactggacaatacgcagaagcactacaacaacttggacacagcctagaggatgttgctacccaggagccagatgctgcccttgggaatggtggtctaggccggttagcttcctgtttcttggattctctggcaaccctaaattatccagcatggggatatggacttcgatacaaacatggcctctttaaagcaaatcatacgaaggatggtcaggaggaggtagctgaaaattggctcgagatgggaaatccttgggagattgtaagaaccgatgtctcctatcctgtgaagttctatggtaaagtggttgaaggcactgatgggaggatgcactggattggaggagaaaatatcaaggttgttgctcatgatatccctattcctggctacaagactaaaactaccaacaatcttcgtctttggtcaacaacagtgccatcacaagatttcgatttggaagcttttaatgctggagatcatgcaagtgcatatgaagctcatctaaatgctgaaaagcctcactacagggatattattgctcgtttcgagaggagagctggtgattctctcagctgggaggacttcccctctaaagttgcagtgcagatgaatgacactcacccaacactgtgcattcctgagttgatgagaatattgattgatgttaaagggttaagctggaatgaggcttggagtatcacagaaagaactgtggcatacacaaaccacacggtgcttcctgaagctctggagaagtggagcttggacataatgcagaaacttcttcctcggcatgttgaaatcatagaaaaaattgatggggagctgatgaacatcattatctcaaaatacggaacagaagatacttcactgttaaaaaagaagattaaagaaatgagaatcttagacaacattgacctaccagattctattgccaaactatttgtgaaaccaaaagagaaaaaagaatctcctgctaaattgaaagagaaattgcttgtcaaatctctggagcctagtgttgtggttgaggagaaaactgtgtccaaagtagagataaacgaggactctgaggaggtggaggtagactctgaagaagttgtggaggcagaaaacgaggactctgaggatgagttagatccatttgtaaaatcagatcctaaattacctagagttgtccgaatggctaacctttgtgttgttggtgggcattcggttaatggtgtggctgcgattcacagcgagattgtgaaagaagatgtattcaacagcttttatgagatgtggcccgctaaatttcaaaataaaacaaatggagtgactcctagacgttggattcggttttgtaatcctgaattaagtgcaatcatttcaaaatggataggatctgatgattgggttttgaacactgataaacttgctgaattaaagaagtttgctgatgatgaggatctgcaatcagaatggcgtgctgctaaaaaggctaacaaggtgaaggttgtttctctcataagagaaaaaacaggatatatcgtcagtccagatgcaatgtttgacgttcaggtgaaaaggatccatgagtataagcgacagctgctaaatatccttggaattgtctaccgctacaagaagatgaaagaaatgagtgcaaaagacagaataaatagctttgttccaagggcaaagaggatagtgaagtttattacagatgttgcagctactgtaaatcatgatccagaaattggagatctattgaaggttgtatttattccagattataatgttagtgttgctgaggcgctaatccctgccagtgaattgtctcagcatatcagtactgctggaatggaagctagtggaaccagcaacatgaagtttgcaatgaatggatgtatccttattggaactttggatggtgctaatgtggaaatcagagaggaggttggagaggaaaactttttcctttttggtgctgaggcacatgaaattgctggtttaaggaaagagagagcccagggaaagtttgtgcctgacccaagattcgaagaggttaagagatttgtccgcagtggggtctttggaacttacaactacgatgacttgatgggttctctggaaggaaatgaaggttatgggcgtgcagactattttcttgttggtaaagatttccccagctacattgaatgccaggagaaggttgataaagcataccgcgatcagaaactatggacaaggatgtcaatcctcaacacagccagttcctccaagttcaacagcgaccggacgattcacgagtacgccaaggacatctgggacatcaagcctgtcatcctgccctag

SEQ ID NO: 5460 - DNA, 223 bp, Oryza sativa
  Clone ID: PAT_MRT4530_12245C.1
acgggccactcttgtttttggtgttgtgttgttagcactatatatgtttgacttcaccctctgtagaaattgttgctcttagtttctcttgtgcttgagaatattctgtagactggttctggttggttccactcccactagatatgtaaactgccctcttttggtaattacccacttttttggaaattcccgttcctccactccaaaaaaaaaaaaaaaaaaa

SEQ ID NO: 5461 - DNA, 849 bp, Oryza sativa
  Clone ID: PAT_MRT4530_12246C.1
atgtcgacgttcaccgtcatctgcgcgctctacgaggccgttctccggcatgtccgacgacgtggggcaccgcccctccgtctcgacggcggcgccgagtccctgcgcatcgccggcagcgcaaggcggttgatgtgtactgggcgatcaagaacagggatgctacaccttgaccccgccgtatacaacaacggtagcttctctctcctcgccctcctggccggcctccgctgggtgttctcgcgctggcagatcgatgacgggtgccgggagctcctgcatcgcgtcagcttgacggagatcacccgtgcaccaccgcacgccgacgaccggaagaacgacgactccggcgactgcgacggcgacagcggtgtcatcgccatcctcccggtctcccgggaggtctcgggcaagtacgtcgtgctgtggccggcgcacgggaggtggctgttcaccgtcgagctcgacaccatggaggtcgtggaacgcaagagcgccacggacgaacacctaggtgatgagctcaacatgattggagatagtatacgctgctctctgtggatagtcggcatctgcatcacactcaatgttggcagcacggtggtgccagtgatacttgttgaagagagcgccatcgcaacatgttggccacctgcaggtgatggaacaccaatctgcatgtttcctatttgggatgaccaaataagattagctattgcttgtctgggcatttgcagcatggtgagaataaaatggtgcggacttgagcacatcgccgtggttagagaggcatatcttgctggtggcagcggcaaccgcaacggtggtggaccgatgggttcagagtag

SEQ ID NO: 5462 - DNA, 3461 bp, Oryza sativa
  Clone ID: PAT_MRT4530_12247C.1
gcacgaggctctctctctctctctctcgctctgacacacttgacactgcacgcgcgtgcgcgacagggggcgaccgcctcggcgccgctgcagctggccaccgcgtcccggccgctccccgtcggcgtcggctgcggcggaggaggaggcggaggcggaggcggaggcggggggctccacgtgggtggtgcccgcggcgggggcgcggcaccggcgcggcggcggctggcggtgcggagcgtggcgagcgatcggggcgtgcaggggtcggtgtcgcccgaggaagagatttcaagtgtgctaaattccatcgattcctctaccattgcatcaaacattaagcaccatgcggagttcacaccagtattctctccagagcacttttcacctctgaaggcttaccatgcaactgctaaaagtgttcttgatactctgataatgaactggaatgcaacatatgactattacgacagaacaaatgtgaagcaagcgtattacctgtccatggagtttttacagggaagagctctcactaatgccgttggtaaccttgagctaactggacaatacgcagaagcactacaacaacttggacacagcctagaggatgttgctacccaggagccagatgctgcccttgggaatggtggtctaggccggttagcttcctgtttcttggattctctggcaaccctaaattatccagcatggggatatggacttcgatacaaacatggcctctttaagcaaatcataacgaaggatggtcaggaggaggtagctgaaaattggctcgagatgggaaatccttgggagattgtaagaaccgatgtctcctatcctgtgaagttctatggtaaagtggttgaaggcactgatgggaggatgcactggattggaggagaaaatatcaaggttgttgctcatgatatccctattcctggctacaagactaaaactaccaacaatcttcgtctttggtcaacaacagtgccatcacaagatttcgatttggaagcttttaatgctggagatcatgcaagtgcatatgaagctcatctaaatgctgaaaagatatgtcacgtactgtatcctggggacgaatcaccagaggggaaagttcttcgcctgaagcaacaatatacattatgctcagcctcactacaggatattattgctcgtttcgagaggagagctggtgattctctcagctgggaggacttcccctctaaagttgcagtgcagatgaatgacactcacccaacactgtgcattcctgagttgatgagaatattgattgatgttaaagggttaagctggaatgaggcttggagtatcacagaaagaactgtggcatacacaaaccacacggtgcttcctgaagctctggagaagtggagcttggacataatgcagaaacttcttcctcggcatgttgaaatcatagaaaaaattgatggggagctgatgaacatcattatctcaaaatacggaacagaagatacttcactgttaaaaaagaagattaaagaaatgagaatcttagacaacattgacctaccagattctattgccaaactatttgtgaaaccaaaagagaaaaaagaatctcctgctaaattgaaagagaaattgcttgtcaaatctctggagcctagtgttgtggttgaggagaaaactgtgtccaaagtagagataaacgaggactctgaggaggtggaggtagactctgaagaagttgtggaggcagaaaacgaggactctgaggatgagttagatccatttgtaaaatcagatcctaaattacctagagttgtccgaatggctaacctttgtgttgttggtgggcattcggttaatggtgtggctgcgattcacagcgagattgtgaaagaagatgtattcaacagcttttatgagatgtggcccgctaaatttcaaaataaaacaaatggagtgactcctagacgttggattcggttttgtaatcctgaattaagtgcaatcatttcaaaatggataggatctgatgattgggttttgaacactgataaacttgctgaattaaagaagtttgctgatgatgaggatctgcaatcagaatggcgtgctgctaaaaaggctaacaaggtgaaggttgtttctctcataagagaaaaaacaggatatatcgtcagtccagatgcaatgtttgacgttcaggtgaaaaggatccgtgagtataagcgacagctgctaaatatccttggaattgtctaccgctacaagaagatgaaagaaatgagtgcaaaagacagaataaatagctttgttccaagggtatgcatatttggtgggaaagcatttgccacttacgtacaggcaaagaggatagtgaagtttattacagatgttgcagctactgtaaatcatgatccagaaattggagatctattgaaggttgtatttattccagattataatgttagtgttgctgaggcgctaatccctgccagtgaattgtctcagcatatcagtactgctggaatggaagctagtggaaccagcaacatgaagtttgcaatgaatggatgtatccttattggaactttggatggtgctaatgtggaaatcagagaggaggttggagaggaaaactttttcctttttggtgctgaggcacatgaaattgctggtttaaggaaagagagagcccagggaaagtttgtgcctgacccaagattcgaagaggttaagagatttgtccgcagtggggtctttggaacttacaactacgatgacttgatgggttctctggaaggaaatgaaggttatgggcgtgcagactattttcttgttggtaaagatttccccagctacattgaatgccaggagaaggttgataaagcataccgcgatcagaaactatggacaaggatgtcaatcctcaacacagccagttcctccaagttcaacagcgaccggacgattcacgagtacgccaaggacatctgggacatcaagcctgtcatcctgccctagacaggcaaggcaagcactagccactccctgccagcgaccttcagagctaaggtgcgcgcaaccggtgatgcgatgacagcatctgcctcccagctctccttggcaggaaggtttcgctttgctcccagttttgagtagacagaagcaagttcagttcaggcttcgataaaacgctggaactatgcaaattgtagccgtgttgcctagcctggaacacccttgttttacctgtaatgtgtagcagcctctgctgatcagctcatgtgctatatggaattctgaagtgaaaccatagttaaaagggatcggttagtggcatcctttacaatctccgagatgtgctatatggaattctgcattgatatgttcttttttaaaaaaaaaaaaaaatgggatatgctgaatgatggcgaattggcgaggatcaaaaaaaaaaaaaa

SEQ ID NO: 5463 - DNA, 852 bp, Oryza sativa
  Clone ID: PAT_MRT4530_12248C.1
atgtcgacgttcaccgtcatctgcgcgctctacgaggccgttctccggcatgtccgacgacgtggggcaccgccgtgggccgcgtcttctactgggatgctacaccttgaccccgccgtatacaacaacggtagcttctctctcctcgccctcctggccggcctccgctgggtgttctcgcgctggcagatcgatgacgggtgccgggagctcctgcatcgcgtcagcttgacggagatcacccgtgcaccaccgcacgccgacgaccggaagaacgacgactccggcgactgcgacggcgacagcggtgtcatcgccatcctcccggtctcccgggaggtctcgggcaagtacgtcgtgctgtggccggcgcacgggaggtggctgttcaccgtcgagctcgacaccatggaggtcgtggaacgcaagagcgccacggacgaacacctaggtggtccatggtgcatgactgacccaagcattgatggggtggtgctggtgatatctaccaaagaagcagatgagctcaacatgattggagatagtatacgctgctctctgtggatagtcggcatctgcatcacactcaatgttggcagcacggtggtgccagtgatacttgttgaagagagcgccatcgcaacatgttggccacctgcaggtgatggaacaccaatctgcatgtttcctatttgggatgaccaaataagattagctattgcttgtctgggcatttgcagcatggtgagaataaaatggtgcggacttgagcacatcgccgtggttagagaggcatatcttgctggtggcagcggcaaccgcaacggtggtggaccgatgggttcagagtag

SEQ ID NO: 5464 - DNA, 312 bp, Oryza sativa
  unsure (1)..(312): unsure at all n locations
  Clone ID: PAT_MRT4530_12249C.1
ggacngatctactagatccttggaaagaaactgagccagacacaagactgctagtacttgatatttgagaagcatccaccactttgcaaggcagcaagaaagtgaaggcaagaatcatttagctgagccttgtgaattctagtacttcagttggaccatctaaaagaatagcagctctctccaggttactactcctgttactaaccattgatagaaaccgagagatagttgatctggtgcagatcttgtgtcaccatattacaccagttgaaatatctagaaggagataagaaaaggcaagaagaaaattaa

SEQ ID NO: 5465 - DNA, 411 bp, Oryza sativa
  Clone ID: PAT_MRT4530_1224C.1
agtaatcaacttcaacttttaggaagagctgcatcggagttaatcccctattttcggagcgacccaataaacatcctagctttcgaaatgaaatgtacatacataccaacccccaccaaaatgaatcccatcaatgtaagcaattgaaaatgcgcaatggggcacagcgagacagggagctctggagcccacaaccatcgcgcccgcgcggccgcgtatatgggggactctgcggcgcggatccgccaccgagacccttgaggcgcaaccccaccttgcgccccgcgggccatccgagcacgtctcatcggggccggcaccccgcccgcgggccgcccacaggctgaactcgcgactgacaaccgcgtgcccgcggctgcggacagggggatgcctgcgcaaccgtcctgg

SEQ ID NO: 5466 - DNA, 193 bp, Oryza sativa
  Clone ID: PAT_MRT4530_12250C.1
gcatacttcatcataaactgatgcacgatcatgtacttcaaaagtaaaacataatctgtggaattttgtattggttactgtaagcatattcaaagtagttgtgccgaatgccctttgccctggagatttgctaaataaacgaagtaccttttgaaaaaaaaaaaaaaaaaaaaaaaaaaaaaaaaacaaaaac

SEQ ID NO: 5467 - DNA, 616 bp, Oryza sativa
  Clone ID: PAT_MRT4530_12251C.1
ggatccccgggctgcagggctaacctttgtcagtatgttgaactagacctgtagagactaatttcatatgtcctagactgtttccatattggatcttttatgattgatatgacatttagtttctttgtaaataaaaactggttggactagctgatcacatatagaaattgatttagtacaatgttacaaggcctatagatgtcaaggacattttctgacatttcaactgtatggtaacctggagaatcaccattctcttctaatgcaacatgggatcataattagtatccaccatttagttaggggaaccttgaaaatatcctaatgatgcaaaaggtgtagctaacaataccctcaccatggaatatgtcgtggctttgggctggaaaatggttccacgacaattatgactagcatctaaggaagcatgggaaatatactaactcactgaagtaggagtagttgtgaagttaagtgctaggcacaaaaggccaaatttgaataattaaagttgcttggtgttgggattgaacctatgtagaatatcttttgaccttcatgtgaattcaactttatcttatttattgggctcaatgaccacacgtttatctgcatt

SEQ ID NO: 5468 - DNA, 828 bp, Oryza sativa
  Clone ID: PAT_MRT4530_12252C.1
atggacccgcgtggctctgcctgcttcgtcgtcttcgccgccgccgcggctgcctctccaggcgcaggcgacggctcgcctgcgccacgtcgtcgtccgctgccagaagaaggcaccgccgacgaccacccggcccagcagaggagggtgatccccatcagcctccatcgcaccagctctctcgacgatacaccattcaattatgagataaacaaaattaaagggtattggacggagatacgttcagcgaagatatgctatttgtatgggcaaggcaggatgttagcactgactcttctcaaaagagctaaagatgctatcgggttggcttctacaattatgactggcgctcaattgagagctcaaacgccaagtgaaatttctctcaatacaatagatcagactgtcaggatgtatgtatcgacctttgttaagactgccgaggacacttaccataggaaggtcgataaagcaaccgttctatcattcctttgtgctcttcaaggtttggctgcagttagccgtatcttgtttgaagatgctttggcatctgttcgtagcattcaaccggattacagtccaaaacgtgatgtcgaggcaattaaccgcaattatcagcaggagatacaatgtttgataaataaatttggggaggcttcaacaactgaagcacttgagattcttcattgtacggttaatgatttagcacagaaagtgtcatcttatgttaccataatgactactcttcgcacgagcacactagcccatgtccctggccgcaccattgcatcctgtgatgctgccccaccagatgacaggcaaaattaa

SEQ ID NO: 5469 - DNA, 900 bp, Oryza sativa
  Clone ID: PAT_MRT4530_12253C.1
ggacgcggagaaagcgacgaggcgaacactcctctcctcttcccctctcgtctctcctttgcctgcgaggaactgtgcctcgccgccatcgtcatcgtcgtaacctgcagccgtcgtcgtcaactggccggtctagccgctcgccgcacgtggtggccgatggtcgcgcctccaccaacttcttcagcacgtggatccagtattgatcatcttctgctcggtgccattccattccccaagaccttcttctgttgaaggagcttggagtttgcggtgtcgtgaactgaacaaatcctactagaggctggttcccatgtgcctgtaagagtccgtgcaggcggcgccccagcctctagtcctatgtaaagatttgccgccgtaccagtcttctcagaacttcagggaaaggccttgtcttcaactgaaagtgaacctcttaattccaccagaaaaaaaattgctggatgagagacgggtaagagatactagtacccccacaatgataggaagaaaacaaactaaatgaagtgatgaggggggcacgacatggagggccctaactatcaacttctccaaaccacacgagaagtcgagaacagatgcatcagcctgcattgtctgcactcctgaacatatgcgcttcgtgcgtccataaatttgtccgcctcctcaggaaggtgtccggaacatggacgcgtgaagggttcagtgattcactgatttgggctttgttcgaatgtgcctttagctttagctttttaatcgtataaaaaaatattagcatataattaattaagtatatcctagcttcatcctaaaatattatgattctgtttagttttcttgttctaaaatactgtccagatttgttgatgtagaatgggtataatatgactcacc

SEQ ID NO: 5470 - DNA, 414 bp, Oryza sativa
  Clone ID: PAT_MRT4530_12254C.1
atgaaacccctcatcgaagcagcggtggtggacatgttcgaggccggtctgccggcaagatttggcgtggctgacttggactgcgcgtcggggccgaacgcccttgctctcatctccaccgccatcaacgccgtgcaccaccatcttctggggccggcaccggcggcggcgagccggtgcgacgagctcaccgtgttattgaacgacctcccgacgaacgacttcaccagcgcgatgactggcctgccgttgctccggcagaagcactccgtcgtcggcagcggcgtcgactattggcccggcgtcttcgtgtccgtcgtgccagggacgttctacggtaggctgttccctgaacgaacgatgcatctcgtctgctcttctttcagcctgcactggctctccaaggtttgttaa

SEQ ID NO: 5471 - DNA, 621 bp, Oryza sativa
  Clone ID: PAT_MRT4530_12255C.1
atggggagcgagcagatcggaggagattgcggctcctacacgatcaccacctctagttgctaccggcgaccaccccgaacctccctccttgcctcctctacctccaccggctacgacatcctctccccacacacggccacgagcgacgagctcggcgttgggcagaacggccccgacgcggagtcatcgagctcgtctccggcaagcgtcgagcagagctacggcgtggggcggtgggggcaggttgtccacctacccggcggcagcgcggagcgggagttgcagccgcggtcgagcaatcgagctctttggcggcggtcaagaaggcctcctccaccgctcagatttggcggcttcattcatgttttcctcctcctcgtcacctcttccgatccggtggccttggtaaaggatgtgctcagggcgacgtcctcaatggcgatgaccccgacgacgaagcagctgcgtgtggcgtcgtcttcttgctcattcgctccgtcaccaagagtcaccgccttcgagcagcaccggcccagagttgccttcgagcggaggtggaaagagagaacgacgccagcagtgggagggtggggaggaagagcagcgctaaatggggggtag

SEQ ID NO: 5472 - DNA, 324 bp, Oryza sativa
  Clone ID: PAT_MRT4530_12256C.1
atggacgcgtggctctccgctgctggcgacgaggagatgaggtgtcgcgtcgcgccggcggcggctggatgctcgcgacggaaagatgagctccaagctcgtaaaatggacagcaacgtggagagggagcatggccactatcagcaacaggaaagcaaatttgtgtccatggtcattggtccatggatagctctgaagtgtcctcgccataactatgcaacagcgacctttgcgatggcgttgcccggagcaaagacgaaggagacggctctctggattagtgtgaacacggttgacgacgggtcactgtatacgagtgtatga

SEQ ID NO: 5473 - DNA, 357 bp, Oryza sativa
  Clone ID: PAT_MRT4530_12257C.1
ccttcttgcctcaccaaaaaacccccaactccacaatattagcaacactcccaaatccagaggtggccaaacgggccgggccaaacgggccgcccggggcacggccgaacctgtagcaggcacggcccggcacggcctgctacagtaacgggccgtgccggcacggcacgagtagccgtgccgtgcttgggccgctggccgagcccgcgggccggcatggcacggcacggctactgtagcaggccggcacggcacggcccgcggcacggcacggcccgtttcgccggtggcccgtcaggcgtggacagggcgggcggcggtcgaatgggaaggcgccacgtggcactaacggctatt

SEQ ID NO: 5474 - DNA, 1338 bp, Oryza sativa
  Clone ID: PAT_MRT4530_12258C.1
atggtgtccagtcgaaggaacaccgggggaatccagcgggatgggtcgctcggcttcattagctcaagccctgacccccccacagcagcagcagcatcagcggcaggaggaggaggagggagaagagtgcgggcgcctcgggaagccggccgacagtggtacaattctgcatccgcatcgtatttccacatgagcaaaagggggcctcagaggcatactcggtctcccgagaggtcgaaatcgagggggctgagctgcaagacacttgcttgtcatctgtttgtgtccttcgtggtccgcagcaacattgcggtcatgctgtttttctcggtcgatgtctctctgaagatactgtctgaatacgggagggttccgtttgatgagggtgcagttgataggggaatggtggatggtaaagttaaggagctggagataattgtggtggagaaagaggttgacttaattgatgagagcgaggttgaagagagtcctccagtccctgcaatgctggatgacgaggctgattttgttgaatcagcccctgcaatacctgatatcaatgatttggacatcactgtgagaaagcttctgataattgttacgatcactactgttcggccacaacaagcgtattacctgaaccgtttggctcatgtcttgaaaactgtacagtctcctcttctgtggttagtggtagaatggcctgatcagtcctttcaaacagcagaaatccttaggtcttctggggttatgtacaggcatctcatctgcaggaagaatactaccagtgtacggaaaattgctgtatgtcagaggaatactgcaatctatcatattaaaaagcatcgtcttgatggtataatgcattttgctgatgaagagcggtcatacatgagtgatgtatttgaagaaatgcggaaaatcaggcggtttggtgcatggcctgtagcaattcatactgggatcaagtacagggtggttttagaaggtcctatatgtaaaggtaatcgagtcactggatggaatacaatccagaacatccagaagaagagtgcagttcgtcgatttccagttggtttctctgggtttgctttcaacagcacaatgctatgggatcctgagaggtggaaccgcccacctatggattctgttattgtccactcaggtggaagaggtggtttgcaggagtcaagatttattgagaagcttgttaaacatgagcgccagatagagggtctcccagaagattgcaacagggttatggtggccatgaggctgctcagtgatgccttcctgaacaaaccgcacactggattacacgaagttgccgtggtttga

SEQ ID NO: 5475 - DNA, 535 bp, Oryza sativa
  Clone ID: PAT_MRT4530_12259C.1
ggtttgggtttttttttttttttttttttttttagggagacgatcaacgagatcgcatcgcctccgccgccaacgccgccattcgattgatctccaaagatacctttctgttcttacaagttttgtttatattcaacacactctctctcactggggtctggaggccagccaggctgtcgacagagccatagccagctattacttacaagcccattcaggcccactcagacgaacattaaacttcttaattctagtagctcgcttcagcggcctagaaattgggttctcctgggcttcgtcagacaacggcaactccctggaagcagtattgctgctgacaaaccccaccccttgaagactgacttgcccccaaggcagtgcaaaagggaaacgctgcttgagctcttcttcatcttcccagggggcttccactgcaggcaaattagaccagcaaacaagaatttgacggacaactttgttacctttcttctgtatccttggatccaagatctgaacaggatactgaatatgatct

SEQ ID NO: 5476 - DNA, 541 bp, Oryza sativa
  unsure (1)..(541): unsure at all n locations
  Clone ID: PAT_MRT4530_1225C.1
tctgtatacgactcctatagggaaagctggtacgcctgcatggtaccggtccggaattcccgggtcgacccacgcgtccgatcggtggtcatggcatcacttgctggtgacgtcttgagctttagaactgcaggcactaactggatacccacttcagacggtgggtgaagatggaaactcatgtgaagaatgcaaggtcggccagatatattggtcgacatgaattgtgaatttgtggttggaatatatattgttagagatctccatatcttgtattgttgccatggtattttctntgcaaatgtagagataactgccctaaaaatagagcgtagatgaaaccccctttctccttcagaaatggggacataaattagtaggttgtaaattatttgcttctgtgccatccgtgcctgcaagaaattgcggcctgtacagtatgcagcgcgctatcctgtatcaagaaaattattttatgaatcctgtgactaatatgaatctgtnctcaanaaggtttggagaaaaaaaaaaaaaaaaaaaa

SEQ ID NO: 5477 - DNA, 802 bp, Oryza sativa
  unsure (1)..(802): unsure at all n locations
  Clone ID: PAT_MRT4530_12260C.1
cacgcgtccgctcgccccgggcttgattagctcaagccctgaaccccccagagcagcagcagcagcagcggaggaggaggaggagggagaagagtgcgggcgcctcgggaagccggccgacagtggtacaattctgcatccgcatcgtatctccacatgagcaaaagggggcctggaaagcacgcgcttttgagaaattaggagaaaagggatacatgcatagcgagatcttgatcttggaatggtgtccagtcgaaggaacaccgggggaatccagcgggatgggtcgctccgggactggctgaaatctgcatgggcggctatactgtcccagaggcatactcggtctcccgagaggtcgaaatcgagggggctgagctgcaagagacttgcatttcatctgtttgtgtgcttcatggtcggcatcttcattgggttcatgccgttcttctcggtcgatgtctctcagaagatagtgtctgaaaacgggaggcttccgtttgatgagggtgcagttgataggggaatggtggatggtaaagttaaggagctggagacaattgtggtggagaaagaggttgacataattgatgagagcgaggttgaagagagtcctccagtccctgcaatgctggatgacgaggctgattttgttgaatcagcccctgcaatacctgatatcaatgatttggacatcactgtgagaaagctttctgatattgttacgatcactactgttcggccacaacaagcgtattacctgaaccgtttggctcatgtctntgaaactgtacagtctcct

SEQ ID NO: 5478 - DNA, 375 bp, Oryza sativa
  Clone ID: PAT_MRT4530_12261C.1
atggcggcgcacccggcatcgacgtcgacgctcaactactatgcgacgttgttcgacggcctgcagcagagcacgacggcgccggcggagcgcgtgctgctcgggatggagatccgcagcgtggtggcatgcgagggggcggagcgggtggagcggcacgaaggcatgatgagcctccggaggacagccagccgccgtagggtcacggagcccctccggaggccacatggtctccagggccccacggagtctctggaggccatcgatccgctggaggccaacaaggactccgaggatatcaagccattaagggccaatcgactttcggcaaacaacggaactccggaggccatcccggactccggagttggttag

SEQ ID NO: 5479 - DNA, 587 bp, Oryza sativa
  unsure (1)..(587): unsure at all n locations
  Clone ID: PAT_MRT4530_12262C.1
tttattccatgccacccactgtgtatgcnaacagttacaatggctgcatgattttacatctgtaaggtaacacacagtaaaacaaaggaagctaaaaaatctataggggaacatctagctggtggatatctgggggaaaaaatgaacagaatacaaaaaggaagtacacatttacctcaaaaaaaaaaaagaaagtggagaagaaaaaaaaaaggaaaaaaaatttggtcaggcatcttgcttggcacagctactgataatctgatatgacaattgctggaggatcaaaccacggcaacttcgtgtaatccagtgtgcggtttgttcaggaaggcatcactgagcagcctcatggccacctgtacgaggtacgagcatacacagtgggtggcatggcatcaaaatattatgttacaggaataacggcatcaaggttcttatgcaatgaccagccaggggggacattgagtagaggaggttccaagttaaaattccaaaccataaccctgttgcaatcttctgggagaccctctatctggcgctcatgttttacaagcttctcaataaatcttgactcctgcaaacca

SEQ ID NO: 5480 - DNA, 1299 bp, Oryza sativa
  Clone ID: PAT_MRT4530_12263C.1
atgaaggatgagaggttcagagaggcagcaaggcaggtcgccaacgccggcggggtctactccaccgatgtcgccgactacgctgtcggcctcctgttcgacgttctcggccacgtctccgtcggagaccgctacgtccggcgtggcctctggccggagcgcggtgatttcgtccccctcggatccaagatcggcgggaagcgagtcggcatcatcgggctgggcaacatcggctcggcgattgcgaggagactggaggcgttcggctgcgtcgtctcctaccacaaccgccggcttgcagctgcagatgcagatgcagatgcagataaaaagatcgaggtgaaatttctgatgacatgcatcagctttggttgtgattccttctcccttctcttgttcttgggtagacatggctgtcaaccgaagctggtcacggacggcggagagacgaagtccttaaccttcgcctccgtgaatttccaggtgcgctcgggcctggttgagtatttcccagcccgggccgcaaacgaccgctgggcaactgggtggtcgcagtgctggttctacctcgatgtcggggtggactccgggctggcttccaccaacaagatctacttccgccacctcccggaggtcaatgcggacgacgaagacctcgacccgctgcaccagtctctccgcaggatggcgaagtggctcagcatgccggacctgacggaggaattcgtcatgcttcggatcattccgctctggaatggctgggtccacgaccttacttcgggagacgaagacaaggccggggcctatgtgggcccggtgacctcctcaactttgctgacgccggtctctacggccattacggaggccgagaagatccttgggaagccggtcgtaaaggagaagcaagagcggaccgaacggaccagctcttgggagaggaccaaccgggtggcagcccggttcaacttgcaacttccggccctcccgtccttgagcgaggccgaggtggaggccgaggtggcagaggccgccaagtccactggcaagcggaaaggtgggggttcgggagttgctccgggcgcggaggaatcatccccgcctactccggtgactgttcctggctccgatgggggaaaccagggggcggtgaacaccggcgctacggccgctccggagagccacgggggtgagctctggacacctgcggcctcagacgcccctgctgcccaagtggttttagggccgagcccaacacatggagcgcgcaccgaagcgcactacaggatgtatgtcatttaa

SEQ ID NO: 5481 - DNA, 2907 bp, Oryza sativa
  Clone ID: PAT_MRT4530_12264C.1
atgggggacgaatacctggctgagcctgaggatgaggtggccatatcaatgtggcctgagaatataggggataaacaccagaagcagttcaaaatggaaaagcttgggaaggaccaagatgcacttgaggatgctaattttcaacagaagccttcttctgtggatttgaaccgccttatggaattggcgaattctgagaaaggcgtttctcaaatgcaatactttgtgaagcactgggaatataagagggcgaatactgctcggcttctaaaggaacaaattggtcttctttgccaacagaggaaagagattgaacaaaggaagcaacaaatactggaggaacaacaattccaggatgaaagttattatgctgttaagtggcaagtaccaatactagatgaagtttacaaagatgaatggaagcgtccgagcaaaaagaatgatgacctttctcataatcaagaacttaaaatagatgcagaatatgacagtatttcgtactggaaagagagagcgatgcaattagaaaagacacttgaggccagtcttcaaagggagcgttcattggaggaaaagttggaggaaaacataaagaatcttcagtcacataccccagttgaggaattctctggaatgttaaaacgggctgattacttcttgcacttggttcttcaaagtgctcctattgttattgctcatcaggatgctgacttgcggtaccggttcatatttaatcacttcccgacattggctgatgaggacgttattggtaagacagattatgagatattgtcaggtgagggtatagaagagatgaataatgtcaagaaggaggtcatggccagtggtaaggctactaagagagagtttgtatttaatacaccgttgtttggagcaaaaacctttgtgacatacattgagccagtattcagcaaatctggggaaacaattggtgtgaattatgttgcgatggacataacagatcaggttacacgaagagagaaaatggcggacataagggtgagagaggctgtccaaaaggccaaagagacagaacttagcaaatctcttcatataacagaggaaacaatgcgagcaaaacaaatgctggccaccatgtcacatgagatcaggtcccctctttcaggggttcttagcatggctgaaattcttgcaactaccaaattggataaagagcaatatcagttgctagaagttatgctgtcatctggagaccttgtattacaattaatcaacgacatccttgatctttccaaagtagagtcaggggctatgaaattagaagctacgacatttagaccaagggaagtagttaaacatgtactccaaactgcggcagcatctctgaagaaggaattgatccttgaagggtgcataggtgataatgttccattggaggtcactggtgatgtgctaaggattcggcaaattctgactaacctaatcagcaatgcagtgaagtttacacatgaagggaaggttgggataaatctacatgttctagacaagcagttaccaggatgtagaatagaaggtgggcaacttcattcaaaagctcattctgcaccagctgccgcagcagaacatttttctgcttctccaagaaaatgcgataatgatactttgggctgctccaatcatgaagatgcttgtcagactggcattccatcaaatgataactttggggagcatcatgagggagatgaagttgtttggcttcgctgtgatgtatatgatactggaataggaataccagagaaatccctgccgttgctattcaagaggtatatgcaagcaagtgatgatcatgcaagaaaatatggcggaacagggcttggccttgcgatatgcaagcagctggtggagttgatgggtggcactctaactgtggtcagcaaagagaatgaaggatcaacattttcatttgttctgccttgcaaaattcctgttaaggaggatcacagtgatgatccagatgatatgcccagttctggtggtgatttcactactagtgatatagaaggttctttcattttcaagccacaagcacggccttatcttttgacatccggagtttcagtaatgaacaacaccaagttgatcggtggcaaccaattctatgatcctccgaacatactagaagaccgtaagccgttctcaaatggtttcgtgttagcagaagatcattctacaaattctgcctctactgctcatcagtcaaatggtcctagtgttagcagaacaaacaaagaacaacatgataatgcaatggtcattgaactgaataggcaagctgaacgggtttccagttcacgaggtgacacgacatcagtttcagggctaattcatgatgaaaggggaccatgcagagttcatgaagaaaagtcacttcacaagaaatccaagtgttctccaagtagcaataaggcaaagatcctcctcgttgaagataacaaagtcaatataatggtggcaaaatcaatgctggagcagctcggccatggaatagatatcgtaaataacggactggaagcaattcgtgcaatacagaagcgccaatacgatattatcctgatggatgttcacatgccagaaatggatggtctacaagccacaaaatttatccgttcttttgagaatactggatgttgggacacttctgtaaagcccgaacacgatcagatcatagctggttcagataatttgtctgattgtgcacacatgaaaaagcaaggaaagcgggttcctataattgcgatgacggcaaattcattttcagagagcgccgaagagtgccttgctgcaggcatggactcctacatatctaaaccagtgaacttccaaaatattaaagaatgcctgcagcagtatttgcctccccagtga

SEQ ID NO: 5482 - DNA, 1158 bp, Oryza sativa
  Clone ID: PAT_MRT4530_12265C.1
tgattcgtgctccagtaacgcagcgataaaactaacatcagtaagcatccataattgtaccaacattttttttatttttgatttgcaaacaattagaaattccatttaaaacacaaacctcaatgagccctatagctattatacatcccctgagcaagagtgttgcgaaaatttgtccaatcatcagatgtcgaaatagctgagataaactcaggttcggcgagttctccctcaagtatatccaatggtatctcgtcctcatcctcatcctcgtcctcatcctcaaatggatcaaacaatgaatcaaataatatgaaaagaataaataattacttaaattttttgaataagactaatggtcaaacacgtactaaaaacaacaataataataataataataataataataataataataataataataataataataataataataataataataataataataataataataataataagagatccaatggcgacgccgattcctccacgactacgaccgctagtccgggatgctctctccttgggtagcgccgctcctcagcctcgcaagcaccgcccgcgcttcccttgcctcgccacctcccctccctcttcctcccctcgttgcccggcttcctcttgcaaacagcgccgccgctccgccctcttcttcctctcgacgcgcggtgcagcacgacgctccattttgtccatctcacagccagtagtcataaaacaagtatctgcataccattgtctaccccgttcatttacagctccacatctctaataataataataataataataataataataataataataataataataataataataataataataataataataataataataataataataataataataataataccaggcatggatccacgacgtctactaacaatgagagtgatagttcttcacaagacgcatcacctgttaagccactcaatgactgtagcagtgagaatgataaagatgagtatgacggttctttgcaggatgcatcacctagtgaaccaccgaatgacagtaactgcgagagtggtaaatatgagaacagtgactctctacaaaatggagttaatgccacgaagaatggagttaagacataaccttcatacttgagcattt

SEQ ID NO: 5483 - DNA, 485 bp, Oryza sativa
  Clone ID: PAT_MRT4530_12266C.1
acagttcattccttccacagcacccaccacaagttatcatccagcaccaggtcaaccagactgccaccaactctaggaatcacctccattgcctccacatccggaaatccagccagtgaattatatgcctggcgacaccctgagcagaagatcttacctgctacgccggtcaagagggtcgtcattcgttccgttcagaagagttaacacgcagagcaacgtctccggtgtaactccagctagtaggacacctgaaggaacaagtcaaccagcgacagaattacgcgaagcaattgccagtaccaggttgagacctttacttatcaagtacagcagcagtccacaggttttctaaatttgtagtactcttatttgtacactagaagttttatgcgcagttatgtaaggtaaaagggaatgcttgattaaagtatgagtcaggctgtttttcttttcctatgattcaaaaaaaaaaaaaaaaaaaa

SEQ ID NO: 5484 - DNA, 471 bp, Oryza sativa
  Clone ID: PAT_MRT4530_12267C.1
aaaaaaaaaaaaaaaaaaaaaaaaaaaaaaaaaaaaaaaaaaaaaaaaaaaaaaaaaaaaaggggaggagaataataaagaaaaaaaagggcgcacctatttttaggaggggcgggcttcttttcggggggtcccggctggcgttcccttttttgttcggtctttgttatcttattgagtggcctaactttgctacctggccgctgttaaaccccgggggtttcggaaattccttgggttgccccactttacttttttggcagctggtccttttttccaaaggggccttacgatggaggggtccaacgattgcgccccttgcaaggggtttggccccccccttggggaggggaattccccctggggcggccctttattccccgccgttgggccggttccctgcagggtgtcctttcccctgcccctttccctggcccgcgttcctttgccgcctttttttgcgtttttccc

SEQ ID NO: 5485 - DNA, 612 bp, Oryza sativa
  Clone ID: PAT_MRT4530_12268C.1
atggcagctaccaagaggatgtcctactccatcgcggcggttttgatgcttcttctgatcatgtcctccaccttctcctgctacgcagaattgcagctaaagaaacgatggaccaagaaattggcctcctccagcgctgggcagtcgaagatggaggcaacgtcgaaggcggctattgaccggcaagaggtgcgagtgagcaccaccccgatccgggcggcgatcgcacgggaccaacggaaggacgacttcgaggtgctggtgacggtggaggcgcccaaggtggtggcgccggagaagcgcgcccccatagacctggtcgcggtgctggacgtcagcgggagcatgaacaaggaggagtttgtccggggaaagcacatgtcgtcgaggctggatcttctcaagatcgccatgaagtacatcatcaagttggttcgcgacgccgaccggctggccatcgtgtccttcaaccacgcggtcgtcagcgagtacgggctgacaagaaattcagcggacagccggaagaagctggaaaatttggtagacaagctcaaggccagcggcaataccgatttcagacctgccttgaagaaggcagtggaggtattttga

SEQ ID NO: 5486 - DNA, 312 bp, Oryza sativa
  Clone ID: PAT_MRT4530_12269C.1
ggtcggagcggcggaaacggggccgagaggggcggcaaccggcgcggaagtggggcgccgacggggggtggtggtggctcggccggcgccggtttttgtgggacgagcggggaaaatggtggaggacgtggaggggatcgtgcccacgtcgttggatgcgagctcgggtgcgggagggcgccggattttgcggcgacgtgggcggcaatggcggttggggttggccggcgagagaccaagagaactaattacatcattaaaaatgaatatatcattcatgtcggcttccggcttatttctgtcctcaactga

SEQ ID NO: 5487 - DNA, 466 bp, Oryza sativa
  Clone ID: PAT_MRT4530_1226C.1
gaggctcgataatgtaataatcatgaaaaaagggagatgctcggattgtagtactgtatcggctgcgaagaacaaaatctggacctccacggctaccacactggaaacctgaattacggatcaccacggataagtcacactcactgagcatcatgtatgcatctgatgatcgagtgtgacaacctcaatgtaacaatgcgacatattgctgatgccacacaccgtgatgcatctagaggtgactcccacttggccatgaacgacatgcccaccgcgccttggaggacagccaggaatgtctgcagctgaaggcggacgttgccctgcagatagggccccatagattcggcggtgaggagctccaccagggccatgtgcgtggtgcactctcacagaggccgtgtttaggaggcctacgaccattagcgctgcttgtctgtagaccctggcaccctgcgcagggcga

SEQ ID NO: 5488 - DNA, 643 bp, Oryza sativa
  Clone ID: PAT_MRT4530_12270C.1
ggccatggacatgattttatttgcatccgcacattacatgtaaactggataaacatagttttttgttttgcatcaaacattttaaaaaaaaatatccattggtgctcaaattccatgaaacacaaatgcacaatagctagtattagctgctacaagttctttaaaaagtcttaacaacggcctgttctcctcaatttatactaaacattttattgacaccttcaagggtgggggggagctaactgttataaccaacaatatatcatgggggttaacaaaaatgatgcgctggcaatgattatgtttgatttccacaccttcagttttaaaattaaaaatggcaattttgtcactggaggttcaaaagatttttctcccctccacaattccacattttgtcaagcaattgccaacaacgttccaaatggaaatgttccagcaaactacattaatggctatgaggcctgaaagcgcctgcggggaatcccccatgggagcgacaccaccaggggggaaatccgatctcaccacagtttccctccgccgccagtttgccgccaaagcctgcggaccaaggcggagcaacgcggccgatacaccctgatgcggatggcactccacgccttggccacgggcgcccccc

SEQ ID NO: 5489 - DNA, 168 bp, Oryza sativa
  Clone ID: PAT_MRT4530_12271C.1
atggcgtcttttttctttgggtctgaaactgacagaaagaaaacaggtgcatttttctcactcaaggagcccaaggccaccggatctagtgacctcggcctctgcgcgcaacagatccgagtagctggaggtgaagatacaagccactcctgctaccgtcctctttga

SEQ ID NO: 5490 - DNA, 1870 bp, Oryza sativa
  Clone ID: PAT_MRT4530_12272C.1
gaactagtggatcccccgggccggaggcggccgtctcctcgcccgccggcggccgccgatctccatcctgccagctgaggtggcgccggcgtcctcctgctcccgccgcattcgctcaccggtgagcatcctaatccatcccatccggcctcggcctcggcctcggatttcgcctcctcgcccgccgcttccgccgcgagcagaggtggcgcccggcgtcctcctgcttccaccgcatcgtcgctcgccggcaggcggcggcggcggcgatggcgcggtggccgtggaggtggagggtgctgctgccgctgcttctccttcactcctcccccgtcttcttcgtcttcgctcaagaaggccaagataatgatccctctactttgttcaaacgagcctcagaaatgatgaacctaaggaaatatgatggatcacttggtctgctaaatgctgtgttggaggttgacccaaatcactcagaagcttacaggcagcgtgcatctgtgcttcgtcacaagtgcaggtacaaggaagcggagggtgactatagcaaatacctggagctaaaacctgggagttcttctgtggaaaaggaattatctcaactgcttcaggctcaaaatgcattagagtctgcttatggccaatttgaatctcatgacttctcaaaagtcctggagtacatcaacaaaattgtgcttgttttttctccaaactgcttaaaggcgaagcttctcaaggctaaagcattgctagcacttgaagactactcaagtgttatctcagaaacaggatttattctgaaggaagatgaagataacctggatgccttgttgcttcgtggccgagcatattactacctcgctgatcatgatgttgcatccaggcactaccagaaaggccttcgtctagaccctgaacattcagaactgaagaaagcatattttgggttgaaaaatcttgtgaagaagactaagagtgctgaagataatgctgccaagggtaagctacgtgtgtctgctgaggactacaaggcagccctagcaatggatccagatcatacttcttacaatgtacatctttatcttgggctatgtaaggttctggttaaactcggaagaggcaaggaggctataagtagctgtacagaagcactcaacatagatggagaacttgttgatgcattaacacaggacatgggaatccgagaagcactaatgagagctgaaaagcagcttaagttaagcaaaagaaaagattggtataagatccttggcatttcaaagacggcatcagctgcagagattaagcgtgcctacaagaagttggcactgcagtggcatccagataaaaatgtagataagcgagaagaagcagaaaacatgtttcgagaaattgctgcagcttatgaggttcttggggacgaagataaacgtgtaagatacgaccgaggagaggatcttgatgagatgaatatgggaggaggaggaggtggtggtttcaatccttttgggggaggtggccagcaatacacattccattacgatggtggattccatggaggaggaggattccccgggggcggctttcctggaggctttcagttcaactttggatagaaagtttactgcctgtggagttggtgtttgtatgtttgtttgtttgttttaggaacgctgataagcttaacaacaggtattgattgtaggcagtcaagccgatcgatcgagatgagcatcgtatacaagtgttgttttaagcaccatcaaattttcctcaagttgtatccttccttgggattttctgacgcatatgatccaattgaaataaacttagccttacagtggaaaaaaaaaaaaaaaaaacactaaaa

SEQ ID NO: 5491 - DNA, 318 bp, Oryza sativa
  Clone ID: PAT_MRT4530_12273C.1
gttaagattctttgcaaattgcaatacatttttttctcaatttcagctcgaatcaaaccaatttctatacaaactctaaaaggttgtagcgaacactgggttgtctcgtggggatccttcctgtccggctgctaatatgctgagcaattatattcatgatagctgtagctgatgattgagccgttgttgatttggttttgagtggcggcgaatcacagctggaatctttcttagttattattacttgctatactatatgtttgcaattatttcggttcacaaataataagaatatggaaacaagaatcttacaatcct

SEQ ID NO: 5492 - DNA, 136 bp, Oryza sativa
  Clone ID: PAT_MRT4530_12274C.1
acaacatctgtcatctttccaggcttgagggaaaaacatggaaagaattgcggtggggacattacagctcatccaaagttctcatcggagagttcgcttgattacagtaagtcggaaaaggtgaaatgcgcttatg

SEQ ID NO: 5493 - DNA, 851 bp, Oryza sativa
  unsure (1)..(851): unsure at all n locations
  Clone ID: PAT_MRT4530_12275C.1
cccacgcgtccgcccacgcgtccgcccacgcgtccgctgtaatacggaagccagctcgtcctgccgttatcttcttgcagaaatttttggcgtctccagtgtggccacgtctgagcgatggtggcctctccacggactggactaccaacgcacgattgcccatctcgtcttgcaaagaagataggagagaggaagctgaaaatcattggcccaagagaaaaccttgctaggctagcagggcacagcaagaacaaggccagaaccaatggcggcgacagctacacttgctgccccctccttcttggcacatcagtcgatcttgagccacaagcctctgaggaagcttggtctatccctggaactgccaagaaccagatctgtcaaaattagagctgcaaagctgcctgcaggggttgaggtgccgaggaagcagccaaagctgagtgagcccttcctgggtttcaccaggactgcagagatatggaactccagggcctgcatgattggcctcattggcaccttcatcgtggagctggtgctgaacaagggcattcttcagatgattggtgtggaagtcggcaagggacttgatctccctctttaaatgctagtccatatatattttgtaccatatatactatgagatttatgcagtgaaattattagaacaaagagggattttcacttcttgtttgtactaatatcatcagagagatatatatctgacggtgttttgcctgcctattctgctctcttcgcaatttggaaatgaattgtgcttcgaccatactccctttttcgaaatagaactccgttaaataaaaaaaaaaaaaaaggncaggggtgtagtg

SEQ ID NO: 5494 - DNA, 837 bp, Oryza sativa
  Clone ID: PAT_MRT4530_12276C.1
ctcacgcgtccgccacgcgtccggaggaattacagaagaagatcctgagtgcaaaatttaacttcaatgacttcttgaagcaaacacaagctatcgcacaaatgggttcatttagtcgtataattggcatgattccaggcatgaacaaggttacccctgctcaaattcgtgaagcggagaaaaaccttaaatttatggagtccatgatcaacgtaatgacccctgaggaaagggaaagaccagagctacttgctgaatcacgcgagaggaggataagagtggccaaggaatccggaaaaaacgaacgacaggtgagccaattggttgcgcagctcttccgaatgcgtgctcaaatgcagaaaatgatgggtgctatgcaagggcaagacacccctgatatggaaggcctcatggattccatcaaggcagaagagcaggctgccgctggtactggaaagcgaaggagaaagtatggcaatctgaggcggcgagacctggatgcaatgcgcggtttccgtcgacgatgaatgttcattggctctttctgaaccaaagtgttttgatgccagttacatgtataggaagcgagaatttggatgcttttggggagctactggtttgctgtgatcaccatgtagtttctgttgtaatttttttctttttttgaaaagacgtactagtatatcggtatatgttgtatttttggccatcaatttagctcataagttgtgttccttgcccattttttgtgatctctagctgaaactcgcaaatggtggcaaagtggaacatacaaactgctctccatttcaatttataataataatttttctatat

SEQ ID NO: 5495 - DNA, 420 bp, Oryza sativa
  Clone ID: PAT_MRT4530_12277C.1
actttcccaacaccagacggagatggcgctgatggtcttcctctgattgtgagtatatcagaatgtcatccatccacggggttgttggagctagagaaggtgggtggacggatgcggaggaactcggcgagtttagagtgttggggaggtggtgccaacttgtcacgaccggaaatcacccaacaggcattcctgacgtgcgtgtattattccttgtcccaggaggcaaggcccagcacactcaaagacaacgagaaacagcggaagactagggcgacgaccacaggcgcttgacggcaggcacgagctagacaccaaagccttcatcttcaaggaactcctcatctgggcttggggaaaaaattgagcaagactgagtacaaccaccgtactcaacaagacacacccacaaatgcagaa

SEQ ID NO: 5496 - DNA, 2961 bp, Oryza sativa
  Clone ID: PAT_MRT4530_12278C.1
ggagctgtcaactttgcgctcatgatgtcacaaatggaggggggctgtccagttgattacaatactataactgatctcttccttcagagaaacatgatacgtgaggcaacagctttcctgctggatgttttaaagccaaacttgccggagcatgcttttcttcaaaccaaggttttggagatcaacttggtcacttacccaaatgttgctgatgccatccttgctaatggtatgttcagtcattatgatcgccctcgtgttgctcagctttgtgaaaaggctggcttgtacgtgcgagctctccagcatgtacaaggattgcatggagacatgctcacagtctggtgaccgcgagctgtcagaagatttgcttgtctatttcattgaacagggaaagaaagaatgctttgcttcttgtctctttatttgctatgacttgatccgtgcggatgtaatcttcaaattgttgtacaggctgccaaagaatactctgagcagctaggggttgatgcttgcataaaactgtttgagcaattcaaatcttacgagggcctttactttttcttgggagcttatttgagttccagtgaggatccagatattcatttcaaatacatagaagcagctgctaggactggacagatcaaagaagttgaacgtgtaaccagggaatccaacttttatgatgcggagaagacaaagaactttttaatggaagcgaaactgcctgatgcccgtccgctgattaatgtctgcgaccgctttggatttgttccagatttgacccactatctgtatacaaataatatgcttcggtatattgaaggctatgtacagaaagtgaaccctggaaatgctccattagttgttggacagctacttgatgatgagtgccctgaagatttcattaagggtttgattctgtctgtccgttctctccttcctgttgagccactagttgatgaatgcgagaagaggaaccgcctacggctgctgacacaatttttggagcacttagtgagcgagggtagccaagatgtccatgtgcacaatgctcttggaaaaatcatcattgacagcaacaataatcctgagcacttccttaccaccaatccattttatgactctcgcgtggtcggtaaatactgtgaaaagcgggatcctacccttgctgttgttgcttacagacgtggacagtgtgatgatgaacttattaatgtcaccaataaaaactcactgttcaagctgcaagctaggctggacaactttgatgggcctgctgttggagaagtagcagttgaagcacagctgtttgaggaggctttcgctatcttcaagaagttcaacttaaatgtgcaggctgtcaatgttctattggacaacatccgaagcatagaaagagctgaagagtttgcattccgtgttgaagaagatgctgtttggagccaggttgccaaggcccagttgcgtgaaggtttggttagtgaagcaattgagtccttcattcgtgcagatgatgcaacacatttcctcgacgtcatccgtgctgctgaggaagctaatgtatacgatgatctagttaagtacttgcttatggtaaggcagaaggcaagggaacccaaagttgatggagaactcatctttgcgtatgctaagattgatagactcagtgatattgaagagttcattctcatgccaaatgttgccaatcttcaaaatgttggtgatcgtctgtatgatgaagaactttatgaagcagcaaagatcatctatgccttcatctcaaactgggctaagctggctgttacccttgttaagctgaagcagttccaaggtgctgtggatgctgctcgcaaggctaacagtgctaaaacatggaaggaagtctgctttgcttgtgttgatgccgaggagttccggctagcacaaatatgtggtctcaatattattgtccaggttgatgatttggaggaagtaagtgaatactaccagaacagaggatgtttcaatgaacttatttccctcatggaaagtggtctaggactggagcgtgctcacatgggcatcttcacagaattaggagtcctctatgctagatatcgccctgagaagctcatggaacatatcaaacttttctccacacgtctcaacattcctaagcttatccgtgcttgtgatgaacagcagcactggaaagagcttacttacctatacatccagtatgatgaatttgacaatgctgccaccactattatgaaccattctccggatgcatgggatcatatgcaatttaaggatgttgctgttaaagttgcaaatgttgagctatactacaaggcagtgcacttctatctgcaagagcatcctgatctcatcaatgaccttctcaatgtactcgcgcttcgtttggatcatacaagagtcgtggacataatgcgcaaggctggtcagttgcatcttgtgaaaccatacatggttgcagttcagagcaacaatgtctctgctgtgaatgaatctttgaatgagctttatgttgaagaggaggattatgagagactccgtgaatcggttgatatgcatgacaactttgatcagataggtcttgcccagaagcttgagaagcatgaattgcttgagatgaggaggatcgctgcctacatttacaagaaggctggcagatggaagcaatctattgccctgtcgaagaaagacaacatgtacaaggattgcatggagacatgctcacagtctggtgaccgcgagctgtcagaagatttgcttgtctatttcattgaacagcttgcatggatgaacaacatggtggactttgcattcccctatctgttacagttcattcgggagtacacaagcaaggttgatgagctagtgaaggacaggattgaatcacagaatgaagtaagggctaaagagaaggaagaaaaagatcttgttgctcagcag

SEQ ID NO: 5497 - DNA, 333 bp, Oryza sativa
  Clone ID: PAT_MRT4530_12279C.1
cgccgagatgaacaagctgggcacatgggcgtcaccgtgggctactctgacgtgtgcctcttggtctccatgaccagcgtccgatgattctcaagacgaatcggctgcgggaccatgtccgagcacttgatcaagacaagagcagcttccacagccccttgtggaaagcagctgcgcaaatgctgatggccgtgggctatgccgtgatggcagccggtatgccaggctccctcttcggcggctccgttgtggctggcatctgctacggtgtacgcctggcaggcaccgtgccaacagcatgtgaactagccggtctttagtactactggctga

SEQ ID NO: 5498 - DNA, 1838 bp, Oryza sativa
  Clone ID: PAT_MRT4530_1227C.1
ctagtggatccccgggctgcaggcttctcacaattttgggttcgaactcctcacttcaacccgcactccggccaccgtcggctgccgccgatccctccgccgccgacgccggacgccgccagtgcccagggagttggtagcatggaagccggaggcaccgccgccggcacacgaggaggaggaggcaggggcggagctgtgccggcagatggcggcgcagctggcggcgtaccagcgcgggatggccgtcgaaagggagcgccaagcttccacctccgccaactaccgcgccgcgcttctctcctcccgctccatcgcccaggaactgagtggactcaaccttcagttgcggaatttggaagatggtcttgcagaagcattgtctgttaaggccggcaaggagtcaaagtaccaacttaccaaagagacgatttcaagcactgcggctataaatgagaagcttgagggcatggttacagatcagcggaacaagagagatcaccatgctgcagtcatatcgaatcacctcgaggctgttgaagctcttgaagcaaagtttattgaggatgaaacacggatgaagaaaatagaagaagctgtaatctggtacagcaagttccttggtttccaggttgttggaggagaaggtgtaaagttcatcttcaacaaaatagacttgcaaagccctgataaggagtactcggttaccttaaagcttgccaaagatcgatataacttacttcaatgtgatccaagtataaaagattctgaagagttgatgaaggatttgaacctcactaacgatctgttcaagtttgtaagaatcgtcagagaaaggttccaggctgaggctgctactgtgaatggaggtcttctcatgagttcagttgtttgtccagatgcttcctctataccagtttcacctccaatgttaatgccacttgactctagaactgaaaatgttcttgataagagtctttctcagagtaagaacaaggggcggaatctaccttctaaaagaggagctgctgccctatcagcagcatctcctggttctgcggctcttgtgaactttgcattcaggcgattcaaaacttgggaatcaggaggcatctgcaaaatcgccaccaaccaaaccagctccatccatagacttgttgactgctccctcgcgatcccatctccgccgccgccgccgccgccgccgagcgagatgaggaagacgaagccgtcgaagcagtcgcgcgcgcaggcgcagcagaacggcggcgccggacactccaagctcgccaggtacttcgacccggaggcctcctgggacaaggatcaactgctggacgccgtgcactggatccggcaggtgctcggcctcgcctgcggcctgctctggggagccgtccccctcgtcggcgccatctggatcgcactgtttgtgactatttctactgggctcgtttactggtactatgcatacctgttgaagattgatgaggaagactttggaggccatggagcactacttcaggagggaatgtttgcctctttcactcttttcctgctttcatggacactcatatacagtttggttcacttttgagaagctcctctgatgacatgttgcccatggatggaagtttgtgcaccatgtttggtcaggaaggaatcaccagaacagtgtagattaagggggccatttagagcaaactttgtattatgaaaaccgttaaaggcagtaatgttgtttcctttcagagtcccaatgtaattttgatagtatggttttaactcaatgaggtagaacattgcttgtctgaaaaacgtgcttaccgagttagacc

SEQ ID NO: 5499 - DNA, 599 bp, Oryza sativa
  Clone ID: PAT_MRT4530_12280C.1
tttgtttttgctgtacttctttttcacactgttttgcagttgagtagttatctttcatgcatgctttggtgtagattgagatgtccaacttgatgtgatgatctggaaaagaagaagcaatctgaaggttgtccaacttaaggtttgatgccttagatcaaatggcccagcatctgtacctaacctagatgatatgacctaaaacctgcaacgagctgtctgaatgtctgatcgagaagcaatctgaagcctcttcttttttcagatactataatgccattgacctgactcttcaggttgtgctatctccaggcaccatgtcctctcaaggcccatttagaaaggccaatccacacggtccaagaaatggcccattaagggtcttgatgcagaggatgaagatgaacagtgatcgatatgctcaaatgcataagggagcccgtattgattctctgattaaaaaaatatccaacgacttggatttaggccatgttatatttactggattattgaaaaagattatttactgtattcttaaaaaatatgttttttttcctcaaaagactgtcttctattgtactgtttagagcacttgtttt

SEQ ID NO: 5500 - DNA, 465 bp, Oryza sativa
  Clone ID: PAT_MRT4530_12281C.1
cacaaacaaaagaaagttttttttttccaacaacaatagaaaggaaaaacatggacacaaagggggggcggccttctaagaacaaccaatatgtggcacgcgcctccccgacgtagaccttatatcatagcgccaaaaaaaagtaaaccaccgcgccggccataacaacgtccattgggaaaaaaaccgcgactcccaccaacaaactcaacgagaacatcatcatccttacaaaggaggtcatagtgaagagggagacgaccactgggcgcactaaacaacatggagagcatacaaggacgcaggaggggccccctgaagcgccggatcaacagcggcggtagaggcggacgagcccaccaaggacccctcagtaatcgtcgccgtcatagagcacgctgaggacactaacgttcgttcgttggtcagaaggcacggcttctcccccaaagaagagaacaagcg

SEQ ID NO: 5501 - DNA, 704 bp, Oryza sativa
  Clone ID: PAT_MRT4530_12282C.1
aaaatgaaaataacgatgaggcacccagatcgaagattccccctccaccatttgtcggtaatttactccaaaatcagtctgctggtaggggtttgaccaagggacaagaagaatatctaaggaagtccatcctatcaggagttcagcaccattgccccctatgttatctttccactcacattgctgtaagcaatcggcggcgagcagagctgcaaatccaagacacaccttaaaaccccaatcccaatctcaaaaaaaaaaaatcatcacctggccactgaaatcaccagcgacagtccccaaacaatcgctagtcaaaaaagagggaagagcagaactaccactggcacggcgaggcgaggaagggggttccggggaacgggaaggaaaggtttactcacgggagatggccttgagcacggcgtcctgcggcggatcctcctggcctccgggaccggcggggttggcgcagcaccggaccaataaggaggcagaggcgcggcggcgggcggcgtcgagccgcgcgagcgaggcggcgcgcgggcgggggagacgggagggcgccgggagcgggaggagcgcgagggccctgcacgccatcatcttgtagccggccgccgcgaccaccgctgacggacggcgagtcgcgctctgcgttggccttgcggtggatagaagagagatatttttctccggacgcgtgg

SEQ ID NO: 5502 - DNA, 522 bp, Oryza sativa
  Clone ID: PAT_MRT4530_12283C.1
gcggttgctgccaaggcaaggctgtgtcgggcaggacacggtagcatggacaggggcggcggagaccatccgacaggcggtcaatggggagaagggcagccgactgcaatggacacggtagcatggacaggggcggcggagaccatccgacaggcggtcaatggggagaagggcagccgactgcaatggtggatggatggatttgtggtgggaggagcgggcgagctcaccggcctcttcgccctcctcattggacccgtctcctccctctccgttgctcgtcactggccttcccgcccccctcgttgcccccctggacgacggctttcctttgtgcctgcggcctccccttctcctgtgccacccgtcgttgtgttgccggccgccgatgcccttctcctctcccacctcgacctgccgacctccttcccacttgccggcgagcctgcctagagaagagtgagagagagagagagagaggaggatgaaggggagaagaagggaaagagagggtgatgacat

SEQ ID NO: 5503 - DNA, 216 bp, Oryza sativa
  Clone ID: PAT_MRT4530_12284C.1
tttttttttttttaattttaaaacttacttatacattttttggggtttttttttattttttttttttcattttttatttttatacgacccccagaacaaacccggaaataccacacccgaaccatgaagcatcaaagctttacttatagggagtcattttatacattggcctaaaaatcgtaaatgctgttccatggttaaaaaatatatccactc

SEQ ID NO: 5504 - DNA, 1743 bp, Oryza sativa
  Clone ID: PAT_MRT4530_12285C.1
atggcgccggcgccatcgtcgtcgctggcaactgccggtcacggcaagaccaagagcgggcgctcgtcctcatcggccgtgcggccggcgctgctggcgatcgccgtgagcgtgatggttgtgcttctcatggccgtcctcttcggcgcacggtggacgccctccggcggccatggcggcggcgcagacaccagctgggtctcggccggagctcgcgtcgtcttaaacgccgtgtccagccaacaaggcgccgatcccgtcgtgaaggtggcgcagccgcacgaccggctactaggcggcctcctctcgccggacttcaacgacacctcctgcctcagccgctaccgcgcctcgctctaccgccggcgatccctccacgtcctctcgtcgcacctcgtctccgccctccgccgctacgagtccctccaccgcctctgcggccccggcacgtccgcctacgagcgcgccgtcgcccgcctgcggtcgccgtcgtcgtcgaacactacctccgacgctccctccgagtgcaggtacctcgtgtggacgcctcacgcggggctcggcaaccgcatgctctcgatcacgtccgccttcctctacgcgctcctcaccggccgcgtcctcctcttccaccgctccggcgacgatatgaaggacctcttctgcgagccgttccccggcgcgacgtgggtcctcccggagaaggacttccccatccgcggcatggagcgcttcggcatacgcacccgcgagagcctcggcaacgcgctgggccgaggcgagggcggccgtgacccgccgccgccgtggatgtacgtgcacctgcggcacgactacacgcgcccgggcgccagcgaccggctcttcttctgcgacgacgggcaggacgcgctgcggcgcgtcggctgggtggtgctcctctccgacaactacttcgtcccgggcctcttcctgatcccgcggtacgagcgcgagctgtcgcggatgttcccgcgccgcgacgccgtgttccaccacctcggccgctacctgttccacccgagcaacacggtgtgggggatggtgatgcggtaccacggctcgtacctggccaaggcggaggagcgcgtcggcgtccaggtgcgcaccttctcctgggcgcccatctccaccgacgagctctacggccagatcgtctcgtgcgcgcaaggcgagaacatcctgccccgcgtgcgcgagtccagctccggctccgacaacgccaccgccatccctggctccgggcggcagcagcagcagcggccggcgaggcgcaaggcggtgctcgtggtgtcgctgcacggcgagtactacgagaggatcagggacatgtactacgagcacggcgcggcgggcggggacgcggtgagcgtattccagccgacgcacctgggcgggcagcggtcggaggagcggatgcacaaccagaaggcgctcgccgagatgatgctgctcagcttctccgacgtggcgctcacgtcggccgcctcgacgttcgggtacgtcagccacgggctggccgggctgaggccgtgggtgctcatggtccccgtccgcaagaaggcgcccaacccgccgtgccggctagccgccaccgtcgagccgtgcttccacacaccgccgcactacgactgccaggcgaggaccaaaggtgacaacggcaagacggtccggcacgtccggcactgcgaggacctcaaggatggtgttcaattggtggactga

SEQ ID NO: 5505 - DNA, 312 bp, Oryza sativa
  Clone ID: PAT_MRT4530_12286C.1
aaacacgcaaaaccggggatttttttaaattttccccacaaaaccggggattttcctctttgggactggggttggcttacagggatccccccgtccctgggggtttaagaaaggggctttaagccttttacataatttaaaccatgggggtggccccctcattagaccttgatttttactccccgggggcaaaaagcgggggattgaagggttaggaaggccccattccagttttgagggggacctttttcggggggggtttggggaaataaaccctttcaacctttggcccaagctgcacctccttgggtt

SEQ ID NO: 5506 - DNA, 609 bp, Oryza sativa
  Clone ID: PAT_MRT4530_12287C.1
atggcgggcggggagaaggtggactacgtgttcaaggtggtgctgatcggggactccgccgtcggcaagtcccagatcctcgcccgcttcgcccgcaacgagttctccatcgactccaaggccaccatcggcgtcgagttccagacccgcaccctcctcatcgaccacaagtatagagctgtcacgagtgcatactacagaggagcattgggagctctcctagtctacgatatcaccaagcgccagagctttgatcacatccctcgctggctggaggagctccgtggccatgcggacaagaacatagtcatcatgctggttggcaacaagagcgatcttgaagacgagcgggccgtgagcaccgaggatgccaaggagtttgctgagaaggagaacctcttcttcctggagacctccgctctgcaggccaccaacgtcgagaacgccttccagaccgtcctgtcagagatattcaaaattcacagcaagaagaacatggcagcggacccaaaagcaaacggcgctgccccatcgctagcagggaagaaggtcgtcgtcccgggcccagcgcaggagatccccaagagcaagtgctgcagttccatgtga

SEQ ID NO: 5507 - DNA, 435 bp, Oryza sativa
  Clone ID: PAT_MRT4530_12288C.1
ccggccgggaaaccctaccagcctctctctcccgctcacctacctacggcgacgcacacgcgtatctatagacatggtatgctgaatctatgacgtgttctacctatggatgaggataatagtccaactagtatgaggctcgcgcagatgccgtgcgctcgctcctacgtaccggcaggattcgggcatcgtacgtctcacccactacaaccatttgaaccacttccgacagcgaggttacaagcccaggatacagtatactttgatgagaagaatgaacaattccagtgcacaggtacatttggcgtccgacgtgacattgagtctcaaggccttctggtacctcatatacagaaatactcctgggatggactacatcatccaatggtagaggatctatgggattaactttccccggatgcccagcagacctac

SEQ ID NO: 5508 - DNA, 447 bp, Oryza sativa
  Clone ID: PAT_MRT4530_12289C.1
atgattttcccgctaggcgccacgacggaacgggcgctacaccagctcggccgccgacggccggctgccgcgcccgcctgcccggccgccgccgctaccgcccggcttgccgccgcgcccgcctgcccgcccggccgccgccgcggctcccgccgggcgccgccgctaccgcccggcttgccggcgctcccgcctgcccggccaccgccgccgttcgcgccgggcgccgctgctcctgcctggcgccgccgctaccgcccggccggccgccgctccagatcgaggggaaggggaggaacggcagggaaaatagagaggaaggggatgaaggggagaggaagagagggtgaaggagatattaatgagaggggaggagatcgagaggagatggcgcgcggctctcggggtagtctttactcccgttggtataaacaaccgggacactaa

SEQ ID NO: 5509 - DNA, 128 bp, Oryza sativa
  Clone ID: PAT_MRT4530_1228C.1
atgtctcaactgacgtttgtgacagatcctttccggtcaaaggaaaaacacagcggcggcgcaaaaccgcgggcggcatccggaagtggccaaaccgcggcgaaagcggcgccctgtgcgtgcgccaa

SEQ ID NO: 5510 - DNA, 471 bp, Oryza sativa
  Clone ID: PAT_MRT4530_12290C.1
gcacgagggatgcttcgatggagcagaacatttgaagagcgaaaacgacatgcagcatgagagcaagtggcacatgtgttttgtcctgtcggtcgaatcaatcagggtgcaagcatcacataggtgaaatggcggtgcagctctttcactatttgatcaatcatgcttagatagaaacggtaaaaggtcaatcaggatggaggagcagaatgaacgttcaggaaagtaacgggcaagctgtgtggccacaagatggggaatctttggtattttggcagtaattggtgcttcacaagggaaacagaatcctcgcaagaagccctgctcttcttgaatcttctcaatgatctgatgagcggcggttgcaatctcatccacagacgtaagctggcaatcatcctccacctgccattgacgacgagatcacttgagatgacgatccattggcaggtcaaacaatggccctttttt

SEQ ID NO: 5511 - DNA, 386 bp, Oryza sativa
  Clone ID: PAT_MRT4530_12291C.1
gttcggtcattaattaatgttttaaatgatgtaaaagctatgttttaccgcgttaactatgttgtgtgaccagcataacaatttaatagctcgatagagatcattgcatatattagtatttgctgtacttcaccttcctttatagcaatagtttgggagaactcagttgcagagttagattcgcttggttggcccggacgcccggtaccttcttgaagcgacttgaccactggggatttgctgccaaaggaacatgccgtggccctagccctggccgaacaagtttcatggttcataattttcctgttaggactgtaatttgaaaccgtgatgtatgacaactgctctgaacatgcttcatactaccaaaaatttcggtctcatgg

SEQ ID NO: 5512 - DNA, 483 bp, Oryza sativa
  Clone ID: PAT_MRT4530_12292C.1
atgggttgtcggcatatcagctggcgcggacgtggacggaggcagaatgagacagtgatgaagtttgggcgacgcggaggagacactcgaggccggcgacgtcgcgtcgatctggaggcggggattgacgtcggcacggtggtggagcgtcggcgctcgatcagtgcgaagccacgcggcgacgcgatggcgtcggcggcgtcacgagtcgtggtcagagtgagggcaacggcgacgaggaagaagatgatgccggctcgggttgacgtcggggatggagctccgaggcttgccgagctcgatgaaggcgtggctgagggagaggaggagacgacgaagccggcggtggcttcgccgggacttggcgacgccaagcggcggctggagcgcacgccgaaacgacacgacggcgatggagcgagcgtggtgctcgagcggcactgggaatgggagaaggaggtctcgggggtttcctttatatag

SEQ ID NO: 5513 - DNA, 997 bp, Oryza sativa
  Clone ID: PAT_MRT4530_12293C.1
ctacaaccggtcatacccctctctctccccgcctccccggtcgctctctttctctctcccgcgtgcacgctcaggcaggcggctctgcaggcgaaggtggaccagccggtcgacggcggaggcggagctcgcccgggcggcaggcggctgaggagaagctcgccggggcaaccggtggttgaggcagtggcggccgacgatggaggcagaggccgaccaggcgccggcactgtcccgctcgcgtgactgcctcctcgcggaccactcgcgcatcagctcgccgccgcggctcccgacggtggggacgtggttgcgggagtcacagaagcagacaaggacgaggccgtcaccgctcgtggcgtggatgtcggtggagaccgtgccgagtatctcggactcggtgtcgtggcaggggcgggggtcgacgaagctggcggcgaaggaccgccgccttggccccatcgccgtcaccctcgtcccgcaccggcctgcagcccgagctccgcgttcgcctccgccaccagctgcccgggcgaggtccgcctccgccgctggctgccgggttcgtctccgccaccagtcgcccaagcgaggcccgcatccgccgccggctgccaggttcgcctccgccaccatccgcccgtgcgaggcccgcctccgccgctggctacccaggcgaggtccacctccgccgcttgctgccgggttcgtctccgccgaccgctgcccggacgaggcccgcctccgccgccggctgctcggtatgcctccaccacccactgcacgggcgaggtccgcctccaccgccggctgcctgccgcctccgctgacggcttccttgtccgagcgcatgcgcaagagagagccggacggaagggattgggttgaggaattagtccgacaagttgcaggcgcgcgtgctgtaactggctggggccgggcgccggtgtccacgtgccgccgcgccggcgagccggaggcaggggtccccggctag

SEQ ID NO: 5514 - DNA, 1224 bp, Oryza sativa
  Clone ID: PAT_MRT4530_12294C.1
atggcggtggcggaggtggagacggctgcactcggtgacggcggcagcggcggcggcggcgggagaagaagagggagaggcggcggcggcaggagtggaggcggcggcgcgagggggcggaggcggcgctcggcgacgtggacagggcgagggggtggacagggcgagggggagggggaggcggaggcggcgcgcgagggggcggaggcggcgctcggcgacgtggacggggcgagggggaggggggcggaggcggcggcgcgaggccgcaaaccggtgcggtctgcctccaccatcatagccggcacggagagcggccagcaccttctcaagatcgacggctactcccacaccaaggacaagctcccgacccccggcagcaacgtcaagtcccgatctttccgcgtcggaggccatagttggcacatcagctactatcccagcggcaacgactcggacaaagctaactgcatctccatcttcctcaacctcgacgacgatgtagacgtgaaagctcagttcaacgggtgggggtttgtgagtttcatccggagggacgtgctggagaaatcggagtatctccgggacgactgcctcacgatcgtgtgcgacctcaccgtcttcatggagctgcagacggaggacatcgacgtagacaccgcaacgccgccgccgccgccgccgcctacggtggtggtcccaccgtcggacctgcaccggcacctcggaggcctcctcgccaccggggagggcgccgacgtgacgttcgaggtcagcgggaagacgttcgcggcacacaggctggtgctcgcggcccggtctccggtgttccgtgcagagctttttgggccaagcaaggagctgggtgccacgaccggcggcgcggtggatcacaccgccatacgcatcgacgacatggaggcgcgggacttcgaggctctgctccgctacatgtacaccgactcgctgccggagccagagacgacgaaaggaggaggggacgcggcggcgatgctcccggacctggtcgcggcggcgagcaggtacaagatggagaggctgaggctggtgtgcgagcacaaactgtgcgagtacgtgaacgggagaacggttgtttccatgcttgcattcgcccgggagcaccattgcgatggcctcaaggagaagtgcttgcgtttcctcgacgatccagtgaaagtgagagagatcgtgaaggctcgataa

SEQ ID NO: 5515 - DNA, 108 bp, Oryza sativa
  Clone ID: PAT_MRT4530_12295C.1
gcccgcaacaccctcacaagcgcgatctgcccttgccgcatgtcttactgggatcgcgtcgccctcgcgcacgatttaaaaattgaagattgttttgtcaaaactatg

SEQ ID NO: 5516 - DNA, 628 bp, Oryza sativa
  Clone ID: PAT_MRT4530_12296C.1
gcaaaaaaacaaacaaacaaaaattaaccacactgtggtttgtctgattatgatacactaggtagatgacctgtgttctccacatatggctcaaggctctcagaataccatggttggcaaactacatcatactcagtggtgaaagtctaaaagcttttcctctaagatcaggaacaagacaaagaagcccactctcactgcttttattgagcatggtatttgaattcctagccatagcaatcaaacaagaataagaaataaaaggcaacaaaattggaaaggaagaactcagagttattaaaaatgacatgattttatttacagaaaacccagatggtatcatcaaaaaattgttagataaaagaattcagatcgggagcttgggcttatcagacacaacctagaatagatttacaaggagatcctgctgaatagcattgagaactatgtctagatactcatgttgcaacagaagaaagggtgggggaaaaaactgtaactgcaatgtatacatctaaggataacctgacccccttgctgtacagtgggaaaataaaaaaaaaaaaaaaaagaattcggtaaagtttcagggtacaaaaacataaagtataaaaatatgtttctttct

SEQ ID NO: 5517 - DNA, 833 bp, Oryza sativa
  Clone ID: PAT_MRT4530_12297C.1
tttgtttttttttttttttttttgtttttagctgcaaatttcatatgtcgggtaaatatatggatcaagtcatatatatacaaatagttgatccgtgatatactgtactacattacaattccaggacattacaaagatttcagattcgcattgcggcggcatgatcatgcccccgccacggccgggaggaaccagggatgtcaagggctcaaggctggcaagccttggtcgcgatggcagaagcatactcagagatggctggatccggcgattgcctcaggtgcacgatgaccgggagcagctccgacgatcggaggaagagccggcaggcggcgtggtcgcacatcttgcgcagcgcgaagagcacgatcttcagcggagattctgttagcacgtctttcctgctggggctcagagccacggtggagtagctactgaccatcttcagcagggcctgaattgcgccctgggagacaatatcttcacagagtatgttagagttcctcactaggttactcaacgctcctgcagcattgcccttggttttatcctcctcaggtgcaagaagtagcttggtgagttgaggaatggaccgtctaagttcttcatatagcatgtcgttgtgataagcagcatttcctacagcaaagcatgcaaacttccgagtgcgcttctccgggtcagagcatctgtcaactaccagctcaattaccttatttgttgcaagtgaactgtagaagtaggaactgtggcggcacatgttgccaattgcactgcaagcttttgctcttaaatcagggtcctcatttgatagaaagttctttaaataaccc

SEQ ID NO: 5518 - DNA, 2899 bp, Oryza sativa
  Clone ID: PAT_MRT4530_12298C.1
ctcttccccattttggccgaccgcgtgttgggatgttgtccatgcgatatcatgtggttactctgtttcaggcttgtgtagagaagaaaaggtggaattgtggaaggtaatcgcggggagttttggttcattttttgaagatttctctaattgacgtatgcaattgcgtcttcacgaaacgcaagtgacccctgagagcccctgatctttgtaaagatgcacaccagcttactgggggcgaggcacaacaaatggagaagtctgaaaaagagtatagaagggggggtgataggagttgacaacctgatagagatggaaaaatgaagaagtgatggctgttgtttcgcaacgtattcgtttcatctatccaataattgtagtggtgtgtcaatgtgtgatacttttagaatttttctcggctccgtcttgaccagcgccgtgtcgtgttagcggtgcagacgtcgtcgaagttcggtataaccttgagtaattaaagcgtgtcaatggtttcaggtgtggagagtttgatgcttgtattgagaaggcattgacttctcgaggtactcctgtaaagagaagagaaaaatatgctcgcagagaagatgctattcttcatgctcttgaattggagagaaaacagcttgcatcaaaataccagaatcaaggcttcaggagtgatgacatctctagtgtcccttttgctgatatgaggagagagtttgataactcttctacagaatattactcaaggaacaatacacaaaaacctcagtttcctttaggaaactcagcaagtcaacagtgcaaagatctcagcagtactcgttacaaaagcaaaaagagtaaaaaaagaaaaggagatagctcaaatctccctgggaagacaaaagggcttgagcagaactttccgtatgctggttcaaaaagagacttttcagaatctcttgctttggaaggtgcagaaaatactctcagtaatcggaacaatggatcttctcatttaggacatatgcaagcaggaccaaatctaggaagtgatggaaaaaatacacccctcacaaagaaaatatcagaggaaagtgtttttgaagagtctcttgtcaaaaaacatgacagatgtcgaccacttgctcaagttgtgcagagtagtttgaaattgcctcattcctttcagcgtgatgatgattctggccctgttttaattgaagaagggaatgaccctctgactactatatatcaggcccaacagggctggtcgacatacatgcctaatgattctggagaaactaataaccatggagatatacctcctacacaaatcacttcaatgggagcacactttgagaccgaaggctacctcaagcagcctgattcgttttctgcagagcaaaaaatttcggagtttgctgagaagcaaagatctgattcttgtgagagggaatgttcagaaactgagacagaagatgatgctgaacttttgcaaagtagaatatttatgaattcaaaatcacctggacaaatttacatgtattacttttcaatgctcattctatacaaaggatatgctaagaggcaatccccggggtcagatgcatgcgatccttattccattcaggcttctaaaaagtcaaggcatgtggatggtgatgttgcggatgatatggtggccttctctactggtattcctcaacaaaatgtcttaaaggaggaggatggttcatctgagctaggtgtatcccagtggcatatgaaaggtaaacgcaaccaacgtagtgcgttgaagaggcctatgggtaagacagatggaaatatatcgttagacagatctaatagttcactgaaagggtcattgtatagggtcaacgaaagtaatccgaatatggagagtactggtgcatccagccatcagtattttggtcgaagtttttatcagacccaagagttggattatgattacgataatgcagatctaactaataaagctaggggccatgcagaagttagatattatggtaaagactaccccccatctttgacacctacaagggatcttgaacagagttacacttctttcaacaacactgaaacttattgcaagacttctccaccaaataagaatggagatcagatgtcttctcttggtaggaaagcatgcttggaaggagcttcattgtatcgacaaaattattcctcccaacttggttacatgggcccaatgctatttaatgttgacctgaatgtacaggctggctatcaaggggagcatgttccattggtttctttgatgagcagactgaatggcaaagcaatagttgggcatcctatccaaattgaaatacttgaagatggttcaactgaccaccttgttttggccagtgatgattttctggaacatagcacctctgcatcacctgcttggcgtacaggcagaaggactgctatgccaagaattccacgttctaattcaacacgggtgaccttggatgatggtgacgatgagggcctgtgggatatgaatccgccctttagtagatcctccacccccttcaatcagcagtttaggctttcaaaacgaagcaacaccagttttcggagcccattgtcacatagatctcaaaagaagccctctaattccaaaaaaggaagctcatcaagtcagaaagtcagagccctttcttccatttcaattggaaaaaggcatcacagagaaggtcgtcaagcaaagctgcacaatattttgggtgatttgatcaaaccagagggagcaattccacttgtcacgtgtgttcctgcaaaggtcgtcttcagtaggataatggaagctgttgggaggccatctctttctatcgctcaccgtgccagagtggctagtcctgccatacgggatgcacagcgttag

SEQ ID NO: 5519 - DNA, 1092 bp, Oryza sativa
  Clone ID: PAT_MRT4530_12299C.1
atgatgtacaagcatgtcggagacgacgcacgcgggtcctccgcgggcgtagtgtgctgcgtggatgtcgtcgacgacgacgtcgacgcgctgctgtgcggcgaggacgccggcgagctggagcgcgagggcgagccggcgcaggggtcgtcgccgtcgtcgtcattgtcgtgcgccgccgcggccgccgcagccgctgacgacgacgacgaagacgaagacgaacacggcgtccatggcgaggtggtgcaggtgactccaggcggggaggagcactgctacgactacgactacgacgtcgacgtgcccgtcggtgccgagctcgtcatgcctgcttgctcgccgccgaggacagccgtccaccggcccggctggtcggagtccgtctcctggatcctcaaggtccggtcagtccacggcttccagccggcgacggcgtacctcgccgtgagctacatggataggttcatgtcgtctcgcagcttgccggatcatggttgggcatcccaattgctatgtgtggcttgcttgtctctggctgccaagatggaggagtcctctgccccacccctccttgaccttcagattgaaggaacaagattcatttttgaacctcggacgatccagaggatggagctcatcgtcctcgtggagttggattggaggctccggtcagtgacgcctttcgcctttgttgatttcttcgcttgtaaggttggctcctctggaagaagctcaaggatcttggcattgcgtgcttgccaaataattctcagtgcaattcatgagctcgagttcctgaaccactgcgcctcatcaatggcggcagcggcggtgctattcgcagtaaatgagtcgcctgcagccatgtcgcacaggagcagcgtcagctctgaatcagctgcctcgtggtgcattggcctgactgaggagaggatcagcagttgctatcagctgctgcagcgagctctgaatgctactgcgaggaagaggaagcgacatccgatgatacttgcagcttgttcatcagtaacaagttcatcttcccggagcaaaaggcgcaaacttgatggccattttggagaagattga

SEQ ID NO: 5520 - DNA, 1865 bp, Oryza sativa
  Clone ID: PAT_MRT4530_1229C.1
atggagggtggtaggctaggaggagcggcggcttcagcatcggcggcggcggcggcggacgcgcgcggcgggatgtcgggcttcgcggctcctcagcacgccatagtgaagcatggaccagggagtgtgacacattgtggtggaaaatggacttttgctgaactatgccagtctgaacaaatttgggttcttgactgctactgcatgcaatgggcatgcaagtttgcgaccaatgcaactgaatgccatacaaatttgaacaacgtgcaacctactcaagttactgattttggggcacttgcgcagtctgctggattccgaatagaagatctcgctaatctcagtacaaatggtttgttcaatctgaagtcaaatgctcataccattatcaatgaccccctccaatttgagaattatgtaaagtctatttctccgtctaatattactacacccccggccgggtcagtagttgaccctcagacactggtcccacaaaagggagcacaactgaattgggtaactataaggactggtaacgttgagaattggggggagtcgactatggctgatacaagtccaaggactgatacatcaacagatccagacactgatgagaggaatcagatgtttgaacaaggacagttagctgctcccactgcttctgattctagtgacaggtcaaaggacaaactagatcataagacacttcgccgccttgcccaaaatcgtgaagctgctaggaaaagccgtttaagaaagaaggcatatatccaaaaccttgagagtagcagattgaaacttactcagatagagcaagagcttcagcgggctcgtcaacagggcatttttatatcaacatcgagtgatcagtcccactcagcgagtggaaatggagctttggcatttgacatggagtatgcacggtggttggaggagcataacaaacatataaatgagttgagggctgcagttaatgcacacgctggtgataatgatctcaaaagtacagttgatagtattatggcacactacaatgaaattttcaagctcaagggtgtggcagccaaagcagacgtttttcatgtgctgtcgggaatgtggaaaacccctgctgagaggtgcttcatgtggctaggtggcttccgatcatctgagcttcttaagttactggcagggcaattagagcctcttacagagcagcagcttgctggcatagccaacctgcaacaatcctcccaacaggctgaagatgctctttctcaagggatggaagcactacaacagtcgcttgcagagaccctggcatcaggatctctcggccctgcaggatcttctggtaatgttgcaaactacatgggacaaatggcaatggctatggggaaacttggtaccctagaaaacttcctacggcaggctgataatctgcggcttcagactcttcagcaaatgcagcgcatattaaccactcgccagtcagcacgagctctacttgcaataagtgactacttctcccggcttcgtgccctgagttctctttggctcgcccgtccaagggaataaataaattgaattgattcgtaagtaggatattgttaggtaatgtatctctagtgttatatcagataggaattgaggtattccctacttcctagattcttcacaatgttcatgtattggtgacagactcggatcactatctttccatgtatgtcttcaagtgaatgttcaatgcatattgtagtctgtatatgacatcatatgatgagttgttgggcaaatttgtaacatttttgagaaaagtgggggatgtaaatacttgcagaataataaaaaagcataaaaaaaaattatattggagcctgcag

SEQ ID NO: 5521 - DNA, 343 bp, Oryza sativa
  Clone ID: PAT_MRT4530_122C.1
atctatatctatattctttttggttagagagagagagaggaggaagagggggatataggaaaaagacattgtcatcggcatcaatcatcatcatcatcctcatcattttatccctagaaaacggcaaattttccaatgctccttgttcactttgccacacgatgacttctcccgctcactacaaaagctagacacgcctcgacaaaaacctagctagcaaacacaagggtggaacctggacctagaacaaaaatgggaaatcaagctcacttgtgcggtactaactcaggggccaaagccacgccaaagttgttacctatttcggtcatccccaacaaaacta

SEQ ID NO: 5522 - DNA, 522 bp, Oryza sativa
  Clone ID: PAT_MRT4530_12300C.1
gttatgtctactagagctggaccttgcttcacggtgctgttacatgctccaaggagcgtcatcctgcaagacccaaaaatgcgaatgtagagcttcaggttcacattgcgggggtgattgtggatgtattccctctaagcgtataatggggtggatgtgaacagaggaaaagatgggttgtggccggggtgcgggatgctgctgcagatccagccggccaccggcgggaaccgcctgcgcttctactgccccacctgcccctacgtctgccccgtcaaaaacaagatcgtgaagaaggcgagactagtgaagaaggaggtggagcccatcttcagcgacagcgacgccatgaagaatgcccctaagaccaccactacatgcccaaggtgccaaaatggagatgcatactacaggcagatgcagattcgatcagctgatgagccaatgtctacattttacaagtgttgcagagaagaatgccaatttgatttgagggaggactgactttagtaatattttttg

SEQ ID NO: 5523 - DNA, 908 bp, Oryza sativa
  Clone ID: PAT_MRT4530_12301C.1
ccggccgggcttccgccgccgccgtcgccgtcgcctgctccagcgcgctcgccgccggccgccctactcccgctccaggcccgtcaccgccgtcgccgatccaacatgggtaagacacgtggtatgggagctgggcgcaagctcaagacccacaggagaaaccagaggtgggccgacaaagcatacaagaagagccatcttggcaatgaatggaagaaaccctttgctggttcatctcatgcaaagggcattgtccttgaaaagattggcattgaagctaagcagccaaactctgctatccgtaagtgtgctcgtgttcagttggtgaagaatgggaagaagatagctgcctttgtgccgaacgatggttgcttgaacttcatcgaggaaaatgacgaggtgctcatcgctgggtttggtcgtaagggacatgctgtgggagacattcccggtgtccgtttcaaggtggtgaaggtctccggcgtctctctcctcgccctcttcaaggagaagaaggagaagccaagatcttaaatcctattcccctccattgcaagcagctggagcggcatggcggctataagaagtacaattagctacattcagctaatgaattctggggccttccttttctgcttctggcagctaatctctctctgaaattcagactcgatgttgtggtgaacatgtcaatcgtatttttaccccccctaatcacctgaattcaaattccatatagaagtagcagcggatttggtttccttcagcgcgattttaaaattcaaacctggaatgtcgtggagtgaagtagtgtcatcatatgcttgtgaatctctgcaagttgcaagcagcctattttgttgttttcttgtcgcgcggtttgaatcttgaatgaagtcatcattttg

SEQ ID NO: 5524 - DNA, 1200 bp, Oryza sativa
  Clone ID: PAT_MRT4530_12302C.1
atgttcgccgccatctgccgccgccggctcgccgccctattcccccaaatccgcggtggcggcggcggcgcatatcatgtccagtccaacccccaggccgccctcctcttccacagctactcctcaaccgccgtcaccggcggctccgaccccgagccatgccccgacaccgtctcttacctggtctcctgcggcctccccccggccgttgcccgtcacacggccgccaacacccgcggcctccggatccgatccaccgagaaggcggacgccgtccgcaccctcctccgcagctacggcttctccgacgcggacgtcgcccggattgcccgcagcgccccgctgctcctcaccgtcgatcccgaccgcatcatccgccccaagctcgagttcttcgccacgatggggttccagcccagcaagctgtccaccgcgccgctcctcctcgcgcgcagcctcgagaagcacctcgtccccaccatccagttcctccgcagcatcatcggcagcgacgacgggatccgccgcgggttctcccgcatccctcgcgcactcctggtcagcctggacaactgcatgcgccccgcggtggaagccctccacaggcacggcctcaccggccgcgaggacgtgtccaaagtcctcgtcctccagatgggcgtgctcatgctgtcgccggtccgcatcggcgaaatcttcgaggatctcaaggctatgggtatgtccatcacggacggccgctttgccaactcgttccgcgcgatgtgcagcatgaggagggcgacctggctgcggaaggtggcgctgtaccggagctttggcttgtccgagagtgaggtgttcgaggccttcaagaagcagcccacggcactgcttggcgctgacgagaccataaaaaagaatgcgtcgttcttccgcgacgcgctaaagcttgaaatgcgcgaggtaatggtgcatcctgttgttatggcatatagctttgagaagaccatcctgccaaggtgtgccgtgttgagcgtgttgatgagagaggggaagattaatccagatatccagttgcttcatgcattgcttggcagtgccaagacattctcagggaggtatgtagataggtttgctgctgatgtgccagacgttgttgaagcatatgagggtaagatcaaattcaaaggattcaagggtcagggtcagggtgtttaa

SEQ ID NO: 5525 - DNA, 313 bp, Oryza sativa
  Clone ID: PAT_MRT4530_12303C.1
atagagatccaatatgagcttaattcggatagggatcctaataggagtcctacgggccttggaggcccgagtgatggatcctatatattcgtgaggggtgtgaccggcggaggcattgcatcaccgtgggagtacggcgaggagaacgcacgaggaggagaaggtcgagccggtgcgatcgactacttcctctatatagacgtgcgctacttcgcgagagttcctttgacttctcagtgtcttcttccgctgcgcaacacgtcgagtggtaactgtaatttatgctcttccaataattgcacctattacagtt

SEQ ID NO: 5526 - DNA, 196 bp, Oryza sativa
  Clone ID: PAT_MRT4530_12304C.1
gcatgcaagcttgagtatgaggaggacgctgggtcagtgcaggcgccgctgcagccacccatcccaccggcgcacgacgagttgcagtactggtcacacttgctgcagatcatatgcaccaccgcgggctctgtcagggtttcaaaaaccgctgggggcccggttaccgccacccggcggtacggcggtaaccgcg

SEQ ID NO: 5527 - DNA, 1088 bp, Oryza sativa
  unsure (1)..(1088): unsure at all n locations
  Clone ID: PAT_MRT4530_12305C.1
ttcctaattttaatcatacaaagagaagttcagcaattatttagatattaaattaatcattagatggtctgatggtaaggngcttaagcactttgagtgtccaagtattttcaggttttggtgcttgaaattatttgagcattagaagcaggtttaacaactcaaagatcatttcagtgattaagttaattggaaaagtaattaaagttcaccttttcctattcgggccgaattaggaaaagtcctctcactctcggcccagtctcctctcagcctgcagcccttttcctctctttcccgaagtctgctttgtgtccctcctttaatcagtccttggaagtagaagcccagccgaaagtctagtttgcctccctggcactgttcatcttcaagcttggacagagccgagccgcccgtgctgtgccctgtgcagccaccgcttcctccgttaaatccgccacatcccgagctccgtttgcaaaattagttgaggggaaatattcctcttatcctcctctattctgttccccaagaatcggagcaaatcgttgagtattttatccgaatcgaactcgtttttgagtttatctccaaaaccgagtttttgatttcccggatcgatttcttgcgggaggagtccgatctcttcaatccaaggctataaataggaccccctagtcctcctctttcgtttgccccctctcccgtcctctcccgtgacccgtagagccgtcgccgcgtgaaaccatccgccgccgccgccggccgggttgcagccgcgccgagcagccttctccgccgtcgccgccgcttgccgccatcacctttaggtgcgccaagccgtggggaagctcggccgcccgttccccttcgccgccggccaccggagcccctccgccgccggtcaaccgagccgccgccgtcgcccctctcgttgccggtcgtcgtccgacgtcgtttgtcgttgtggtgagtaccgttgggttcgtctcgtcgtcctctacgtgtacatgccctcctttttcccggccgaccaccctagctcctgcgaggtcgccatctgagccggccgccacacatcatcatct

SEQ ID NO: 5528 - DNA, 1045 bp, Oryza sativa
  Clone ID: PAT_MRT4530_12306C.1
atgagtagtgtgaaactaatcacgaaaaacattgctcaacccgcccataaccacgggcacggctattcgaatagttttactctggccagaggtgtaccactgtacctacaagacacgatttcgcacatgttgccatgccccgaaataccaccacggcattgcaaagggggaaatcgtgacaataccctttgcacaacacaactcaaaacagtgcaccgttcctggatcataatcacccccttataaacaaggcatggactccccagcgacccccgtggacttcttgccacttctcagtctggcgcactataatgaatcacgctatacaaaaggctcggatggcgacctcgccggagctagggtggtcggccgggaaaaaggagggcatgtacacgtagaggacgacgagacgaacccaacggtactcaccacaacgacaaacgacgtcggacgacgaccggcgacgagaggggcgacggcggcggctcggttgaccggcggcggaggggctccggtggccggcgacgaccgggaaggggcggccgggctagccctcggtcacgcgcacccgccggcggcgagaggaggcagcggcgacggctagggcgacggcgcagcgcggctgcacgttgaccggcgacgtcggcggcttgcgcgacgcggcgacgaggctacggagcacgagagagcacgggaaagagggaaaacgaaagaggaggactagggggtcctatttatagccttggattgaagagatcggactcctcccgcaataaatcgatccgggaaatcaaaaactcggttttggagataaactcaaaaacgagttcgattcggataaaatactcaacagtttgctccgattcttgggggtaaagatagaggaggataagaggaatatttcccctcaactaatttcgcaaacggagcacgggatgcggcggatttggtggaggaagcggcggcagcacaggtacaggacggctggctcgggctctgtccaagcttgaagacgacactgtagcagggaggcgaattagacttt

SEQ ID NO: 5529 - DNA, 729 bp, Oryza sativa
  Clone ID: PAT_MRT4530_12307C.1
actagtggatccccgggctgcaggagcgagggcaaccacctcgtcgacgtctcgacgacgacgaccattccggcgccctccacgcacagaacggatggcgacctctccagcttatcctccccctggatccggtgagggtttctccaaaccgcccgctacagatccttgttcaagtggccattggtcagacctcccagttgatctccttcaccgcatcttgcatagccttgagctcccagaagcgcttgctgtagccgatgtctgcaagtcatggtgctgtgctgccatagctgcaggtgttcctcgttcttgcacaccatggctaatgtcctggtctgacaagcctccacatgaactggaatatgatgtcttgctcaacaattgcaaatggcagcgccctatgggatgtgaattccacgaccttgtcaatggccacaagacttatgaggttaatttgccacaagtggcttgggttggtgcatctcatggttggcttgctgctgctgataatctctctaatcttttgctttacaacccatttacctttaccacaatccctcttccgccgatcactgatctagggtgtgtggaggcagtctatgacagtgaaggaagcattgtgagatatcgccttggaaagcacaaggaaagtgatgcaaaattccttggtgtctggttctaccagaagcttgtgctgtcatgtgctccttctctaggtggtgactatgt

SEQ ID NO: 5530 - DNA, 198 bp, Oryza sativa
  Clone ID: PAT_MRT4530_12308C.1
atgggctggattgggccagctgggggtttggccgaacactggctggctcccctggcccacagccttcttcaggatgctgacattgagagagcacaggtggaggctgagattcgtggtgaggaggcggcctggcgtagcgcgggcgggatggatgtggtgtacacggaaggaggcggccatcgtgcgacccaggcatga

SEQ ID NO: 5531 - DNA, 327 bp, Oryza sativa
  Clone ID: PAT_MRT4530_12309C.1
atggccgtgccaagcctacaaatcgattcatcccgagtccccgaccatgtgactacgggagatgggctgcaggtgccggtgacgaatgagctcgtggcggcgcagggaacaggagcaggacaagatcttcctggacgccccgcgaccgcgacggcgacggcgccccacgaccacgagcagttgggatcctctccaaaattccaagcttccaacgtcttggcccaatccaatccccagccacaggtcgcggtcaccgccaagctcaccacacgggtatttgatggagttaaaggtttaattcgaggtggatttaggggttttttctaa

SEQ ID NO: 5532 - DNA, 822 bp, Oryza sativa
  Clone ID: PAT_MRT4530_1230C.1
taaattcctcactaaagggaatagcttgggccttgcgagctgttcgtatgcaatcttccccgcgctgcgacgtcgacgacctctacgagctcttcaagccctacggcaccgtcctctccgttgagatttcccgtgaccctgagactggacttagccgaggatgtggtttcgtcacaatgcgttctctcccagaagctcggacagccatgaacgctctcgatggatttgacctggatgggcgtgaaatgcttgtaaaactatcatccgacgttgtttctaaaaggagaaacatcaacatgactcatacgccacctgtgaaagaccacatcttcgagagcccacacaagatctacgttggcaacatcgcgtggtctgttgagccacaagaattgcgagagtacttctctcagtgcggaaccgtcgtcagtacaaggctgctgacagatcgcaaaggagggagaggccgtgtctatggattcctctcatttgcttcagctgaagagcttgaggctgcattgaagcttgacaatacgcattttcatggacggaacatcctcgtcaggcaagctcatgaagagcgtcaggcacactgaaccgtccagggattattggagacctattggaattttgtctaagcttatttgctgattgagttcgtccttggggcgcaatggtgcacatcaagactaacatgtgtttcgtattaaggaatgtattgagtatctgtattcagtgactgagttaaggggaatgggtctagcatcttccctcgggcgaatctgggctcgaggccaaatcctataggagtcgataaatcgtaac

SEQ ID NO: 5533 - DNA, 3708 bp, Oryza sativa
  Clone ID: PAT_MRT4530_12310C.1
ctctcttcccgcgttcccctctccctccccctcccccctctccggcgatgagctcaggcggacgcggcggcaagcggcgaggggcgccgcccccggggccatccggggcggcggcgaagcgggcccaccccggtggcaccccgcagccgcctccgcccgccgcgacggcggcggcgcccgtggcggaggaggaggacatgatggacgaggacgtcttcctcgacgagaccatcctggcggaggacgaggaggcgttgctgctgctcgaccgggacgaggccctcgcctcacgcctctcccgctggaggcgccccgcgctccccgccgacctagcgtccggctgctcgcgcaatgttgcttttcagcagctggagatagattatgttattggtgagagccacaaagtactgctccccaactcatctggtcctgcagctatactcaggatatttggcgtaactagagaaggtcacagtgtatgctgccaagtgcatggatttgagccatatttttacatcagttgtccaatggggatgggccctgatgatatttcacgcttccaccaaacactagaggggaggatgaaggattcaaataggaacagcaacgtgccaaggtttgtgaagagaatcgaacttgtgcagaagcagacaatcatgcattaccaaccacagcaatctcagcctttcctcaagatagtggttgctttgccaacaatggttgctagttgtcgcggcatcctggaaaggggcataacaattgaaggccttggttcgaagagttttctgacatatgaaagcaacattctttttgcacttcgcttcatgattgactgcaatattgttggtggtaattggattgaagttcctgccggaaagtatatgaaggcagctcgtatcatgtcctattgtcagctagagttggattgcctatattcggatttggtaagccatgctgctgaaggagaacattctaagatggctccatttcgcatattaagttttgatattgaatgtgccggtcgcaaaggtcacttcccagaaccaactcatgatcccgttattcagatagctaacttggtcacccttcaaggagaaggacaaccttttgtacgcaatgttatgacgcttaaatcatgttctcccattgttggagttgatgttatgtcatttgacacagagagggatgttctacttgcttggagggatttcatacgtgaagtggaccctgatattattattggatacaatatctgcaaatttgacttaccctatcttattgagagagctgaagttcttaagatagtagagtttccaatacttggacgaatcagaaatagtcgtgttcgtgtccgtgacacaactttctcttcaaggcaatatggtatgcgtgaaagtaaagatgtagcagtggaaggaagagtacaatttgatcttctgcaggctatgcaacgggattacaagcttagttcttattcattaaactctgtatctgcacatttcctcggggagcaaaaagaggatgttcatcactcaattatatctgatcttcaaaatgggaattcagagacacgaagacggcttgcggtttattgtttgaaggatgcctatcttccacaacgactgctagataagttgatgtatatctacaactatgtggaaatggcaagagtcactggagttcccatttcatttcttctttcaaggggacagagcattaaggtcctctcacagctactcaggaaagcaaaacagaaaaaccttgttattcacagctactcaggaaagcagtctggacaggatacctttgaaggtgcaactgttttggaggcaagggctggattttatgagaaacccattgcgactttggactttgcttcgttgtatccatccatcatgatggcatataacctatgctactgtactttggtcccccctgaggatgcccgcaaactcaacctgcctccagaaagtgtcaacaaaaccccatctggtgaaacatttgtgaaaccagatgtgcaaaagggtatacttcctgaaatccttgaagaattgttggctgctcggaaaagggcgaaagcagatttgaaggaagcaaaggatccatttgaaagggccgttcttgatggtcgtcagcttgccctaaaaataagcgcaaactctgtctatggttttactggagcgactgttggtcaattaccttgtttagaaatttcttcaagtgtgaccagctatggtcgacagatgattgaacatacaaaaaagcttgttgaagataaattcacgacacttggaggctatgagcacaatgcagaggtcatctatggagatactgattctgtaatggtacagttcggtgtttctactgttgaggacgcaatgaagctaggaagagaagctgcagactacattagtggaacatttattaagcccatcaagcttgagtttgagaagatctatttcccttatctactgattagcaagaagagatatgctggtttgtactggacaaatcctgagaaatttgacaaaatggagacgaaaggtggtgaaacagtgagaagggacaactatttattagtaaagaacctggttactgagtgccttcaaacaatactagtggacagagatgttcctggtgcagttcaatatgtcaagaacaccatttctgatctactaatgaaccgtgtagacttatctcttctagttataacaaagggtttgactatatcgggagaggattatgctgtcaaagctgcccatgtggagcttgctgagagaatgcgaaagagggacgctgctactgctcctactgttggtgaccgggttccttatgttataatcaaagcagcaaaaggggcaaaggcatatgagaggtcagaagatcctatttatgttttggataataacataccaatagatccccaatactaccttgagaaccaaatcagcaaaccacttttgaggatctttgagccgattctgaagaatgccagtagagagctgcttcatggaagtcacaccagggctgtttcaatctcaactccttcaaatagtggaataatgaaatttgcaaagaaacaattgacatgcctcggatgcaaagcagttataagtggttccaatcaaacgctttgctttcattgcaagggaagagaagcagagttatactgcaaaactgtaggaaacgtttctgagctggagatgctctttgggaggctctggacgcagtgccaggagtgccaaggctcccttcatcaggacgttctctgcacaagccgggattgtcctattttctaccgccgaagaaaggcgcagaaggatatggctgaagctagagtacagcttcaacgttgggacttctgagtcctctcatactgacggagtactactttccccaaatattgcgaaaccattactgtgaggcacgccattgcgggatcatgtgattgcatcttcatgcatgatggctctggcttgtttagttggatcggctgaaatagctttgttctacggtcagtttgttgtatttttaggtggtaggttatctgtacctctagccgctaacagggtaatctagttgcttcccttggtgcattgatgcagccatgtgtaaggtagataaacaattttttttcatcatcttttaacttcatgaggtgattgaggctgagaagcacccattcaagaaaaaaaaaaaaaaaaaata

SEQ ID NO: 5534 - DNA, 3324 bp, Oryza sativa
  Clone ID: PAT_MRT4530_12311C.1
atgagctcaggcggacgcggcggcaagcggcgaggggcgccgcccccggggccatccggggcggcggcgaagcgggcccaccccggtggcaccccgcagccgcctccgcccgccgcgacggcggcggcgcccgtggcggaggaggaggacatgatggacgaggacgtcttcctcgacgagaccatcctggcggaggacgaggaggcgttgctgctgctcgaccgggacgaggccctcgcctcacgcctctcccgctggaggcgccccgcgctccccgccgacctagcgtccggctgctcgcgcaatgttgcttttcagcagctggagatagattatgttattggtgagagccacaaagtactgctccccaactcatctggtcctgcagctatactcaggatatttggcgtaactagagaaggtcacagtgtatgctgccaagtgcatggatttgagccatatttctacatcagttgtccaatggggatgggccctgatgatatttcacgcttccaccaaacactagaggggaggatgaaggattcaaataggaacagcaacgtgccaaggtttgtgaagagaatcgaacttgtgcagaagcagacaatcatgcattaccaaccacagcaatctcagcctttcctcaagatagtggttgctttgccaacaatggttgctagttgtcgcggtttgcactttgcacctataggcatcctggaaaggggcataacaattgaaggccttggttcgaagagttttctgacatatgaaagcaacattctttttgcacttcgcttcatgattgactgcaatattgttggtggtaattggattgaagttcctgccggaaaatattcggatttggtaagccatgctgctgaaggagaacattctaagatggctccatttcgcatattaagttttgatattgaatgtgccggtcgcaaaggtcacttcccagaaccaactcatgatcccgttattcagatagctaacttggtcacccttcaaggagaaggacaaccttttgtacgcaatgttatgacgcttaaatcatgttctcccattgttggagttgatgttatgtcatttgacacagagagggatgttctacttgcttggagggatttcatacgtgaagtggaccctgatattattattggatacaatatctgcaaatttgacttaccctatcttattgagagagctgaagttcttaagatagtagagtttccaatacttggacgaatcagaaatagtcgtgttcgtgtccgtgacacaactttctcttcaaggcaatatggtatgcgtgaaagtaaagatgtagcagtggaaggaagagtacaatttgatcttctgcaggctatgcaacgggattacaagcttagttcttattcattaaactctgtatctgcacatttcctcggggagcaaaaagaggatgttcatcactcaattatatctgatcttcaaaatgggaattcagagacacgaagacggcttgcggtttattgtttgaaggtaggtctgctagactgccagtggcttagatatttgccagatgcctatcttccacaacgactgctagataagttgatgtatatctacaactatgtggaaatggcaagagtcactggagttcccatttcatttcttctttcaaggggacagagcattaaggtcctctcacagctactcaggaaagcaaaacagaaaaaccttgttataccaaatataaagggtcaagcgtctggacaggatacctttgaaggtgcaactgttttggaggcaagggctggattttatgagaaacccattgcgactttggactttgcttcgttgtatccatccatcatgatggcatataacctatgctactgtactttggtcccccctgaggatgcccgcaaactcaacctgcctccagaaagtgtcaacaaaaccccatctggtgaaacatttgtgaaaccagatgtgcaaaagggtatacttcctgaaatccttgaagaattgttggctgctcggaaaagggcgaaagcagatttgaaggaagcaaaggatccatttgaaagggccgttcttgatggtcgtcagcttgccctaaaaataagcgcaaactctgtctatggttttactggagcgactgttggtcaattaccttgtttagaaatttcttcaagtgtgaccagctatggtcgacagatgattgaacatacaaaaaagcttgttgaagataaattcacgacacttggaggctatgagcacaatgcagaggtcatctatggagatactgattctgtaatggtacagttcggtgtttctactgttgaggacgcaatgaagctaggaagagaagctgcagactacattagtggaacatttattaagcccatcaagcttgagtttgagaagatctatttcccttatctactgattagcaagaagagatatgctggtttgtactggacaaatcctgagaaatttgacaaaatggacacgaaaggtattgaaacagtgagaagggacaactgtttattagtaaagaacctggttactgagtgccttcataaaatactagtggacagagatgttcctggtgcagttcaatatgtcaagaacaccatttctgatctactaatgaaccgtgtagacttatctcttctagttataacaaagggtttgactaaaacaggagaggattatgctgtcaaagctgcccatgtggagcttgctgagagaatgcgaaagagggacgctgctactgctcctactgttggtgaccgggttccttatgttataatcaaagcagcaaaaggggcaaaggcatatgagaggtcagaagatcctatttatgttttggataataacataccaatagatccccaatactaccttgagaaccaaatcagcaaaccacttttgaggatctttgagccgattctgaagaatgccagtagagagctgcttcatggaagtcacaccagggctgtttcaatctcaactccttcaaatagtggaataatgaaatttgcaaagaaacaattgacatgcctcggatgcaaagcagttataagtggttccaatcaaacgctttgctttcattgcaagggaagagaagcagagttatactgcaaaactgtaggaaacgtttctgagctggagatgctctttgggaggctctggacgcagtgccaggagtgccaaggctcccttcatcaggacgttctctgcacaagccgggattgtcctattttctaccgccgaagaaaggcgcagaaggatatggctgaagctagagtacagcttcaacgttgggacttctga

SEQ ID NO: 5535 - DNA, 321 bp, Oryza sativa
  Clone ID: PAT_MRT4530_12312C.1
atgacacccccgatctgcgcacgggaggaaggctcgcagccacggatggtcgcggcggtggcaggacggctcaactgcaagggaggaagggaacgcatgtacatggattggagggctcacaagtcagagcaaaccgacatatttgagggcaattcaccgtgcaccgtcattaaggcccacaaaacagttaatcgggcgaaaatagtggagaaaggcagtgaaagtggttcggccgaaccactagttcgacccatcgccccaagcttccacgtgccacttcctcaggcctccccaatggtggttatacctgactcccggtaa

SEQ ID NO: 5536 - DNA, 5967 bp, Oryza sativa
  Clone ID: PAT_MRT4530_12313C.1
atgccaactccatctcaaacgatcgtcttcggctccatcactggccttgtcaaagaaaaagaagactcttatcttgagttctcttggtggttccgtgaggattttggaggggttaatggtttgttgctctgttcatctggtgctttgcatctaggaacaaatgctgcagatggagcgcatttgactgagtttgctgtgcagctgccacattttgaggggcttcacttaaagaacactgctctttatgatgggaatcagtttatgccagcatttggtcttgctcattgtctgagcatgagacaacaatttacttccatggaccgtgatatcatggctgatggaaacatagtgcaaaggtcaattcatttgcgcagaaagagaagggatcttccacagacatcatcattacccaagtttgctgagaaccacgagcttggaagtgccaatatctttatggatccatctttttacacaaaagcaacagagtctagttctacagaaaacaaaagttcatcaaagcctccaaaatttcttggggaaaatagtagccgtcgaccacatcatcgtactgttggcctacctgttcaatatagtgatttctttatcaccagtttgggagaaatcgataaaaggccaagctaccataattcctaccagatatggccagttggttttacgtcttactggcatgacagaattactggttcactgttcgagtgtgaggtgtgtgacggagggaattttgggcctttgtttaaggtgagaaggatatcatgttcagtgttccctcttccagatgcatcaacaattctctctcaaaatagtacaagaaaggctgagacaatagaaacaaatgaaaacaacactttgcttgaagatactgctaatgatacagatgataatatcttaatgctcctatcagactcttctgagaccaatcaagatttgttatcatgttttagcaatgatatggagagcaaaatgacttctttaggttgcaatgatttgcatagttcaaataggtcggtaccaacagtaccgtcacactctgggactgacaaaattggcgagtttacgtttgagggaacatctccttcctcagtatggaggatgatttcttgtgctatgatggaagcttgtgaaaaaatgtacaaggaacatggccatttggtgttcttctgcacacatggtactgaaaagcattcatttgacagtgggagtggatttcaggactttaatggtccttacactccattaactagattttgctcatcttatgggcccagtataccgagaattgtagaaaaggagaatgatgtggagcctacttattcactactcaaagaatggctataccaagatagaattgggtttgacttggaattcgttcaagaaattgtagaatctcttcctagatctagggcttgttcaaattaccagttcttgtgcaacagggctgaattcgtctcttctttgacagttgcaagtggttcacttagagttgtacataaaaatggtcagagtaatggagacgtcatgtcatatggcagacatgggtctgtggtgactgggctacaggatcatacccagcctagtggttttagaatccgtgaacttcctctgggacgtcctattagcaataagcttccgccagagttggcaggagaggttctccagatatgggaattcctgggacgtttctctgaaataattggcctgaaagaaattccttcatatgagcagctagaagatgaacttattgacccatggccaatttgtgcagatcagaaagagaagttatcaaatgacattcacagggatcacacttcgccgattaattcccctgcaaatgtttctacatcatattcaaatggtgaatcgggtctaaccagtaatgaagagattgtatctttgttcatccctgttgaaacttcttctatgaagaaagctgctcaagataaatcggcagctcagacgcttggaagatgcagtggcgtagtgttgcctggggttcaccttacactctttagggttctttttggtgagctattatctaaggttgcaatttttgtagatccaaacattgatcctaaagaatcaaaaactaggcgtggaagaaagaaagacactgagaatctcatttcagcaaaagaatttaaatttgacatgctaacagctaacaagttgacttggccggaattggcaagaaggtatattttagccatttcgtccataagtgggtgcatggatttatctgatatttcaagtcgagaaggagtgaaattattccgctgtctacaaggtgatggtggtattctgtgtggtgcactacctggggttgctggcatggaaaaggatgcgttgctgcttgtggaggctgaaaatttgatatgcaaatcttcggtgaatgaagaaagtaaggtttttatgatggatcaaaaggatactgacatggtagattctcctgaggtgtctgctactgataataaaacattgcctgactgggcaaaatcactggagcctgtgagaaaattaccaacaaatgtggggacacgaattagaaaatgcgtttatgaatctttggagagaaaacctccggaatgggcaaggaaaattttggagcattcaatcagtaaagaggtctacaagggtaatgcatctggaccaactaagaaagcagttctatctgtgttgacagaagcatgtcgtgtaaaagtaccacataatccagaaaagccaagaaaagagagaaatgctatttccatctcagaggctatcttgaagaagtgccgtattgccctgcgctctgctatttcctcagatgaatccaaactttttgggaatttgctcggaactactctagtgaattccaatgaaaatgaggatgaaggcatactaggattccctggtatggtgtcccgccctttggacttccgcacaattgatataaggttggctatgggagcttactatggatcatgggaggcttttcttgaggatgtccaggaagtaatacgcaacctgcacactgcatttggtgatcgccctgatgtgcttgaaatggttgttgcattgtctcagagttttgagtcattgtacaagacagaggtgcttgaccttgttgagaaatttgacaaatacctctcggacaagaatgctggttcagaaatgcacgaggagctacatgatattctaactgcagcgaacagcttacctaaagctccatgggaagatggcgtttgcaaagtatgtggtattgatagggacgatgatagtgttctgctatgtgacaaatgtgactcagaataccacacttactgcttgaatcccccactagcccgtataccagaagggaactggtactgtccatcatgtatgttaggtcaaacgaaagcacatcatgatcagggtgttcaagatgtgaaacggcagcaaaagaaatttgttggggaggaagcccatgcctttcaagaggaacttaataaattagctacagcaatggaagagaaggaatattgggaccttaacatgcaagagaggatatatttactgaaatttctatgcgacgaaatgctcaacactgctctaattagagaacatctagatcaatgttcagataagttaggcgatcttcagcagaagttccgtgcttcaaattttgaattgaaagatttgaaatataaggaggagatgaggacttcatatgctagacaaagtagatctagtaaaactgaacagcattttaacaacagttctggacccgtggaaaatcaacagcagtgcacgcccacagcattggaccatctggaagaggctgaacagggtaatgttggagttaacctaaacaacccagctgatggggttcctgatgggcaattgaatgtaggcaagccttacaaaagtgacaaagacatatccagtgcatctatggttgaagaacgcaaatcttcaggactttctgaacaaccatcaggaatggctattgaccagattgatggggatgctattgatgaagggtcccagagttgtgagaagaggtcattaggtgccaagagcagtacatgtgataacttgaacttgaaagacactgaatttagcacacctggaagagagttgcctgatgaaagagccagcacatcattccaagataatcttgaagcatcatcaactaaatcaattgagcttgatgctgataataatgaaatggatactttatcggatgacatttcaaaattgcaggattcaattagcttactagagtcacagattaatatggcatcatcgagaagagagtgtctgggtaaggattccattggtcgattatactgggttataggaagaccgggtaaacgtccttggttggtggctgatggaagcatgctgaaacccaaggagagagatatcagtatggttaacagttatcccccatctgcttttgattgcaaaggttggaattcagcatctattttcatttatgaatctgatgaggaaatccagtgccttcttgactggttaagagactatgacccaagggagaaggaactgaaagactctatcttgcagtggcaaagacatttctgtcatcaaagcagttctcctctcgttgatcctccaatttctggtccaaagggtgaacagcttatggagcttccaaataccaaggctgcagtaattttggaacaaaagtatggtctgcaattggaccaggacacaagtgatctaccgaaaaagcgaggaaagaagataaagttaagttctgaagatagaacatatcgctgcgactgtttggaacctgtatggccttctcgataccattgtttaacatgtcatgagacttatctcatatctacagagtttgaggggcataatgatggaaaatgcagtaaaatccaccagtctcctgatgaaagcagagaaaatgatgagccaaaagtgaaggttaccaaatctgatacgaaggaaaaagattcccttgaatgtagctctgtcattgaaccgtccagtgacagaaaattgatgcaatgcccatatgactttgaagaaatttgcagaaagttcgtcacaaatgattcgaacaaggagacagtaaagcagattggacttaatgggtccaatggagttccatcatttgtgccttcacctgcattttttcttgaacctgcaattgtacaaagtcaaaacagaaaagatgatgaactcaaggattggacctcctctttagaggaatgcaatgcaatgtctgctcaaaagctagttcaagaggtttccaaatctggtcaaagttgtcctggcaatgtgggtgatgagaaggtgcaaaaatctaaaaagcccacccctgataatacttctggtgaggaagcacattctacaacaggcaagccaacacgattgctagctgttaatggggggttggttccagagtcatccttgaggcctcttataggacgaaactctcacatacttaagcagcaaaagataaacttgcttgacatcgaagcagccttgcctgaggaggcactgagagcctcaaagtgtcagcaaataagaaggcgttcatggcgtgcatttgtcaaagatgcagaatcaatatcccagatggttttggcggctaacttgttggagggcatgataaaagctgagttcttgaagaacgattggtggtactggtcttccttcacagcagctatgaagacatcaactgtatcctcactcgcgctcagggtctacactctagatgattgtatcatctacagtaaggatcaagttccaagcgttgagccagctgacaatacaaggttccagaaggaagaattggtactccatgtgcgagcattcgatcttgatgccaccatggggggcgctctggggcgttgtattgatcatttgtttgatgtttctggcaagtttgcaacatctgataggaatgtagattcatcttgcgacagatataattttgattgtaactaa

SEQ ID NO: 5537 - DNA, 2370 bp, Oryza sativa
  Clone ID: PAT_MRT4530_12314C.1
atgaatatcactcaaatcctgctatcagctcaatctgcagatggtaaccttcgggtagtagcagaagggaacctcaagcagttccaggagcagaatcttcccaacttccttctctccttgtcagtggaactttcggataatgaaaaaccaccagagtctagacgacttgctggtattatccttaagaactccttggatgcaaaggattctgcaaaaaaggaactactgattcagcaatgggtcagcctggatccatcaatcaaacagaagataaaggagtccttgctgataacgctaggatcttcggtgcatgatgctaggcatacctcatcacaagtcattgccaaggttgcatccattgagatcccccggcgtgaatggcaagaactcattgccaaattattgggcaacatgacacaacagggtgcacctgctccactaaagcaagcaactctagaggccttagggtatgtctgtgaggagatttctcctgaacacttggagcaggatcagggaatgaaccagacagagctaagccctgaagtccgtcttgcagcagttaaagccctatataatgctcttgattttgctgagagcaactttgcaaatgaaatggaaaggaattatatcatgaagattgagctccaagaagaatatgagggatctgatgatgctaattctactgtaaattatcgcttcattgagaaggccctcccttcacttgttccgatgctgctagaaactctgttaaagcaagaggaagatcaagatcaggatgataatgtatggaacatttccatgagtggtgggacatgccttgggctcattgctagaactgttggtgatgcgattgtgcctcttgtgatgccttttgttgagggtaacatcacaaaaccagattggcattgtcgtgaggcagctacttttgcatttggttctatccttgaaggtccatctgtggagaaacttgctcccctggtacaggctgggtttgacttcctgctgaacacaacaaaagacccgaatagtcaggtaagggacaccactgcatggactcttgggagggtatttgagctcctgcattctccagccagtgcaaatccaattataacaagcgcaaaccttactcgtatcatgactgtcttgctggaaagtagtaaggatgttccaaatgtggctgagaaagtctgtggagccatatattttcttgcccaaggttatgaagacgcagagtcgatttcatctgtgcttacaccttttcttcctaatctcattgctgctctcctttctgcggcggatcgtgctgataccacccacttcaggcttcgtgcatcagcttatgaagcattgaatgagattgtgagagtcagcaacatatctgaaacgtcaggcattataggtcagttactgcaggagatcatgaggagattgaatctgacgtttgatctccatatactttcatctggtgacaaggaaaagcaaagtgatcttcaggcattactgtgtggtgtactgcaggtcatcattcagaaattgagcagctcggatgctaagtcaataattgcccagactgctgatcagttgatgtttctgtttctgcatgtttttgcttgccacagctctactgtacacgaagaagcgatgcttgccatcggtgctcttgcttatgccactggtacagattttgtgaaatacatgcctgagtttttcaagtatctggaagctggcttgcagaattatgaagagtaccaagtctgttccatctctgttggagtggtgggtgatatttgccgtgccttggaagataaaattttgcccttctgtgatgggattatgactgttcttctcaaggacctgtcaaactcgatgcttaatcgttctgtgaagcctccgattttctcatgctttggagacattgctcttgctattggtgataattttgagaaataccttccttatgctatgccaatgcttcaaggagctgccgaacttcttgctgttttggaccatacagatgaggatatggttgattatggtaaccagctcagacggggaatctttgaagcttactctggcatactccagggtataaagggtgcaaaagctcagttgatgataccctatgcaagccatctattgcagttcactgaagctgtctacaaggaccgcagcagggatgagagcgtgacaaaggctgcagttgctgtcctgggggatcttgcggacacactcggctcaagctcaaaggatctgttcaaaagcaacctcttccatgttgagttcctgagggagtgccacgatttggatgatgaagttagggacaccgcgtcatgggcccagggaatgataaaccaagcactggtttcttaa

SEQ ID NO: 5538 - DNA, 3137 bp, Oryza sativa
  Clone ID: PAT_MRT4530_12315C.1
cacctcctcgcttccccccttcctccgcccgccggagcagagttccttctccttccatccattccgttcgggaatcaggcgagcgcgtcagcatccccctcctcctcctctcgcggccgccttcgtcgcaggcatcgccgtgctctgaccggagggcacttgttctttccttcgtcagagcggaggggagcggaggagcggagccggagatccagatctgcacgggaaggtatctcccgctgttggtacagccatgaatatcactcaaatcctgctatcagctcaatctgcagatggtaaccttcgggtagtagcagaagggaacctcaagcagttccaggagcagaatcttcccaacttccttctctccttgtcagtggaactttcggataatgaaaaaccaccagagtctagacgacttgctggtattatccttaagaactccttggatgcaaaggattctgcaaaaaaggaactactgattcagcaatgggtcagcctggatccatcaatcaaacagaagataaaggagtccttgctgataacgctaggatcttcggtgcatgatgctaggcatacctcatcacaagtcattgccaaggttgcatccattgagatcccccggcgtgaatggcaagaactcattgccaaattattgggcaacatgacacaacagggtgcacctgctccactaaagcaagcaactctagaggccttagggtatgtctgtgaggagatttctcctgaacacttggagcaggatcaggtgaatgctgttctaactgctgttgtccagggaatgaaccagacagagctaagccctgaagtccgtcttgcagcagttaaagccctatataatgctcttgattttgctgagagcaactttgcaaatgaaatggaaaggaattatatcatgaaggtaatttgtgatactgctgtatcgaaggaagtggagatcaggcaggcagcctttgaatgccttgttgcaattgcttccacatattatgtacacttggatccttatatgcaaaccattttcaacctgacagctaatgctgtcaaaggagatgaggaagcagttgcacttcaagctattgagttctggagcactatttgtgatgaagagattgagctccaagaagaatatgagggatctgatgatgctaattctactgtaaattatcgcttcattgagaaggccctcccttcacttgttccgatgctgctagaaactctgttaaagcaagaggaagatcaagatcaggatgataatgtatggaacatttccatgagtggtgggacatgccttgggctcattgctagaactgttggtgatgcgattgtgcctcttgtgatgccttttgttgagggtaacatcacaaaaccagattggcattgtcgtgaggcagctacttttgcatttggttctatccttgaaggtccatctgtggagaaacttgctcccctggtacaggctgggtttgacttcctgctgaacacaacaaaagacccgaatagtcaggtaagggacaccactgcatggactcttgggagggtatttgagctcctgcattctccagccagtgcaaatccaattataacaagcgcaaaccttactcgtatcatgactgtcttgctggaaagtagtaaggatgttccaaatgtggctgagaaagtctgtggagccatatattttcttgcccaaggttatgaagacgcagagtcgatttcatctgtgcttacaccttttcttcctaatctcattgctgctctcctttctgcggcggatcgtgctgataccacccacttcaggcttcgtgcatcagcttatgaagcattgaatgagattgtgagagtcagcaacatatctgaaacgtcaggcattataggtcagttactgcaggagatcatgaggagattgaatctgacgtttgatctccatatactttcatctggtgacaaggaaaagcaaagtgatcttcaggcattactgtgtggtgtactgcaggtcatcattcagaaattgagcagctcggatgctaagtcaataattgcccagactgctgatcagttgatgtttctgtttctgcatgtttttgcttgccacagctctactgtacacgaagaagcgatgcttgccatcggtgctcttgcttatgccactggtacagattttgtgaaatacatgcctgagtttttcaagtatctggaagctggcttgcagaattatgaagagtaccaagtctgttccatctctgttggagtggtgggtgatatttgccgtgccttggaagataaaattttgcccttctgtgatgggattatgactgttcttctcaaggacctgtcaaactcgatgcttaatcgttctgtgaagcctccgattttctcatgctttggagacattgctcttgctattggtgataattttgagaaataccttccttatgctatgccaatgcttcaaggagctgccgaacttcttgctgttttggaccatacagatgaggatatggttgattatggtaaccagctcagacggggaatctttgaagcttactctggcatactccagggtataaagggtgcaaaagctcagttgatgataccctatgcaagccatctattgcagttcactgaagctgtctacaaggaccgcagcagggatgagagcgtgacaaaggctgcagttgctgtcctgggggatcttgcggacacactcggctcaagctcaaaggatctgttcaaaagcaacctcttccatgttgagttcctgagggagtgccacgatttggatgatgaagttagggacaccgcgtcatgggcccagggaatgataaaccaagcactggtttcttaagaggggattattttgttttgtcagttattggggaggtttcttttgtggctgtgccaagaccatttgccacagattgaacgaaaggataccaacatatatgtagcgtcagtcgtaggctgcttctgtgcttttgtcgtcagtctgtcaagtcagtttatgcgtcgcatttggcgtgggtggattctggcattgaatgtcttgaacagctaaacctgttaatgttaatgtattctacctgtggtgtttatccattcgaaaaaaaaaaaaaaaaaaaaaa

SEQ ID NO: 5539 - DNA, 591 bp, Oryza sativa
  Clone ID: PAT_MRT4530_12316C.1
atgaccggcggcggcggggctcctcaggaagacgacgcgacggagcttcggcgacgggcgtcgctcggaaaggggcggacgggcttggctgcaccatgggatgaaaggagagctgttaggagggggagaggtggctcacggcggcgtgagtcgctggccggagatgagaaaaaacggcggattctcacctcgagcggagaggccggggttccaacagcgattggagccagtagagtggtgccggaggggctgtgcgtcccgaacgaaaatctgggcgttacaaattccaacctcccatttgctcttcctctccctaaaactcttgctccatcgaagagaaacaagatcgcgccgccgccgggtgtcgaacacctgtcaatatttgacaaatgcttagcccatgctaatttagacccatgcatattcatatttgtcaaaatgctttatgcttgggcaattaccttagggaagactggtggatcaacttctcgagaggttagaaggggtagaccccagaaaaccatgacgaccagtggcgggaagctatccttgggaacacaatggatggtggacagaaccatggctgtttaa

SEQ ID NO: 5540 - DNA, 773 bp, Oryza sativa
  Clone ID: PAT_MRT4530_12317C.1
caaaagctagactttatcgctcttctagaaacggggaaaaacaagtctgttgattcatggcttaaaaacatatgtggaggaagagattttttgtttcactgaacgaggccgaagggtagaattgggggatttttgcttcgagttaatttggagctttttgatgtctctagtatcgacaaaggggatttctatgtaaaatttcatttgcaaaataaagacgacgcgttccaatggattttgtttgctatttatggggcggctcaagatgaatacaaggaagcctttctctctgaattggttaattcttgtagaagggaagcgttacctatgataataggtggagacttcaatattttaaggaatccacaagagaaaaataaagagaactttgataataaatggcccttcttatttaacgatgtcatagatagcttaaatttgagagagattaagctttcagggcataagttcacctgggcaaactctttaccaaacccaatctatgagaagttcgatagcgtgttagttagtgcggagtgggaggagaaaaatccattggtgtctgttcatgcccttacccgagatccctcggatcacacccccctgctgctagacacagggaaagggtctcttaagaacaaccaacccctgtttaaattcgaacttgggtggttgctgagagagaactttcatcaattggtggtcaatagttggtccaaacaagttagagggaggacattgagagatggcaaaataaaattcagagactgcgt

SEQ ID NO: 5541 - DNA, 1100 bp, Oryza sativa
  Clone ID: PAT_MRT4530_12318C.1
acatcctttcttttcgacagaatgagaaggaatatctcggtgcagcctaggccagtttctcactgttaactcaatctggcccagacttgtcgttacccgaccacgtgttgttgcaacattttcggtacgggttagacaaggagtttgccgaaaatctcaatatttctgccggaggatcgttcgcacacaagacaaccgccgaaggaagagaactcttagatttgatcttagagaacgattctttcggccgaagcgaagccgtcccgaaggtcgagattattcatgaggaacctctgcacgtggagttggaacccgactcaactgtcgaatcctcatcccggtcgcaggagccggaggaagaagaaattcatcctccggaaatttcattccaattcgaggaggatcttttcgaagattattagaacaccttgaattattcctgagagaagagaccaccgaccaaggtcaattctaatgaacctcttgataaatctatgcttaaagagacggtgaagaggttgaccatcatcatgagtaacaaatggttaagagaaggagagctcttatctgaatcgattcagatccgatgcccctcctcaaccattatgtgtcacattggaggtaattcggtccgtgctctgtataatccctctgttggtgccaatattatgtccgcaacctttgcattcgattgcttaggggacagatcgttggaaccaaccgtcagaaccttccgaatttccacaaactctactaccgaagggcatcccatagaaaaactcttagatgtgcccgaaaccggtgtccttaacctgaaaataggaagaattgccacctccgtccctatgttgcaatcaaccaattctttgatggagtctcttcctgttcctgagccaattgagggagtgatggctatttctccattcgagaccctagagtctattttcgatgaatccatcgaagaattcaatgaaggggaggatgaaactggagaaacgatggatctgccaaaaacggatctgccgtcacgagccccaattgagctaaagcccttaccgtcaagcctaagttatgcctttctgaacagcgatgcggagtct

SEQ ID NO: 5542 - DNA, 191 bp, Oryza sativa
  unsure (1)..(191): unsure at all n locations
  Clone ID: PAT_MRT4530_12319C.1
tgtgccacggtgagccatcgtgatggatttgngtgtccttccctgtgtatgtgccttgcactgcctttgtcggggttgtgaaaattgtgacttntggtaactaaactgggtagaattgtatacagtactgttgcttcataattgcaaatacaccttgccataggccatatcttggaaaaaaaaaaaaaaaa

SEQ ID NO: 5543 - DNA, 753 bp, Oryza sativa
  Clone ID: PAT_MRT4530_1231C.1
atggagtgtaaaacgtgcgcgacttcatgccgaaaggaagagtttttccatgggagctttgcgagagctttgaattctgacgcatatctgatatatctgatatatcttgcagttggcactggttttgttcagaatgacatgcttgcatcgttcggaagggatgattctatcaagggcattccatcactggcagcacgacacagtcagcatcgaagacttgaagttggctgtcgagcatcctctttagcgtcattcagctaccctgagttgacttcgaaacccagatggtggtggaggactgtagcatgtgtgccctacttgcttccactccacaacatgtggtcatatgccgatgtcatctaccagctacacacatacttgcaggggttttcgttggtgtacaccttcatcgatacaatgacactgtttccaggatggcttttgctggtgatttttatgacagtgtacttctttgtcgtgagacggaagtggtcgccgcactttctaaggttccatgtcatcttggctatcctcctggacactggctcccaagcagtggcaacaatgtgcacctggatgcccagcatcgtgtatcaggggacgcctatgcagtatttctggatggctattgctttcatacagatcttcacagtgctcgagtgcatgcgatgcgctcttgctgggatgtacccgaatgtccctttcatatctcacacggcatttatccattctgatctgaatctgttcaggtag

SEQ ID NO: 5544 - DNA, 702 bp, Oryza sativa
  Clone ID: PAT_MRT4530_12320C.1
atgacaaatgaaactctaaggtggaagttgtttcctttttctcttagagatgaagcgaagcaatggtacactctgtctatcaagaaattccaaggtgaatgggaggagcttaagtgcaaattctgccttgctttctttccattaacccgtgtaattaatcttcgattagacatcctttctttccgacagaacgagaaggaatctctcggtgcagcttgggctagggatgatctttatgaagattatggaaacaccctgaattattccagcaatacaaaggctcatcccaagcatgagccgttcgaggaggtgatgtatgtatcttcgttcgtttcttctgaacctattgaccatcttcatgaaacggaacgaccctcatcaccctcgatcaagcctaagccttatccctctgtccctcaaaacgttgttattgtttatcatcaagaaacaaccaggttcttgcacgatgtatctcttgagaaggaggccatagacaagcttgagacatcgactctggaggacagcgatgtcccgatggtcaagcttttgaccataaacaaagcactgccgagagataccccggattatcatgagcccatgtacaaagacaagtgtgggggtgatcttgcacatcaacgccataaccaaagcaagatcaccctagaagggatgagccatgacaaaccacacaaggaaaattga

SEQ ID NO: 5545 - DNA, 1704 bp, Oryza sativa
  Clone ID: PAT_MRT4530_12321C.1
atggacatctctaggacaaatgaaggctacacgagctgcggcccggtagtcgagatgtcatggcacagggctggtgtcctgctgctaggggctcaatcctgcctacctgtcccggaggttccggccgtagacaaggagtctgccaaaaatctcgatatttccgccggaggatcgttcgcacacaaaacaaccaccgaaggaagagaactcttagatctgatcttagagaacgattctttcggccgaagtgaagctgtcccggaggtcgagattatccatgaggaatctctacatgtggagtcggaacccgactcaactgccgactcctcatcccagtcgcaggagccggaggaagaagaaattcatcctccgaaaattccattccaattcgaggaagatcttttcgaagattatgggaacacctcgaattattcctgcgagaagagatcactgaccaaggtcaattctaatgaacctctcgataaagctatgcttaaagagacgatgaagaaattgaccaccatcatgagtaatgaatggttgagggaaggggacagacagttggaaccaaccgtcaaaaccttccggatttccacaaactctactactgaaggtttagggattatctctggagtgcccacacggcacaacaacgttgaggtcatcttagatttccatgtgttcgacatctctgatttcgacatactcataggccatcccatagagaaactcttagatgtgcccgaaaccggtatcctcaacctgaaaataggaagaattgccacctccgtccctgtgtttcaatcaaccaattctttgacggagcctcttcctattcctgagccaattgaggaagtgatggccgtttctccattcgagaccccagagtctattttcgatgaatccatcgaagaattcaatgaaggggaggatgaaactagagcaacgatggatctgctaaaaacggatctgccatcccgagccccaattgagctaaagcccttaccttcaggcctacgctatgcatttctgaatggcgatgtggagtctcctgtcattataagtgacaaactctctaaggaggagacagcccgacttatcgctgttttagaaaagcatcgtgctgtttttggctattccctccaagacttaaaagacgctaagcacgcctgccggatgttccatgagattatcttcccttgttttggaactccgcggatgaaaactgtcaacgagatggggaaggcatggaagaacaaactacccgatgcactttgggcatataggactgcttataagatgcccatcggtatgtcaccataccaacttgtctacgggaagacttgtcaccttccagtagagttggaacacagggcgcactgggctatccagacatggaacaaggatttaaagggagctggacagtacaagaagatgcagccctctgagctggaagaatggagggacaaggcctaccacaatgccaagatatataaggacagaaccaaaagatggcatgataaacgaatcaatcacaaggagttcaaagcaggggacaaggtgctgctgttcaactcacgggtgaagcttttcagacatggaaaacttcgaagtaaatggatgggtccatataccgtcgtcaacgcttcatcacatggagccgtcacgctgcgcgacaacgaaggtaacatcttcaatgtctag

SEQ ID NO: 5546 - DNA, 1200 bp, Oryza sativa
  Clone ID: PAT_MRT4530_12322C.1
atgacacatgaaactcttaagtggaaattgtttcatttttctcatagagatgaagcgaagcaatggttagataaggagtctgttgaaaatctcgatatttccgctggaggatcgtttgcacataagacaactgtcgaaggaagagaactcttagatcttatcttcgagaatgattcttttggccaaagcgaagccgtcccggaggtcgagattatccatgaggaacctctgcacgtggagtcggaacccgactcaactatcgaatcctcatcccagtcgcaggagccggaggaagaagaaattcatcctccggaaattccattccaattcgaggaggatcttttcaaagattatgagaacacctcgaattattcctgcgagaagagaccaccgaccaaggtcaattctaatgaacctctcgataaagctatgcttaaagagacggtgaagaagttgaccaccatcgagctaccgataaatgactatccgcgagacgacatgctgttgaaagtcacagactctgacccatggtatgcaaccatcgtcaacttcatggtcgcggggcatatggcttactacggagatgcgttccggcagatgaaggcatgcagatcattgagaagtgtcatgctgccccatatgtgccagaagcatggagggatcactgctcgagatgcgatgccactaacatacaaccttcaagttgagctatttgatgtatggggcatcgacttcatgggacctttcctaaagtcctatgactgcgagtatatcctggtggccgttgactatgtgtccaagtgggtagaggcaatgccatgcagggccgcaaacaccaagcatgcccgccggatgttccatgagattattttccctcgttttggaactccacggatgaagactgtcaatgagattgggaaggcatggaagaacaagctacctgatgcatgggcatataggactgcttataagacgcccatcggcatgtcaccataccaccttgtctacggaaagacttttcaccttccagtacagttggaacacagggcgcactgggctatccggacttggaacatggacttaaagaaagccggacagcacagaaagatgcagctctctgagctagaggaatggagggacaaggcctaccacaatgccaagatctacaaggaaagaacaaaaagatgggatgataaatga

SEQ ID NO: 5547 - DNA, 2366 bp, Oryza sativa
  Clone ID: PAT_MRT4530_12323C.1
atgaagcaacccacaattcaaaatctttctgctcctcgggctgatctttgtgagccgtcctgttcttcaaaaccaatcctttccgatggctacgaaatcggtcctagctttatagccattgttcgagagcaaaccttctatggtggtattggtgaaaatccatacgtccatctttgggactttgagctagtgtgttcatgtttatcgatcgtaggcatgacacatgaggctctaaagtggaagttgtttcttttttctcttagagatgaagcgaagcaatggcacactctgtctgtcaagaaattccacggtgaatgggaagtgcttaagtgcaaattctgccttgctttctttccattaacccgtgtaattaatcttcgattagacatcctctctttccgacagaacgagaaggaatctctcggtgcaacctgggccaggttctcactgttaactaagtctggcccagacttgtctttacccaaccatatgttgcttcaacattttcgatacgggttagacaaggagtctgccgtaaatctcgatatttccgccagaggatcgttcgcacagaagacaaccgacgagggaagagaactcttagatctgatcttagagaacgattcttttggccgaagcggagccatctcggaggtcgagattatccatgaggatcctctgcatgtggagtcggaacccgactcaactgctgaatcctcattcgagttgctgcagccggaagaagaagaaattcatcctcaggaaattccattccgattcaggggtgatctttatgaagactatggaaacaccctgaataattccagcaccaaagaggctcatcccaagcatgaggcgtacaaggaggtgatgtttgtatcttcgttcatttcttctgaacccattgtccatcttcatgaaactgaacgaccctcatcacccttgatcaagcctaagccttgtctctctggccctcataacattgttcttgtttatcatcaagaaacaacccggttcttgcacgatgcatctcttgagaaagagaaccttcaggccacggacaagcttgagacatcgactctagaggacgagagaaagcattccacttatgagcatgaaagtttctctttcaaaatcccccaggattcatgctcacagaaggaatccccagagtcctgttcgattagtaccacttccctgtgcgaggaccacaaccaccttccggtcctcatttctaacatgtttagaaggatggttgtggatgcttatatttatcataaatactgcaaatctcgtatttgtttgtggcactaatcttgcagaacgatgtcccgttggtcaagcttgtgactataaacaaagcactaccgggagataccccggattatcatgttggcagttctacatttgcccaaaaaagagagatatcctacgtctctacagcattgtgccaacggatcacgccttcaaggcacaaggttcttgcacctgaggaaataaaaagacaatcaaggagcagtgtacaataacttcaaacacttatatcatgctccttatccatgagaaaagatatgcacagggaaccaagtagaacaaatgcaaaacttgttgcattcttacattcggttcaaatcttggtaagacctatctggtaagaatctcatacaccatgtgcatcctcatctcatgtctccatcctgccaggatacccatcatatccattgttgccataaaaaaagagaaaaaagaaaccgcctccccacgctcgtcttctctctccgtcgccggcagtcgctccagccgccgtttgccgtcgccctcctacgccgccacctccctcggctccgcaaggtcgagctctaccccgtccactgttcccctcactctctaccttattctaatgtacaaaagatacaatagagcctcttgtaattcagctcaaagttgtgtgttgtgaagtgtgaaggagagctctatttatagcctccatatgatggttacagctatgggaattgtccaaaacgccctgcaaccgtcattgggaaggcatcaacaacgtacacgtggagggccaggatgagaggaggctgtggtggttcggctgaaccctggtccccgcctcctggcctctcctttggtagggacactgactggtgggccctgatgacggttatggcagttatggcctgttccatggaggtttcacctgatttgtgggccctccaatccgtgtgctcgcgcctgattggctggaggtgtgtttctttgcatgccgggtgtgttttcttcttaaaatccctagacaaatcgaatttaccatgagagggaaagaaaataaatcctctctcaccctcatagacagccat

SEQ ID NO: 5548 - DNA, 705 bp, Oryza sativa
  Clone ID: PAT_MRT4530_12324C.1
atggtgggagagacggccggctggggggaggcggagaggcgggagatagggagagggagcggcgccgtcggaggggaggggaggggaagctccggcggcaccggtggggagagggggagggggagaggcggcgtcgggagtggggaggcggccgagcggctggggaggagggggagggggagggggagggttatggagtcaggacccccccgccccgcgcgggtcttctgcgccttcccgtcccggctcggctcccgcctcccggcccgcgcgtctcacgggggaaaaccggaaaaaccccgtgcgatcctcgcgaaaaccacgcggtggccacagggagggaggggggcggcgctggagagcatcgtgtctcccttcgtcaaccggaccggtgggggtggtggccggacaaagcggcagcaccggccggcgttggcgccgagtaggagcggcaggatagggcggccgcagcggcggctctgctcctcgtcaccttcgagcggcggcggcggctccgacaagccggtggcgatgaacatcgacggcgccgacaagctacgacgacggcggctcccctcctcacctcctcgggcgccgaatccaccgccggctctcctcctcgccgccggccggtctcagggggggaggatcgggaaggcggcggcgacgaggagaggccgcgatgacgacgccacctatgggtag

SEQ ID NO: 5549 - DNA, 1681 bp, Oryza sativa
  Clone ID: PAT_MRT4530_12325C.1
atggagcaacccgcaattcaaaacctttctgctcctcgggctgatctttgtgagccgtcctgttcttcaaaaccaatcctttctgatggctacgaaatcagtcctggccttatagccatcattcgagatcaaaccttctctggtagtgttggtgaaaacccgtacctccatcttcgggactttgagctagtgtgttcatgtctatccatcgtaggcatgacacatgaaactctaaagtggaagttgtttcctttttctcttagagatgaagcgaaacaatggtacactttgtctgtcaagaaattccacggtaaatgggaggagcttaagtgtagattctgccttgctttctttccattaacccgtgtaatcaatcttcgattagacatcctttcgttctgacagaacgagaaggaatctctcggtgcagcttgggccaggttttcactgttaactcagtctggcccagacttgtctctacccgatcatgtgttgttacaacattttcgatacgggttagataaggagtctgccgcaaatctcgatatttcccccggaggatcgttcgcacacaagacaactgccgaaggaagagaactcttagatttgatcttagagaacgattctttcggccaaagcgaagccatcccggagatcgagattatccatgaggatcctctgcacatggagtcgaaacccgactcaactgtcgaatcctcattccagtcgctggagccggaggaagaagaaattcattccccggaaattccattccaattcaggggtgatctttatgaaaattatgagaataccctgaattattccagcgaaaagaaggctcatcccaagaatgagccgttcgaggaggtgatgtttgtatcttcgttcgtttcttctggacctatttcccatcttcatgaaactgaacgactctcatcaccctcgatcaagcctaagccttgtccctctggccctcagaacgtttttcttgtttatcaccaagaaacaacccgattcttgcacgatgcatcagttgtgaaggagaaccttcaggccacggacaagcttgagacatcgactctggaggacgagagaaaacattccacatatgagcatgaaagtttttattttgaaattccccttaattcatgctcgcttaagaaatccccagagtcctgtttgattagtaccacttccctgtttgaggaccacaaccacctttcggttctcatttctaacatgtttagaaggatggttgtggatgcttatatttatcataatactgcaaatctcgtacttgtttgtggcactaatcttgcagagcgatgttccgatggtcaagcttttgaccataaacaaagcactgtcaggagataccctggattatcatgttggcacttgcatatttgcccagaaatagatgcatcctacgtctctgtgccaacgaatcacgccttcaaggcataaggttcttgcacccgaggaaataaaatgacaatcaaggagcagtgtacaataacttcaaacacttatatcacgctcctttgtattattactaatcattaccactagtgttggtgcaatatgtgtatgcaggtcatttgaggtgaaaacacatccgtcatacgacaaaatgcacctctgttcattcaaaacacgtttacacggattagaggcccca

SEQ ID NO: 5550 - DNA, 279 bp, Oryza sativa
  Clone ID: PAT_MRT4530_12326C.1
cccacgcgtccgctttgaggaagaatttggcttcgagatcccagataacgaggcagagaagattgactccatcaaaacggcagttgacttcgttgcctctcatcctcaagcaaaataaggatcttgaaaattctcagttactgattccattagatcttttttttttttttgttgcacgaaccaatctgtgtcaacagaggaccagatttcttgtgttttatctgcatacctttattctgaggttatgcttcttacacaacttgaataggaaatcagttt

SEQ ID NO: 5551 - DNA, 1417 bp, Oryza sativa
  Clone ID: PAT_MRT4530_12327C.1
ctatccacttgtctggggatgatatggagtggcaatgttgtgctgagccccaagttcttgcaaaaattttcggaaggtcttatcgatgaaatgagaccctccgtcacttatcgccatccgcggagttccaaaacgagggaagataatctcatggaacatccggcgggcgtgcttggcgtctacggccctgcatggcattgcctctacccacttggacacatagtcaacggccactaggctatactcgcaggcataggactttgggaaaggtcccatgaagtcgattccccatacatcaaatagctcgacttgaagattgtttgtcagtggcattgcatcgcgagcagggatccctccatgcttctggcaacttgtacatatccgaacaaattcctttgtgtcatcatacattgatggccaaaagaatccactctgccagatctttgcgtgtgcctgaatgctccatagtgacctccatatggggcagcatgacacttctcaatgatcatgatgccttcgtctgtcgaaacgcatattcgcagtagaccatctgagcagactctgaaaaggtaaggtgcatcccacaagtgcctgcggctctcgtagatcaacctcttcttattttctaccggtggtacatgacccgtggccatgaagttgacgatggttgcataccacgggtcagagtctatgactttcaaccgcatgtcgtcccgtagatagtcatttatcagtagcttctgcatgttagtgatttgcatacgcgacaaatgatctgcaacataattctctactccctttttatccataatttcaatgtcaaattcttggagtagaagaatccacctaattacccgaggttttgcatcttttttagtaagcaggtattttagtgcagcatgatcagtgtaaacaactaccttagcccccactaaataagacctaaatttctcaatggcaaacactacggctaggagctctttctcagttgtggcataattaagctgagctcccgtcaacgttttactagcatatgtgatagcatggtgttttctatccttagtttgcccaagaacagctcccacagcaaaatcactagcatcacacatgatttcaaacagcagcgaccaatcagagggttggatgattggtgctgagatgagtgattccttaaggattttaaaggatttcatacactcatcatcaaagtcaaccggaacatcattagctagcaaggcagttaggggtctagcgattttggagaaatcctttatgaagcgcctgtagaaccccgcatgacccaagaagctacggacacccatgtcattgacaggaggtggaagttgtcgaattacttcaatttttgctctgtccacctcaactcccctttcggagatttgatgtcccaggactattc

SEQ ID NO: 5552 - DNA, 1546 bp, Oryza sativa
  Clone ID: PAT_MRT4530_12328C.1
atggaggaacccacaattcaaaacctttctgcttctcgggctgatctttgtgagccatcctgttcttcacaaccaatcctttccgatggctacgaaatcggtcctggctttatagccatgattcgagagcaaaccttctctggtggtattggtgaaaatccataccgccatcttcgggactttgagctagtgtgttcatgtttatccatcgtaggcatgacacatgaaactataaagtggaagttgtttcctttttctcttagagatggagcgaagcaatggtacactatgtctgtcaagaaattccacggtgaatgggaggagctcaagtgcaaattctgccttgctttctttccattaacccgtgtaattaatctttgattagacatcctctctttccgatagaatgagaaggaatctctcggtgcagcctgggccagattctcattgttaactcagtctggcccagacttgtctttacccgaccatgtgttgttacgacattttcggtatgggttagacaaggagtttgctgaaaatcttgatatttccgccggaggatcgttcgcacacaagacaaccgtcgaaggaagagaactcttagatctgatcttagagaatgattctttcggccaaagcgaagccatcccagagatcgagattatccatgaggaacctctgcacgtggagttggaacccgactcaactgccgaatcctcattccaattgctgaagcctgaagaagaagaaattcatccttcggaaattccattccaattcagggatgatctttatgaagattatggaaacaccctgaatcatttcagcaaaacgaaggctcatcccaagcatgaaccgttcgaggaggtgatttttgtatcttcgttcgtttcttctgaacctatttcccatcatcatgaaactgaacgaccctcatcaccctcgatcaagcctaagccttgtccctctggtcctcagaacgttgtttttgtttatcatcaagaaacaacccgattcttgcatgatgtatctcttgagaaggaaaaccttcaggctacggacaagcttgagacatcgactctggaggacgagagaaagcattccgcaaatgagcatgaaagtttttccttcaaaattccccaggattcatgctcacataagaaatacccagagtcctgttcgattagtaccacttccctatgtgaggaccacaaccacctttcggtcatcatttctaacatgtatagaggtgttgttgtagacgcttatatttatcataaatactgcaaatctcgtatttgtttgtggcactaatcttgcagagcaatgtccctaaggtcgagcttgtgacaataaacaaagcactgctaggagataccccggattatcatgttgacacttgcacatttgctcgaaaagagatgcatcctacgtattgtgccaacggatcacgccttcaaggcacaaggatcttgcacctgaggaaataaaaagacaatcaaggagcagtgtacaataacttcaaacacttatatcatgctccttg

SEQ ID NO: 5553 - DNA, 2861 bp, Oryza sativa
  Clone ID: PAT_MRT4530_12329C.1
tcacttggacacaaatgacacaccagcgctgccaccgatccccgccgttggaaaccctcccgtcgataggtcgccgccgacgccgatctctcccgccaccgtcgcccaccgtctccctactccgcaggtctccgacgcgccgcagacggatttccacgccgaccggtcaccaccgacgccgtcttctccctgcaccgttgtggcagcaggacctccactgtgcgtccgccgtggcagcagccaattcctctggacgctcttcttctggcccgccgtcccgaccagctcaggcatgtatacaacagcccagacctgctcacggagcccgccgtcgggaaaggccacgtctcggcgtaagacacaggggtgtaggtcgtgcgatggtggcatggcggccggggaccggttcccgaccctatgcggcgtcttcccggatgtcttcaggcgtcggcgcctacgagcttgtaacggggcgtgtccaatcgtcgtcggcgcggtgggctccttcctgaggctctgctccatcgtgtactgcctcctcattggcttctcgtcccctgccttgaactccttgtgcttgatccgcttatcatgccatcttttggttatatctttatagatcttggcattattgtggtaggccttgtccctccattccttcagctcagagagctgggcgagccgagccaatcgatctgacagtgcgtcgtcgctatccttatccttatccacgcagaccacgcgctctcctccagacctccaccgcgccttcccctcgccccctctgttcttctgccgcgccctcccgctctccctctcctccgccgcgccctccccctcgcccccctcctccgccgcgccctcaccctccccctcccctctagccccctcccgcctctcctcctcctccgatccaccatcctctcctccccctccccctccgcctccctctcccagccggcaagcaacgtcggccgcaacgggcggcctccccaccggtagcgacctcagcacggagagggatgggtgtggcgaccttggcacggagagggacccggcggttatcaccatccgcggagttccaaaacaagggaagataatctcatggaacatccggcaggcgtgcttggcctctgtggccctgcatggcattccttctacccacttcgacacatagtcaacggccatcaggatatactcgcagtcataggactttgggaaaggtccaatgaagtcgatgccccatacatcaaatagcttgacttgcaggttgtatgtcagtggcatcgtatcccaagcagtgatccctccatgcttctggtaccttgtgcatcttcgaacgaattcctttgtgtcatcacacattgttggccaaaagaatccattctgccagatctttgcgtgtgtcctgaatgctccatagtgacctccatatggggtagcatgacacacttctcaatgatcttcatgccttcatctactggaacgcatctccgtagtagaccgtctgaacagactttgtaaaggtaaggtgcatcccacaagtgcctgcggctcttgtagatcaacctcttcttattctctcccggtggcacatgccccgcgaccatggagttgatgatgattgcataccacgggtcagaatctgtgactttcaacagcatgtcatctcacagatagtcatttatcggtagctcctgcatgttagtgatttgcatacgcgacaaatgatctgcaacaaaattctctaccccttttcatccttaatttgtatgtcaaattcttggagtagaagaatccacctaattagccgaggttttgcatctttttagtgagtaggtattttagtgcaacatggttagtacaaactattaccttagctcccactaaatatgacctaaatttatcaatggcaaacactatggctaggagctctttttccgttgtggcataattaagctgagctctagtaaaaattttactagcatatgtgatagcaaggtgctttttatccttagtttgcccaagaacagcgctgacagcaaaatcactagcatcacacatgatttcaatcggcagcaaccaatcagggggttggatgattggtgctgagatgagtgattttaaaggattttagacactcatcatcaaagtcaaacggggcatccttagctagcaaggtagttaggggtctagtgattttagagaaatcttttatgaaacgcctatagaaccccgcaagactcaagaagctatggactcccttgacattggcaggaggtggtaactatcgaattactacgatttttgctctgtccacctgaactccccttacggagatttgatatcctagtactattccttcacgaaccatgaagtgtcactttttccaattaagtaccaagtcgttttcctgacatctttgcaagaccctatctaagttctccagacaatgatcgaaagttttatcatagtaaaatcgtcgatcatgtcaaagaaaatagacaacatgcatctttgaaatgacgctggtgcactacacaacccaaacgacattcttcggtatgcatacattctgtatgggcacgtgaacgtgatcttactttgatcatcgggatggatggggatttggtgataaccagaatacccatcaaggaaacaaaagaaggaatggttcgctagccgctcaagcattacatcaattaaaggcagcgggaagtgatctttcttagtagccttgttgagtttcctatagtcaatacacatcctccatcacgtgacggtttgttgtgggcaactcgttgttcgagttttcaagaccatcatgcctcccttcttaggcactacttggacagggctaa

SEQ ID NO: 5554 - DNA, 296 bp, Oryza sativa
  Clone ID: PAT_MRT4530_1232C.1
gaaagaaaatcaattttacttgtccccgcatcagttcttttaccaatcgaggtagagaggaacaattgcattgcacaattcttactcctatcctaagtacacgagcaaaccataactatttacatccttgatctttctgggcactcgagtggcagctgccggcgatcaaatcgtgcggcttgctggcccggccgcctgtggcgggcaactggcagatcacgcgcgaatgcgggtccggagctgacgtctactgggctgccgccgacgcccgttggcctctgctgcgcctgcgcctc

SEQ ID NO: 5555 - DNA, 1195 bp, Oryza sativa
  Clone ID: PAT_MRT4530_12330C.1
atggagcaacccacaattcaaaacctttctgctcctcgggctgatctttgtgagccgtcctgttcttcaaaaccaatcctttctgatggctacgaaatcagtcctggctttatagccatgattcgagagcaaaccttctctggtagtatcggtgaaaacccatacctctatcttcgggatcttgagctagtgtgtttgtgcctatccatcgtaggcatgacacatgaaactctaaagtggaagttgtttcctttttctcttagagataaagcgaagcaatggtacactatgtctgtcaagaaattccacggtgaatgggaggagcttaagtgcaatttctgccttactttctttccattaacccgtgtaatcaatcttcgattagacatcctttctttccgacagaatgagaaggaatctctcggtgcagcctgggccaggttctcattgttaactcagtctggcccaaacttgtgtttacccgaccatgtgttgttacaacattttcgatacgggttagacaaggagtctgctacaaatctcgatattttcgctggaggatcgttcgcacacaagacaactgccgaaggaaaagaactcttagatctgatcttagagaacgattctttcggccaaagcgaagcatgcccggagatcgagattatccatgagtatcctctgcacgtggagtcggaacccgactcaactgtcgaatcctcattccagtcgctggagccggaggaagaagaaattcatcctccgaaaattccattccaattcaggggtgatctttatgaaaattatgagaacaccctgaattattccagcgaaaagaaggctcatcccaagcatgagccgttcgagaaggtgatgtttgtatcttcgttcgtttcttctgaatctatttcccatcttcatgaaactgaacgtccctcatcaccctcgatcaagcctaagccttgtccctctggccctcataatgatgttctcgtttatcatcatgaaacaacccaattcttgcacgatgtatctcttgagaaggaaaacccttaggccacggacaagcttgagacattgactcaacaaagtcttcatactcggctaactcctggagatactcctcggcggttgggacgatgtcttcatcttcatacaccatgaaaatcgcatgccacctagttgggctaagatccat

SEQ ID NO: 5556 - DNA, 400 bp, Oryza sativa
  Clone ID: PAT_MRT4530_12331C.1
aaaacggggcatgcaaccccccaaaaaaaaaccaggggggggggggggtttaaccttgggttatccattagggacggtggaccaaaagggggaaacttcttggggagagggcggcccaattttggggcatttttacagcataacaggataggaaggagtccctttaaactaccaccaacacattttttatccttaaagggcccaccccatttttttttaaggggaaaacaaaaggtttaatcctttgggggggctaactacagaggggctaggccggggccctgatttgagggatatgatggggggaaaacagccagttttgtttaagaagaccacatccccaaaatgggaacagggcctccaggggggggtcttcccttgccggccataaaaatgttgg

SEQ ID NO: 5557 - DNA, 799 bp, Oryza sativa
  Clone ID: PAT_MRT4530_12332C.1
atggacggtggcccagtgggggatggagaatttggcgagagaggcgaaaaagatggagcaccaacaggtgattgtacaatagatgcacctcctgattggagaaaagaagcaggagaggatggaggtgcgacaaaggggaataccgggggtggcggatggattggaatttctggcataggtgcatctgtcctcggaggtaaaggttctgggacaagaacagcatggctgatgcgtcggccatttttctgtgatccaaagcagaagtacacactcaaccaatcagcccattttcttcgcggctctgcctgaggttgcgtgcggctctcggctgtaacaatggcaacagcagccgcgttcaccgtgtcgacactgttgtgcacgggtctcatctcgctcccactctgcatctcgcagaggagctatcccacgaccacgagcaaacgattgttcccactccagagattgaatcgagcctccgagatccaaacttttatacccaaagaagaagcatgactccgtctgcttaatcgatggagcgctccaaccaacgagtcaaatcaacctccaattcgattcgatccgaggcggggccgtacgtggctctccccaaaccagttcgtcgccggcggcggccgagctttactcgcagaccaagaagaggaagcaccggacgggatcgggaaggagaggattcctccgccgcgcctcctcgccggcgacgacctcccgctctcgctgcagatcggagcaaaccaaagcggaggagaggagaggagagtgctggagagtagcctcgtgc

SEQ ID NO: 5558 - DNA, 368 bp, Oryza sativa
  Clone ID: PAT_MRT4530_12333C.1
tttttaagcgggtgccgcaggactggaggaagcgcctcgccggcatccgtgcccgccttgacgtcgacttcggcttccttccttgggagcttgacccctgcctccttgcctttgagccggacgaaactgggcatcttgaagcaaagaaaatatacggcatgctgttggaatcacaacccggagagtatggaacatatttggccccctgactggctcagcgggtgaacgtcaggccattgttaaagcttatgagaaggaccatgttattctcggggaggcagctcatatcatggttcagaatgctgactatgacagggcctgatcagaggaagcagatgcaaaagacttaacaacaggctccagagctg

SEQ ID NO: 5559 - DNA, 336 bp, Oryza sativa
  Clone ID: PAT_MRT4530_12334C.1
atgggcggagcggtgacaggcggagcggtggcaggcgtgctcaccggccgaggtcgccgcccgcctcgctccctcgttctcgacatgaactcgagggggatcaacgtcgaggcagcggaagaggggcggagcaagcgtccgtgggtagtggtcggcgaggacgggcgggtaggatgctctccctcgtcctcgcggcggagcggcggcggcggcaggccgcgggcagagtggaagggcggacgcgaccacgccaaggacgctgtgcgcaccttcgacgcgagaggagcggcgattattgctagtcaagcagcagcatatttcagcaccgaattttaa

SEQ ID NO: 5560 - DNA, 403 bp, Oryza sativa
  Clone ID: PAT_MRT4530_12335C.1
tcggagccctcttgtcttgttaagcaagaggggggctggtctgttcaaaaaggcggcggagctggctctgcttttcttcttttatatgtagcttctggtaatgtcatttcactgttaactctacaagttcttttcctccagcatggaacgctccattgatcggtattaggatcatctatggagccaggaaagttcctaacaattttatgtcattcagcaacaatgatgaaaattcctttttatactgcaggcttaaggacattacgggttagtatctgcagaacactttttactacgtcgtgtgctcttcagttaaataaactcattaaacttgtgccaattgctgtgtggtaaacgtcatccaggaatatgtggctttaacataatggtgaacggagttcga

SEQ ID NO: 5561 - DNA, 696 bp, Oryza sativa
  Clone ID: PAT_MRT4530_12336C.1
atgttggtgtggtggccacaacatggtagcgaggtgttggtgtcgctgctgtggccaccaggaaaggagaggatgacacctccaccacctccacctcgacgacgccgctgccgagcccgcccgacctccaccgccgccgcctcgccaccgccgctgcagagccccgctgcagcctccaccgcggcccgcgcaccagatttgagagagggagagggggtggtggcggcgagcaaaggggatgagggaggagcggaggagaaagaccagcggtggatccgggcagcatggtcaacggcgtcgaggtcagagaggagggagcctggcagcacagtcgacgatgttgaggttggtgccaccctccccgtggtccggcggcggcggatccgccctccccgcggctcggcggcggcggatccggcctccctgcccgcgcccgagagccgcggctcgtggctctccagcagccggatccgccgcctgcggccctctggcgacaggatccgccgccctcctggcccctcccggtcgccgtcgtcaccgtcgctagtccgccgtggtttccaacgccgagaggaggaggaggaggaggaggaggagaaggaatggagaggtccaaagaaattgccttcgggttttgagcgtgccagctggtttgatcctgcaaccaacaagatagaaaaaaggacgaagagttaa

SEQ ID NO: 5562 - DNA, 372 bp, Oryza sativa
  Clone ID: PAT_MRT4530_12337C.1
gacgccccgccgctcttcaacccgccgccgccccacgacggcgccggccgggcttgacctctcgttcctctcccccacaatcacttcaccggatcaaacgagaacacggcgtcctgtcctcgatttgcttcgggttgcaatgtcgtgatttggtgagaagcgagatcgatcgttgtttcggttcggttcccctctcatcttctgtttccttcaattgagttcgttcgttactgtacaaaaaagaacatagatttgtttaattcgttctctgtcatcgaattgtcgccgtgaattcgtcgatcgtgtcgtgccacagttttgtcccgattgaagcaaacacgtttgaagttttttgatcaaaaaaaaaaaaaa

SEQ ID NO: 5563 - DNA, 297 bp, Oryza sativa
  Clone ID: PAT_MRT4530_12338C.1
atgacgatggcggcgaggcacagttcctcgcaggcaaaggagagacgagaggggaagaggagaggagtgttcgcctcgtcgctttctccgcgtccgcctcgaagtccgcgctcggcgacaacggcgaagcgaggggggagaaggaggtggaggcgctcggagacggcgacggcggcggaggcggcggcgacgacggcggaggcgcgagacgatgcggacgacgatggcgacggcgcgaagcagaggtggcggcgcgaggggaaagcggagacggcggcggttagggttttgggctag

SEQ ID NO: 5564 - DNA, 635 bp, Oryza sativa
  unsure (1)..(635): unsure at all n locations
  Clone ID: PAT_MRT4530_12339C.1
tgcattgtcaaagtggtccgtagctgggcctcgaggatctctagagcggcgtcgcgatctaaacctcattcccccggtcgccgtctcccctctgacgcgtggggcccacctgccatccactccgccgccgccgccgccgccgccgctcccggtcgccggccggcaggggctcgaggggggctctgcccgttgctcctcctccgcctcggcgccgccgccgccgctccggtcctgtaggcgcgctgatccgaggttgggagcccagtctcaggacgaggcctagggtttcgtacaccccctcggctgctcggcggtgaggaggggggccgcggcgtcgctggagatccgatctccccgggctcggcggtgaagggggggcgcggcgcggaggttggctgcgctcgatttgggcggtacccccggaattcgagctccctataggcgaggaggacgaggaggaggaggaggagctattgcgtcagcctgctcacaacggacaagagatgggctgccctgcaggaaatctggcatgaccgttcttggaaaaattccaaactattatttgcccagtcagangttggaaaatcatggtcttgacccatgtngaattgttccaggcccctttatggggtnac

SEQ ID NO: 5565 - DNA, 616 bp, Oryza sativa
  Clone ID: PAT_MRT4530_1233C.1
atgcggaaattcaaacatgcaattgtaaagggaaatatgcaatgtgatacaaattacttcaatggagggaaagacgtctcccccaagcttgcctttcgctcagggtccttggtaaggattgaacccctggaagcagaagtacgcttggagaacagcgtgttgttgctgcatcagattgttgatgttggtgaactgagcatcagcattttgctgccattcttgcatctgggctatgtgttcctcgaggttgtgatggatctctctcgtccgtatgtcaagggtatccaacctcctcgtgatttcacccaggtcccgagaggaaattgagcgccactagttggagaatggaggcataccacttgagctggaggaacgggcgttcatattcccccattgtatgtacgtgatgaggcacctgtcaccggttctcactggcactctgcgaggttgaacctccgatgctgtggcgtggggcttgggtccatccgggtgcatccccagttggttccaagcccgcacgagtgtcgagaaccaacgcctcatgtcgctccccctcccccctctctctctctctctctctggctctctcccccgtagcgcaagccccacccaatca

SEQ ID NO: 5566 - DNA, 197 bp, Oryza sativa
  Clone ID: PAT_MRT4530_12340C.1
gaaaataaatctgagatgttcatctaaagggatctagtagttttacatctagtaccatatacgtgtccatgaaagccaatttagttacatgtagctactacgacattggcatatattattcatggtacaacgtataatagggaatttcacacaactacttagcaacaccattgtatatagtactataagttttatga

SEQ ID NO: 5567 - DNA, 647 bp, Oryza sativa
  unsure (1)..(647): unsure at all n locations
  Clone ID: PAT_MRT4530_12341C.1
ccggccggtatccggccgggactcacctctcaattgacaagtgtgaccatacactgactaccgccatcatgcctactcacgtccactccatcgcgtcgcaagacgtccactcccaaatccgacaactcatccacgaactcgtcaacatcaaagacacaaccggcgaattcctcatgaccctcgccgacggccagatcatcgacacaaaaggctggaacgactgggaatggacccacggcatcggtctctacggcatctggaagtactacgagatgaccggcgaagccaaatacctccagatcatcgaggactggttcagcgcccgcttcaaagaaggccacaagggcaaaaacataaacaccatggctgtatttttgacattggcgtttgtctacgaaaagacgaaaaaccctacgtatcttccttggttggatgcttgggcggagtgggctatgcatgatcttcctcgcactaaatacggtggctttcagcatatcacttacctcgacgtcaacgagcaacagctttgggacgacaccctcatgatgacagtcatgcccctcgcaaaaaacggnttagttctcaacagaccgcactacgtcgccgaagcaaagagcagttcctgctccacgtccagtacctcttcg

SEQ ID NO: 5568 - DNA, 446 bp, Oryza sativa
  Clone ID: PAT_MRT4530_12342C.1
ctatagccagaaggacccaaattatgtggatgcgtaatcagtacagggacgtgcacaaaccaagcgtgcaagtttgaggacctatagtttaatacacgcagataaaaaagaacaacttttttactacagctacctattaagaaaggtagagattcaaaagaacagcgaaacagtcaatctaattcttacaaacgcacagcctccacttaagccatctgcactgttagctagagaacgaagaatagttcatcggggatggtaaaaaattttgccacagaaatatcttgggggaatgttgctactcgtctgtttgctgcactgacaagtcgctcaagtgtgcgcctagatcatcgacggctatctggctcaatgtcttggctgttccactggggggggtaaattgggactgctgaggattgggcttgaagaggtggttgggatccttg

SEQ ID NO: 5569 - DNA, 1008 bp, Oryza sativa
  Clone ID: PAT_MRT4530_12343C.1
atggcctacgcgcgcggcgggaaggaggaatcgtggaacttcgtcttcgccggcgccgccacgagcggcttccttcgcctgcgccagggagcggtcaccgccggccgcgacgcgctctggagcgccgccttcttcgcgctcgcggagggcgcctccctcgcgatccaccgcgccctagacgacctcccgccggcggacggtcgtcgcggcctcgccgcgcgcgcaccggtgggccgtccacgccgcctccccgcctccccgggattcccgggtcagctcatcgtggttaaggaggtcgctgtcgccgacaacgaagacgactccggcttttccgacggcttcttcgctgaagagcgtcacgcaagccaagcacagctcagcctcctccgtgctccgatcatggcgtcgccgtccccgccgcgaccggacgagcgcgacacggacttgccgttgccgagccctccgcggaagccgtacccgggcttcatactcgacgacgcgggcggcggcttcctgatcggcggcggggtcggctccgcctaccacgccgccaggggcctcctcggctcgtcgagcggccaccgcctcgccggcgcggcgcgcgccgtccgcgccaacgcgccccgcatcagcgccacgtgggccgcgcgctgcggcctctacggcgccttcaagtgcgccctgtccctgccgcgcgcgacggacggcgaccccgtggtctccgtgctcgccgcgggcgccgcgggggccgcgcactgcctgcgccgggggcccctcgccgtcggccgcggcgcgctcgtcggcgccgcgtccatggccgtcatcgagagggccgacgccgcgctggacaacttgcgctcctgggtccactaccacaggcggcttgtccccgaggaggacatcgatggcggcggcggcagcgaccccaaacccgacgacgagccgccgattgggttcctgggggtgccgccgaagcccgtcgtggtggaggaggtgcctgccggatga

SEQ ID NO: 5570 - DNA, 525 bp, Oryza sativa
  Clone ID: PAT_MRT4530_12344C.1
atggctccccctctccaagtcgcgaccaccgcgagctcctccacccgcgaggggaaggcaccagctctcaatgagaggatactctcatccatgtcaagagatctgttgcagcacacccatggcatgaccttgagattggtcatcgaaataccgagaggcagcaaggtcaagtatgaacttgataagaaaaccgggctcgtaaaagtagaccgagttctctactcttcagtcgtctatcctcacaactatgggttcattcctcgcacgctgtgcgacgatagtgatcctttggatgtgctggtcataatgcaggagccagttatcccaggatgcttcctacgggcaaaggccatcggtgtcatgccaatgatcgatcagggagaggcagatgataagattattgcagtctgtgctgatgatcctgagtacaagcattacaacgatatcaaggacctcccacctcaccgcttagctgaaatcaggcgtttcttcgaggactgtatccttttaatttattgctcttaa

SEQ ID NO: 5571 - DNA, 1949 bp, Oryza sativa
  Clone ID: PAT_MRT4530_12345C.1
cccacgcgtctgtttaactctaatccacccacacaccacactggccggcactcacgctcgtctagaatagcacccccatagtggaggatcatcacgaccaccttacctcctgctacgcccattgctacgtctcgcgccggatcgatccaggtgccgtcgcgttccgatcccctctgctctggcttgctgatcgatcgatcgatggatgaagcccgccggtgggaggagcaaggacggcggcggcggcggggcggcattgctcggcggcggcggcgtgcacctgcttcgacgtcaagtccttcgtcgcctccctcgcgctcctcaccctcatcatggcgctctggcagctccacccctaccagcccctcgtcctcctccccgccgccctctcctcctccccatgccccctcctcccccgctcacccacctctggtattgccgtttccttcctctccaccgccgctgccaccaactcgactgacaccgccacggtcccaaccaccaccgccgccgcgagggtggcggcgacgacgaggccgaccctgcccgcgcggcagcgggagcgggacccaaacaagcgggagctccgtccgtacggcacggcggcggcgctgttcgtccagatgggcgcgtaccggggcggcccgcgcacgttcgccgtcgtcgggctggcatccaagccagcgcacgtcttcagcaacccttacttcaagtgcgagtggctgcccaacgctcccgccggcgcgccgccggtccggaccaaggcctacaagatgctcccggactggggctacggccgcgtctacaccgtcgtcgtcgtcaactgcaccttcccctccaaccccaacgccgacaacctcggcggtaagctcctcgtccacgcctactactccaccgcctcccgccgctacgagcgcttcgtcgccctcgaggaggcaccgggctcctacgacgacgcccgattccggccacccttcgcttacgactacctctactgcggctcatccctctacggcaacctaagctccgcccgcatgcgggagtggctcgcctaccacgcccgcttcttcgggccgaggtcccacttcgtcctccacgacgccggcggcgtgacaccggaggtgagggcggtgctggatccgtgggtcagcgccggccgcgtcaccgtccaggacatcagggcgcaggaggattacgatggctactactacaaccagttcctcgtcgtcaacgactgcctccaccgctaccggcacgccgcgaactggaccttcttcttcgacgtcgacgagtacatctacctccccgacggccgcgcgctggaggacgtgctcgcccagctccagccctacacgcagttcaccatcgagcagaaccccatgtccagcaagctctgcatcgatgatccgaccgaggactactcgaggtccaattgtttatgccatgctatttcagtgggaatccaactagattcgcgcaatagatttacaatactgcaattggcatatgaaatttgttctttccttgagggcttggtattctttgtagagataattccattcttgctgtatagttttacaaccgctcaagcaaggcatcacagggaatggggctttgagaaacttgtcttccgcaattcaattaccggagtgaggcgtgatcggaaatatgcaatccaagcacggaatgcatactccactggtgtgcacatgtcgcaaaatgtgtatgggaggacaactcacaagacagaaagcttgataagatactaccactatcataattctatcaatgtcatgggggagccctgccggaaattcgtgccgaaacccgccaatggcagtaaggtaatgttcgaggggataccctacgtctacgatgataacatgaagcgcttggcaggggagatcagacgctttgagaagcagacgattggggatgtccatacatag

SEQ ID NO: 5572 - DNA, 481 bp, Oryza sativa
  Clone ID: PAT_MRT4530_12346C.1
gcctggctccttcagataccaacctcaccaatccatcatcttcttcttcatcgctgtgcagctacacactctcactgtgtggagacgagacagagagagagatcacgtagcagcataagaggaggagaggagaggacagcggcaatggtgtagagcagctagaagaagaagaacgccggtgtgtagtaggccatggcggcaaccttctacggcgtcggcagcattgcactcgccatgcacgaggacgatgaggaggaagggtctgggagggtctttgggttcgccgccggcgatcttgtccggccggcggtcgtcacccagcagttgttcccgatgacggcggcggcgggggggggggaatgttcacgtgaggagcagcgccacgttgccgccgccgccgagcagtgggcccggccgccatcgaggaagacgcggcggggtccccggtccaggagctcgcagtatcgcggtgtcaccttct

SEQ ID NO: 5573 - DNA, 603 bp, Oryza sativa
  Clone ID: PAT_MRT4530_12347C.1
atgaaaacggctttgtccaagctctcatcgtcgacttcgtcctccacactgcgtcacgagccggtcgccgtcttcttctcccagatggaggccgctgactgcccccaccgcctccgcccacctactttagtcgcggccctggagactggggtgcccgtcttcgccatggtcgacctcgtcgtcgtccttcccctttgttgtgtcggccagcccctgcctcgcctgcgccgatctgaaggactccacttggacccttggagcacgtctgccacgccaccccctccaccgccgcgccatcctccacatccacacaacatctatcgacctcctctaccaccggcattcccggggattgtctggagtgcagggcctcactcccggcggccaatctctatgccgttgtggacggactcgtctccacctcctccgccagcgtgtgccacagacacaccactcctctccgccgccggcaccttctcccgaacgctgtccgacgggtggcctcgccgtggctgctcggcacctctgccatcactcgctgctgaggaagaagagaatagagaaagagaggagactgacgagtggaccccaaattttgcctaa

SEQ ID NO: 5574 - DNA, 864 bp, Oryza sativa
  Clone ID: PAT_MRT4530_12348C.1
atgaggaaccctctgcacgtggagtcggaacccgactcaactatcgaatcctcatcccagtcgcaggagccggaggaagaagaaattcatcctccggaaattccattccaattcgaggaggatcttttcaaagattatgagaacacctcgaattattcctgcgagaagagaccaccgaccaaggtcaattctaatgaacctctcgataaagctatgcttaaagagacggtgaagaagttgaccaccatcgtgagtaatgaatgtttaagggaaggagagctctcatctgaatcgattcagatacgatgccactcctcaaccattacgtgtctcattggaggtaatttggtccgtgttctgtataatccctctgttggtgccaatattatgtcagcaacctttgcatttgattgcttaggggacaaaccgttggaaccaaccgtcaaaaccttccgaatttccacaaactctactaccgaaggtttagggattatctctggagtgcccacacggcacaacagcgttgaggtcatcttagattttcatgtgttcgatatatctgatttcgacatactcataggccatcccatagagaaactcttagatatgcccgaatccggtgtcctcaacctgaacataggaagaatcgccacctctgtccttgtgttgcaatcaatcaattcattgacggagcctcttcctattcctgaaccaattgagaaggtgatggccatttctccattcgaggccccagagtctatttcaatgaatccatcgaagaattcaatgaaggggaggatgaatctggagaaacgattgaactgccaaaaatggatcagccgtcacgtgccccaattgagctaa

SEQ ID NO: 5575 - DNA, 1377 bp, Oryza sativa
  Clone ID: PAT_MRT4530_12349C.1
atggtggtgggcaccgtgagctgctgtcagagagggagttggcggcgacgcgccgctgccctcgccctcactgtcgtcgtcttcgccgcggacactcagcgtcttcgccgcgaaaaccgactaccggcatggacattcaacgcctccaccctgctcctcagcaacaagaaggaatctctcggtgtagcctgggccaggttctcactgttaactcagtctggcctagacttgtctttacccgaccatatgttgttacaacattttcgatacgggttagacaaagagtctgttgaatatctcaatatttccgccagaggatcattcgcacataagacaaccgccgaaggaaatgaactcttggatatgatcttagagaatgattctttcagccaaagcgaagccatcccggaggtcgagattatccatgaggatcctctgcacgtggagtcggaacccgactctactgctaaatcctcatcccaatcgcaggagccggaggaagaagaaattcatcctctggaaattccattccaattcgaagaagatcttttcgaagattatgggaacacctcgaattattcctgtgagaagagaccaccgatcaaggtcatctctaatgaacctctcgataaagctatgcttaaagagatggtgaagaagttgaccaccatcatgagtaacgaatggttgagggaaggagagctctcctctgaagcaattcagatccgatgcctggagggaatttggtccatgccctctacctttgcatttgattgcttaggggacagactgttgaaaccaacggtcaaaaccttccaaatctccacaaattctactactgaaggtttagggattatctctggagtgcccacacggcacaataacgttgaggaagaatcgccacctctgtccctgtgttgcacggagcctcttcctattcctaagccaagtgaggcagtgatggcaatttctccattcgagcccccagagtctattttcgatgaatccattgaagaattcaatgaaagggaggatgaatctggagaaacgattgatctaccaaaaatggatcagccatcacgagccccaattgagctaaagcccttaccttcaggcctacgctatgcctttctgaatggtgatgcggagtctccagtcattataagtgacgaactctctgagagggagacgacccgacttatcgccgttttagaaaaacattgtgctgcttttggctattccctccaagatttaaaaggcatcagtccgaccctttgcacccatcgcattcccttagatccatcttgcacaccatctagggaacctcagaggaggctaaacaatgcgatgaggaggtcgtcaaaaaggaagtcttga

SEQ ID NO: 5576 - DNA, 667 bp, Oryza sativa
  Clone ID: PAT_MRT4530_1234C.1
aaaaaaaagtttgtcggctacttcagattgcatgattctgttgctagcaaaatgtccactgctgccacacattcataaggttacaatttacaggccatacaaagttcagggatctacatcataacacagtgtaatgggaaaaaaacatgatcatccttctctcctattatcaccacttcaccagtgagagccaagttctctattgtaaacaccattctttagcagctgcgtctcaaaaatggtcagtttgctgcggcaagtttgtaaaatttccttataatcaaagtcaccatcaagattgccaagacacattacacttcgattcctagagaacaaccccaaccctgaaagctgttcattagctcatgatcatggactagcagacgctgaacttacatatggttaccaccgcagatatctgtcgtaggaatgatccgacagaaaaaagatgggccaaaacattggagagatgcgaaccattggcaggtttcgctcatcacatctgacaagaaaaaatcaagactgtctgaattgcacgcagtgaatgaaacttgcttcagtaatagacgaccgagggtgaaagatggctgctttgatttaggatgcaagattaaagctgaacgccattaaccattaccggttggataactcctggggccactgaacc

SEQ ID NO: 5577 - DNA, 301 bp, Oryza sativa
  unsure (1)..(301): unsure at all n locations
  Clone ID: PAT_MRT4530_12350C.1
tgcgcnncttnnngcaaaaaaaanggcgcncaccngccaccgnagtacaatcttccaaaaggcagcggggcaataaaaaagtatntaccccaacaaanaaatatttctatcctgcttacnttatctgatancatttcgtcacctgtacatatanccttattgtttgaaaaaagctgacatntaaattgctctctcccaatnccccattttncatttgtaatatatanctgataacaataacctgtaaaatacaaacntcaatanttaaacattcggaatgtanaaaataaatatntgcaaa

SEQ ID NO: 5578 - DNA, 1053 bp, Oryza sativa
  Clone ID: PAT_MRT4530_12351C.1
atggagcaacccaaaattcaaaacctttctgctcctcgggttgatctttctgagccatcctgttcttcaaaatcaatcctatccgatggctacgaaatcggtcctggctttatagccatgattcgagagcaaaccttctctggtggtattggtgaaaatccatacctccatctttgggactttgagctagtgtgttcatgtttatccatcgtaggcatgacacatgaaactctaaagtggaagttgtttcctttttctcttagagatgaagcgaagcaatggtacactctgtctgtcaagaaatttcacggtgaatgggaggagcttaagtgcaaattctgccttgctttctttccattaacccgtgtaattaatcttcgattagacatcctttctttccgacagaatgagaaggaatctctcgatgcagcctgggccaggttctcgctgttaactcagtctggcccagacttgtctttacccgaccatgtgttgttacaacattttcggtacgggttagacaaggagtctactgcaaatctcgatatttccgccggaggatcgttcgcacacaagacaacaaaagaaggaagagagctcttagatctcatcttagagaacaattctttcggtcgaagcgaagccatcctggaggtcgaggttatccatgaggatcctctgcatgtggagtcggaacccgactcaactgccaaatcctcattccagttgctggagccggaagaagaagaaattcatcctccggaaattccattccaattcagggatgatctttatgaagattatggaaacaccctgaattattccagcaaaatgaaggctcatcccaagcatgagccgttcgaggaggtgatgtttgtatcttcgttcgtttcttctaaacctattgaccatcttcatgaaactgaacgacactcatcactctcgatcaagcctaagccttgtccctctggccctcataatgttgatcttgtttatcaccaagaaacaacccggttcttgcatgatgcatttcttgagaaggaaaacttttag

SEQ ID NO: 5579 - DNA, 286 bp, Oryza sativa
  Clone ID: PAT_MRT4530_12352C.1
caggatggactaagctcatttgcattctaaggcatgcttttggtgatcagtaccgaacaactgatgcaaatctgaaggatcctgaagtgctcaagctgatctttgagggataggatgagcagattgatatagaggggttcaacttcacaggtgctggaggagctgctatgtctatgaacaacactgataagatgatctaagcttttgctcagactactatgacatctgcttatgatacgaaatgctcgatgtatattaacaccaaaaacacaagaatgaaaaaata

SEQ ID NO: 5580 - DNA, 1606 bp, Oryza sativa
  Clone ID: PAT_MRT4530_12353C.1
atgtaacaatccacaattcaaaacctttctgctcctcgggctgatctttgtgagccgtcctgttcttcaaaaccaatcctttcagatgactacgaaatcggtcctagctttatagccatgattcgagaacaaaccttctctggtagtatcggtggaaacccatacctccatcttcgagattttgagctagtgtgttcgtgcctatcgatcgtaggcatgacacatgaagctctaaagtggaagttgtttcctttttctcttagagataaagcgaagcaatggtacactatgtgtatcaagaaattccatggtgaatgggagggtcttaagtgcaatttctgccttactttctttccattaacccgtgtaatcaatcttcgattagacatcctctctttctgacagaacgagaaggaatctctcggtgtagcctgggccaggttctcactgttaactcagtctggcccgaacttgtctctacccgaccatgtgttgttacaacattttcgatacgggttagataaggagtctacggcaaatctcgatatttccaccggaggatcattcgcacacaagacaaccactgaaggaagagaactcttagatttgatcgtagagaacgattctttcggccaaagcgaagccatcccggaggtcgagattatccatgaggaacctatgcacgtcgagtcggaacccgactcaactgccaaatcctcattccagccgctggagtcaaaggaagaagaaattcatcctctagaaattccattccaattcagggatgatctttatgaagattatggaaacaccctgaattattctagcaatacaaaggctcattccaagcatgagccgttcgaggaggtgatacttgtatctttgttcatttcttctgaacccattgtccatcttcatgaaactgaatgaccctcatcaccctcgatcaagcctatgccttgttcatctggccctcagaacgttgttcttgtttatcatcaagaaacaacccggttcttgcacgatgcatctcttgagaaggaaaaccttcaggccacggacaagctagagacatcgactcttgaggacaagagaaagcaatccgcaatcgagcatgaaagtttttctttcaaaattcccctgtattcatgctcgcataaggaatccgcagagtcctgttcgattagtgtcgcttccctgtgcgacgaccacgaccacctttcggtcctcatttctaacatgtttagaaggatggttgtggatgcttatatttatcataaatactgcaaatctcgtatttgtttgtggcactaatcttgcaaagcgatgtcccgatggtcaagcttgtgaccataaacaaagcactgccaggaaataccccagattatcatgttggcagttgcacatttgcccaaaaagaggtatccaacgtctctacagcattgtgccaatggatcacgccttcaaggcacaaggttcttgcacccgaggaaataaaaagataattaaggagaagtgtaaaataacttcaaacacttatatcacgttccttatctatgaggaaagagacgccggtggacgcacgagcgcgtgccgccacccttgc

SEQ ID NO: 5581 - DNA, 674 bp, Oryza sativa
  Clone ID: PAT_MRT4530_12354C.1
actatctgcgagacgacatgctgttgaaagtcacagactttgacccgtggtatgcagccatcgtcaactttatccttgtgaggcatgtaccaccgggagaaaataagaagaggttgatctacgagagccgcaggcacttgtgggatgcaccttacttgtacagagtttgttcagatggtctactacggagatgcgttccggtagatgaaggcatgaagatcattgagaagtgtcatgctgccccatatggaggtcactatggagcatttaggacatacgcaaagatctggtagagtggattcttttggccatcaatctatgatgacacaaaggaattcgttcggagatgcacaaggtgacagaagcatggagggatcactgatcgggatgcgatgccactgacacacaaccttcaagtcgagctttttgatgtatggagcatcgacttcatgggacctttcccaaagtcctatgactgcgagtatattctggtggccgttgactatgtggggatggtgataagtgacggagggtcccatttcatcaataagacctccgaaactttttgcaaaaacttggggctcaacacaatattgccactctatatcatccccagacaagtagacaggtagaaacgagcaacagacaaatcaagaatattctgcagaagactg

SEQ ID NO: 5582 - DNA, 160 bp, Oryza sativa
  Clone ID: PAT_MRT4530_12355C.1
tcttctgtctcctgcagccgccgctagccacgcgcatcgctccgatcagccggaggtcgtcgccctctgtgaccgtctgtattcactccttgacgtttgattctatcctctttttgtcgtctttttattttctaattctttttttttattttattttttt

SEQ ID NO: 5583 - DNA, 2922 bp, Oryza sativa
  Clone ID: PAT_MRT4530_12356C.1
atgaacgagaaggaatctctcggtgcagcctgggccagattctcgctgttaactcaatctgacccagacttgtccttacccgaccatgtgttgttacaacattttcagtatgggttagacaaggagtctgccgaaaatctcgatatttccgccggaggatcgttcgcacacaagacaactgtcgaaggaagagaactcttagatttgatcttagagaacgattctttcggccgaagcgaagccatcccggaggtcgagattatccatgaggaacctctgcacgtggggtcggaacccgactcaactgccgaatcctcatcccagtcacaggagccggaggaagaacaaattcatcctacggaaattccattccaattcgaggaggatttttttgaagattatgggaacacctcaaattattcctgcgagaagagaccactgaccagggtccactctaatgatcctctcaataaagctatgcttaaaaagacggtgaagaagttgaccaccatcatgagtaacgaatggttaagggaaggagagctctcatctgaatcgattcagatccgatgcccctcctcaaccattatgtgtctcattggaggtaatttggtccgtgctctgtataatccctctgttggtgccaatattatgtccgcaacctttgcattcgattgcttaggggacagactgttggaaccaaccgtcaaaaccttccgaatttcaacaaactctactatcgaaggtttagggattatctctggagtgcccgtatggcacaaaagcgttcaggtcatcttagattttcatatattcgatatctctgatttagagaaacccatagagaaactcataggacaacccatagagaaactcttagatgtgcccgaaaccggtgtcctcaacctgaaagtaggaagaatcgccacctccgtccctgtgtttcaatcaaccaattctttgacggagcctcttcctgttcctgagccaattgaggaagtgatggccatttctccactcgagcccccagagtctatttttgatgaatccatcgaagaatttaatgaaggggaggatgaaactggagaaccgatggatcagccaaaaacggatctgtcgtcacgagccccaattgagctaaagcccttaccttcaggcctacgttatgcatttctgaacggcgatgcggagtctcctgtcattataagtgacaaactctctgagagggagatgacccgacttatcgctgttttagaaaagcatcgtgctgcttttggctattccctccaagacttaaaaggcatcaggctgtccctttgcactcatcgcattcccttagaaccattttgcacaccatctagggaacctcaaaggaggttgaataatgcgatgagggaggtggtcaaaaaggaagtcttgaaactcctacatgccgggattatctatcccgtgccatatagcgagtgggttagccctgtccaagtagtgcctaagaagggaggcatgacggtcgttgaaaactcgaataacgagttgatcccacaacgaaccgtcacgggatggaggatgtgttttgactataggaaactcaacaaggctacgaagaaggatcactttccgctgcctttcattgatgaaatgcttgagcggctagcgaaccattcattcttttgtttccttgatgggtattctggttatcaccaaatccccatccatcccgatgatcaaactaaggatgttccgtttgactttgatgatgagcgtatgaaatcctttaaaatccttaaggaatcactcatctcagcaccaatcatccaaccccctgattggtcgctgccgtttgaaatcatgtgcgatgctagtgattttgctctgggagctgttcttgggcaaactaaggatagaaaacatcatgctatcgcatatgctagtaaaacgttgactggagctcagcttaactatgccacaactgaaaaggagctcctagccgtagtttttgccattgataagttcaggtcatatttagtgggagctaaggtgattgtttacattgatcatgctgcactaaaatacctgctcagtaaaaaagatgcaaaacctcggctgattaggtggattcttctactccaagaatttgacattgaaattaaggataaaaaaggagtagagaattttgttgcagatcatttgtcgtactctaacctgtggtatgcaaccattgtcaactttatggttgcggggcgtgtgccaacgggagaaaataagaagaggttgatctacgagagccgcaggcacttgtgggatgcaccttacctgtacagagtctgttcagatggtctactacgaagatgcgttccggtagatgaaggcatgaagatcattgagaagtgtcatgctgccccatatggaggtcactatggagcattcaggacacacgcaaagatctgggagagtggattcctttggccatcaatgtatgatgacacaaaggaattcgttcgaagatgcactagatgccagaagcatggagggatcactgctcgagatgcgatgccactgacatacaatcttcaagtcaagctatttgatgtatggggcatcgacttcatgggacctttcccaaagtccgatgactgcgagtatatcctggtggccgttgactatgtgtcgaagtgggtagagacaatgccatgcagggccacagacgccaagcacgcccgccggatgtttcatgagattatcttcccttgttttggaactccacggatggtgataagtgacggagggtctcatttcatcgataagaccttccgaaattttttgcaagagctcggagctcagcacaacattgccactccgtatcatccccagacaagtggacaagcagaaacgagcaacaaacaaatcaagaacattctgtag

SEQ ID NO: 5584 - DNA, 1341 bp, Oryza sativa
  Clone ID: PAT_MRT4530_12357C.1
atgggccgcgcgttcgagtacgtgatcctgggcggcggcgtggccgccggctacgcggcgctcgagttcgtccgccgcaacggcggcgcatccagccaggagctctgcatcatctccgacgagcactttgctccttatgagcgtcctgcattaagcaaaggctatttgctcccacaagacgcgccgcgtctaccggcatttcatacttgcgttggttctaaggatgagttacttaccgaagaatggtacaacgaacacggcattgtacttgttcttggaacgagggtgatttctgctgatgtgcggcagaagacattgcttacatccagtggggaaaccatcagctataaaactcttatcgttgccacgggtgctcgggccgtgaagctggaagaatttggagtgagcggttcagatgcgaggaacgtctgctatctgcgcaatgtggaggatgcagacaaattagtcggtgtaatgagatcatgtcccggtggaaatgccgttgtcgtcggtggtggatacataggaatggaatgtgcagcggcattggtcacaaacaacataaaagttaccatggtcttccctaaaaaacactgcatgggtcgtctttttacaccgaaaattgctgagttttatgagagctattacgcttcaagaggagttactttcgtcaaagaagctgcggttacttccatgcagatatcagctggaaaggtgactgcagtgaacttgggaaacggtaggcggcttcctgccgacatggtcgtcgtcggcgtcggcgcccgcgcgaacaccgggctgttcgacggccagctggtcatggagaacggcgggatcaaggtgaacggacggatgcaggcgagcgacgcctcggtgtacgccgtgggccacgtggccgcgttccccgtcaagctgttcgggcggggacgtcccgccgggtggagcacggtcttctcgctgtcgtggcagttttacggcgacaacgccggggaagccgtgcacttcggggacctcgcgccgcccggcgacggcgacggcgccgcccccaagttcggcgcgtactgggtccgcgacggccgcgtcgccggcgcgttcctcgagggcgggagccggcaggagtacgaggccgtggcggccgccgtccgccgcggggccgcggtggccgacgtcgcggagctcgagaggcgaggcctcgcgttcgccacccaggccaccggcggcggtggcaagcccacctgcgcatggcacgccacggtgggcgtcgccgcggccgtgtccatcgccgccttcgcctgctggtacggctggcaggcgccgtacgtgctcaagcgagacttctga

SEQ ID NO: 5585 - DNA, 414 bp, Oryza sativa
  Clone ID: PAT_MRT4530_12358C.1
atggcgctcttcctggtcgtggaaccatggagagggaagcaggagcttctgtcgttctggaggttcccgaagcgtggtttgcggtcgtcgccgaaggttcggaaggccgttctctctgagcaaggcaagtacacggatggagatggacgaagtcgggggtcgatggacatctctaggacaaatgaaggctacacgagctgcggcccggtagtcgagatgtcatggcacagggttggtgtccttctgctaggggctcaatcctgtctgcctgtcccggaggttccggccgtaggtgggattgggtcgctttgtgaagaagaagatgtcgtcaattgtctgccgaagctccagaaggctgcaggatccgctagtgaagtgaaggaagcagtgaagccaactgtgaagcaggagtga

SEQ ID NO: 5586 - DNA, 1605 bp, Oryza sativa
  Clone ID: PAT_MRT4530_12359C.1
atggagcaacccacaattcaaaacatttctgctcctcgggctaatctttgtgagtcatcctattcttcaaaaccaatcctttcaaatggctatgaaatcggtcctggctttatagccatggtttgagagcaaaccttctctggtggtattagtgaaaacccatacctccatcttcaggactttgagctagtgtgttcttgcctatccatcataggcatgacacatgaaactcttaagtggaaattgtttcctttttctcttagagatgaatcgaagcaatgacacactctgtctatcaagaaattccacggtgaatgggaggagcttaagtgcaatttctgccatactttctttccattaacccgtgtaatcaatcttcgattagacatcctctcttttcgacagaatgagaaggaactctcggtgcagcctgggccaggttcacattattaactcagtctggcttagacttgtctttacccgatcatgtgttaccatgtgttgttacaacattttcgatatgggttagacaaggagtctgccacaaatctcgatatttccgccggaggattgttcgcacacaagacaaccaccgaaggaagagaactcttagatcagatcttagagaatgattctttcggctaaagcgaagccaccccggaggtcgagattatccatgaggaatctctgcacatcgagtagtaacccgactcaactgccgaatcctcgttccagtcgctggagccggaggaagaagaaattcatccttcggaaattccattccaattcaggcatgatctttaagaaaattatgagaacaccctgaattattccagcgaaaagaaggctcataccaagcatgagtcattcgaggaggtgatgtttgtatcttcgttcattccttctgaaccctttgcccatcttcatgaaacgaaacgatcctcatcaccctcgatcatgcctatgccttgtccgtctggccctcaaaacgttgttattgtttaccatcaagaaacaacctggttcttgcacgatgcatctcttgagaaggagaaccttcaggccacggacaagcttgagacatcgactctgaaggacgagagaaaacattccacatttgagcatgaaagtttctctttcaaaatcccccaggattcatgctcgcataaggaatccccagagtcctgttcgatttgtaccatttccctgtgcgaggaccacaaccaccttctagtcctcatttctaacatgtttagaacgatggttgtggatgcttatatttatcataaatactgcaaatctcgtatttgtggcactaatcttgcaacacgatgtccccatggtcaagcttgtgaccataaacaaagcaccgccgggagataccccagattatcatgttggcacttgcacatttgcccaaaaagagatatatcctacgtctctacagcattgtgccaacggatcacgccttcaaggcacaaggttcttgcacctgaggttgcaggaaataaatcaaggagcggtgtacaataacttcaaacacttatatcacactctttatcgttgtcaagttttgtgaccctagcgaaatgcttttcatatttt

SEQ ID NO: 5587 - DNA, 667 bp, Oryza sativa
  Clone ID: PAT_MRT4530_1235C.1
tctctctctctctctctctctctctctctctctccccgcacagccgcgccgcgccgccgtcgccttctcgggcgagggcgaagagcgagggctcctgctcgccgccgcccctccccctcgtccgcggcgcgccggaggtcaggtaggagccccccccccctccgccatccctctctcgcatacactctcactcctccctcctcttcatcatcctccaccacgttgccggcgcgaattggcccgagcgtttgggattggggacgtgggaattcctcccatcccgtcctgcttctcgtggagagagatttcgcctgcggatggattccgtacgggctctctctccgcgccgccagatccaggaggggagttcgtgcccgcgatacgctccagtgggcaatccggtttcgctttctgtaggttagctgggcaggcaattttcccatgaattgatttctgggattggggggcgagtttcagtcatctttttccgcgggataaattgatgtttgtttttgtgttcctaccgcagtaagttaaactatgcatcggtaactcgtcgagatccattgatgtgctgtaatatcgtacttaatactcctgatttgataatagctatgaagattttgtgtctcctaaagagcacaaaaatgttaatatgcttcgactg

SEQ ID NO: 5588 - DNA, 3212 bp, Oryza sativa
  Clone ID: PAT_MRT4530_12360C.1
atggttaagggaaggagagctctcatctgaattgattcatatccgatgcccctcctcaaccattacgtgtctcattggaggtaatttggtccgtgctctatataatccctctgttggtaccaatattatgtccgcaacctttgcattcgattgcttagggaacagaccgttggaaccaaccgtcaaaaccttccgaatttccacaaactccactaccgaaggtttagggattatctctggagtgcccatatggcacaacaacagcgttgaggtcatcttagattttcatgtgttcgatatctcttatttcgacatactcataagccatcccatagagaaactcttggatgcacccgaaaccggtgttctcaacctgaaaataggaagaatcactacctctgtccctatgttgcaatcaaccaatttttcgacgaagtctcttcctgttcccgagccaattgaggaagtgatagccatttctccattcgagcccccagagtctaatctcgatgaattcatcgaagaattaaatgaaggggaggatgaatctggagaaacgattgatttgccaaaaacggatcagccatcacgagccccaattgagctaaagcacttaccttcaggcctgcgctatgcatttctgaatggcgatgcggagtctcctgtcattataagtgacaaactctctgagagggagacaacctgacttatcgccattttagaaaagcatcgtgctatttttggctattccctccaagacttaaaaggcatcagtccgaccctctgcactcatcgcattcccttagacccatcttgcactccatctagggaacctcaaaggaggttaaataatacgatgagggaggtcgtcaaaaaggaagtcttgaaactcctacatgccaggattatctatcccgtgccatatagtgagtgggttagctctgtccaagcagtgcctaagaagggaggcatgacggtcgttgaaaattcgaacaacgagttgatcccacaacgaaccgtcacggggtggagaatgtgcattgactataggaaactcaacaaggctacgaagaaggatcactttccgctgcttttcattgatgaaatgcttgagcggttggccaaccattccttcttttgtttccttgatgggtattttggttatcaccaaatccccatccatcccgatgatcaaagtaagatcacgttcatgtgcccatacggaacgtatgcatatcgaagaatatcgttcgggttgtgcaatgcacccgcgtcatttcaaagatgcatgatgtctattttctccgacatgatcgaggatatcatggaagtcttcatggatgatatttcagtctatggtaaatctttccatcattgtttggagaacttagacagggtcttacaaagatgtcaagaaaagtacttgttcaggtcatatttagtgggagctaagatgattgtttacactgatcatgctgcactaaaatacatgctcagtaaaaaagatgcaaaacctcggttgattaggtggattcttctactccaagaatttgacattgaaattaaggataaaaaaggagtagagaattttgttgcagatcatttgtcgcgtatgcaaatcactaacatgcaggaactaccaataaatgactatctgcgagacgacatgctgctgaaagtcacagactctgacccgtggtatgcaaccattgtcaactttatggttgcggggtatgtgccaacgggaaaaaataagaagaggttgatctacgagagccacaggcacttgtgggatgcaccttacctttacagagtctgttcaaacggtctactacgaagatgcgtttcgaaagatgaaggcatgaagatcattgagaagtgtcatgctgccccatatggaggtcactttggagcattcaggacacacgcaaagatctggcagagtggattcttttggctatcaatgtatgatgacacaaaggaattcgttcggagatgcacaagttgccagaagcatagagggatcactgctcgggatgcgatgccactaacatataatcttcaagtcgagctatttgatgtatggggcatcgacttcatgggacctttcccaaagttctatgactacgagtatatcctggtggccgttgactatgtgccgatggtgataagtgacggagggtctcatttcatcgataagaccttccgaaactttttgcaagagctcggagctcagcacaacattgccactccgtatcatccccagacaagtggacaggcagaaacgagcaacaaacaaatcaagaacattctgtagaagactgtcaatgagatggggaaggcatggaagaacaagctacctgatgcactttgggcatataggactgcttataagacgcccatcggcatgtcaccataccaacttgtctacgggaagacttgccaccttccggtagagttggaacacagggcgcattgggctatccggacttggaacatggacttaaagggagccggacagcacaggaagatgtagctctctgagctggaggaatggagggataaggcctaccacaatgccaagatctacaaggatagaaccaaaagatggcatgataaacagatcaatcacaaggagttcaaagcaggggacaaggtgttgttgttcaactcacgggtgaagcttttcggacatggaaaacttcgaagtaaatggatgggttcatataccgtcgtcgactcttcatcacatggagcagtcacgctgcgcgacaacgaaggtaacatctttaaggtaaatggtcatcgtttaaaagttttccttgatccgttagaagttgattgtgacttagatgttgtgaatctagtctcttttagcttctacccggagtctttagctcccacttgatccgttagttttcaatgccacgagtcctttggcctccctctagttatcttaggtctagctttcgtggataaaataaaataaaataaagttggctccttagtcttccaaccaagtgagtcctttttgcttcacttttgtctttgtttttcatttttgtgtccaataaagagccccatgtacaaagtcaagtgtgggggtgatcttgcacatcaacgccataaccaaagcaagttcaccccagaagtgatgagccatgatgaaacacacaagggaaattgatacagtcagaacccatgaatcgtcc

SEQ ID NO: 5589 - DNA, 1407 bp, Oryza sativa
  Clone ID: PAT_MRT4530_12361C.1
atggagcaacccatgattcaaaacctttctgctcctcgggttgatatttgtgagccgtcctgttcttcaaaaccaatcctttcagatggctacgaaatcagtcctggctttatagccatggttcgagagaaaaccttctctggttgtaccggtgaaaacccatacctccatcttcgggactttgagctagtgtgttcgtgcctatccattgtaggcatgacacatgaaactctaaagtggaagttgtttcctttttttcttagagaagaagtgaagtaatggtacactttatttatcaagaaattccacggtgaatgggaggagcttaagtgcaatttttgcctttctttctttccattaacccgtgtaatcaatcttcgattagacatcctctctttccgacagaacgagaaggaatctctcggtgcagcctaggccaggttctcactgttaactcagtctggcctagacttgtctttacccaaccatgtgttgttacaacattttcggtacgggttagacaaggagtctgccgaaaatctcgatatttccgccggaggatcatttgcacacaagacaactgccgaaggaagagaactcttagatctgatcttagagaatgattctttcggccgaagcgaagccgtcccggaggtcgagattatccatgaggaatctctacatgtggagtcggaagccgactcaactaccgaatcctcatcccagtcgcaggagccgaaggaaaaagaaatttatcctccggaaattccattctaattcgaggaggatctttttgaagattatgcgaacaccttgaattattcctgcgacaagagaccaccgaccaaggtcaattctaatgatcctctcgataaagctatgcttaaagagacggtgaagaagttgaccaccatcatgagtaacgaatggttgagggaaggagagctctcatctgaagcaattcagatccgatgcccctcctcaactgttacatgtttcattggaggaaaattggtccgtgctctctataatccctctgttggtgccaatattatgtccataacctttgcattcgattgcttaggggacagaccgttggaaccaaccgtcaaaaccttccgaatttccgcaaactctactactgaaggtttagggattatctctggagtgcctatacggcacaatagcattgaggtcatcctagattttcatgtgttcgacatctctgatttcgacatactcataggccatccctgtcacgccgagaaaaattgtcttttcccgaacgctagtgtattaatctccgtcccaagaaaagccggggtacaccacacaaacatgatacaaaagacacatctttattatatcgataatatttacattattacaaaggcacttaaggtctaa

SEQ ID NO: 5590 - DNA, 441 bp, Oryza sativa
  Clone ID: PAT_MRT4530_12362C.1
atggagtcgtcggcgctctccaacagcagcgaggcatccttcgtccgggaccagcgcggcctagtagctgccgccaagcctctcggcccaggacctaaagttgtgactccggttgggcttgtggtggagcaggcccaatgtgacctagtcatatgggttgaggtgacgggtgagattgttgggcccgatgtgtgcaaggaaggcgcaaaaggccttgtcggaggcaacaacgaagtcgtgttcgatggtggacgtgaaggccacgcggagcggagtcgcaagggtggcacggctcgcgccaggtcatgcaaaggtggcgacggttcgatggtcgacatggaggctacgcggagcggagtcgaagggtggcacggctcgccaggtcatgcaaaggtggtgacacctcgacgaaggagccacgacctgggcttggagaaatga

SEQ ID NO: 5591 - DNA, 985 bp, Oryza sativa
  Clone ID: PAT_MRT4530_12363C.1
agacacgtatgattcaaagttcaaacagtgataaaatagtgggttacacaagattaaattaaaacctataatattcgacgtataattaattcgtgcattaagcacattaaattttgcgagcactcagagattgggtgacgcgacccacacgtacgtacctggtctgcactgcacagtgcacatcatacacacacgattcatcagtacacaaattaccaacttaacgtaacaacacacggtaacacatgtactcttaccatccaagaaaaaatcaacttctaactacgtctataaattcatagagaagttaattttttttagacaggaggagtacttaattaacacacagtaaggaggcacgttatattaagccgccggagtacacacatcgcggcggcgtgagcaacggtataacttaacgacggcatggtggctcgccggagttgattaacacctatggcacgggtggaacgacggacggcatcggcggctgtgggtcttcctgcacggtggtcgacgacgccggcggcacgccggggaatccggcgccggcgccgggatcaatcggcggcacaaatggcggcactggcagggttgtcatgccggcgatcatcggcacgccggggatgatcggcacgatcaccggcacgccggggatcaccggcacgaacgggatcccggggccaaccaccggcactccgggcacgccggggatcaccgggatcccggggccgaccgccggcactccggggacgccggggatcgccgggatggcggcggtggggagttcttcgtcgaggaggcgcgccgcctgggtggacgtggcggtggcacccaggaggaggaggacgacggccaccatcgctgccgcggcgagcgagctcgaggtggaagacgacgccatgggtgcgtgctagcttagctagctagctagctagggtttgatcggacgcgtgggtcgacgcgtgggctgccggacgggcga

SEQ ID NO: 5592 - DNA, 513 bp, Oryza sativa
  Clone ID: PAT_MRT4530_12364C.1
ggctttggaaaaatgaatatcacagcgagcaatgacctaaatgaggaaacaattgatgccttgaacaagcagggtcacgaggtagatgcatttggcattggtacctaccttgttacatgctatgcacaagcagcgcttggttgtgtgttcaaattagttgagattaacaaacaacctggggttaaactgtctgaagatgtgacaaaggtatccataccatgtaaaaaacgatgctacaggttgtttggaaaagaaggttatcctttggttgacataatgactggagaagatgagccagccccaaaggttggtgagaggctcctgtgtcggcatcctttcaatgaatcaaagagggcatatgttgttccacagcatgttgaggagttattgaagtgctactggcctggaactacatccgaaccacgggaagagctaccatccatcaacgaaataaggagtcggtgcatgggctatctggaccgtatgaggccagaccacatgaggaggctgaat

SEQ ID NO: 5593 - DNA, 270 bp, Oryza sativa
  Clone ID: PAT_MRT4530_12365C.1
atggatggcctcttgggtggacgtgaggggaagagaaggcggcttagctcttcagcgccgtggagagtcgcagatgttgatgcctggaataagaacaagtcatatgctggttggatcacaggggagaggcatggatccgttgctgctccttggcagcttcttgctcatcgctatctggccacagcagatggtaccagttgctttcacatgctgttcatgtggtcagtggtgacaggttacacgggcggcatgaatccaagcgaaatctga

SEQ ID NO: 5594 - DNA, 351 bp, Oryza sativa
  Clone ID: PAT_MRT4530_12366C.1
atgacgacagatggcagcacggcgccggaggagggtagcacgtcagtggatggggaaggagcggcgagaggacaagctcttccgccctccccgcgcccctctgtgatcgtcctcgctagcggtggccacgcccgcctccgcgatcgtcctcgccggcgactgcgcccgctccccgcgcccctccacgacctccccgcgagcatccttgccggcggcggccttgacctctcaccgctcgccagcgcctcctcgtcctcgctgcttgccttctccccgtcctctcgctggcaccgcctcatcttcgccgctcgccggcaccacgtcgccttctccccttgcagacgtgagtga

SEQ ID NO: 5595 - DNA, 7896 bp, Oryza sativa
  Clone ID: PAT_MRT4530_12367C.1
atgggcccacttgtcaatctctctctctctcttcttcttcctctctttgtctgttcatctctttctcattgcgccgccgccgagctctgccgtggccatgaagcagcatcagcagcaggaggctacggcctgttcatcagaacagcagattgttccatggctgaagcacaacaagaagtcgcagcagcagcgaaagggtactggtcttctccctcctcgccgtcgtcgatgtcccccactccgtcacctccaccggcggcagctgtccatggaggcggaggaagagcggaggagtccaccatcgccgccgctgcaacgccagccgcacggagtttggctgcaggggacaacggcatgcaggttataagttactgtcgtaatgaaattgcttgcaacaaaatctctttatctatcccatcagcataccgagagcaatctgtgagatggttcataagggttcttatgacagtcttcctatgcatcaaagcttgtactagtgaaactgaattgccaaaccatataaagattttggccaaaacccttcagctttacatgattcgcacattcagaatggttcttgtttcaaaaccaactttactcacagcttttcgagaggaaggtgtatgggacttaatattctcagagaattgtttctactttgggtcatctgtagaagacatgcaatttcatattgtcgcagaagttcaaaatgaagatattaacggtaatactgaacccactgattctgaaagcttatacctatcagatgttaacattcttcagttggaagccatttccttcttggagtatgctgcaacgcttaatgaaaacaaatataacctggtactggtttttctcttatgttacattccagaatgctcagcactgctggaagctcttgaacactgcatttatgatcctgtggtggtcagcattcttcttaaaagttttcgtgttattctacaactcgccacagaacaaactctagtttcatttaaatccttggatgtaattactggagtccttaaggctgcatgccaacaagcaaaagaactacaaaacttcagctgttttcctagtgatgatgttatcagcagtggatatggttctaagatagaaaatattgaaatgagttcgtcaggaaagagaactgagtatgctattatttgtatagagttagctttgagcctcttcaaggaatatgtcaccatatctagctatggaagaattctaattttgcacaatcctgactgtattgagtgtttattcaacttattccaagaaaagaacttccgcaagcatgtactggagcaaatttttgctttattcagggtaaaattgtgcatattccaaattttctcttttgatcttgttaacgtttggaactacaacactcttacagtttactttaaccagttacctccatcatcaaaacaagatcatgcagcaaagttacagctatgctccaaatatttagagaatttcacacgagcaaatgaaaaagaaaaggttaactcagaattgttggttgatctactggtcaacatgagagagatcattatgatggatcgcatgtactatcaaaatctatttcgcgatggagggtgctttctgtatattgtctctttgttgaatggaacattcaatgaggcaactggtgagcagttagttcttaatgttcttgagacattgaccttattacttgaaggaaatgatgcatccaaggcttcctttagaatgctagttggtgtgggttatcaaacactgcagagcttgctactggatttctacaaatggttgccaagcccaagcgagagactcttacatgcattgcttagcatgctgaatgaagatgtggttatattagttttgaatattctacaaaagagcagcacatcacttcagcattatgggcttgttgttttgcagcagttgctcaagcaatccattgcaaatagaacttcttgtttcagagcaggactgcttagttatcttcttgattggttctcagtagaggaaagggatgatactgttggtcaaattgcagacttaattcagataattggtgcacacagtattagtggcaaggacattcggaaaatatttgcactcttacgttgtgggaagattgttgccaagaagaagcatagttctttgcttttgacatgtctcagtcacatgcttaaggaaaagggaccagaagctttctttgagttcgatggtcatgattctgtttctaggcatgcgttttctgatttttcttcctttttctacttgaaaaatttagagggtatagaaattaaatcaccatttcaatggccttataatagagggctatccttttcctgctggttaagggtagaaaacttcccagaaaatggtatgatgggcctcttctcttttttcacagaagatggaaaggggtgctcagccgtgcttagcaaaagtgctctagtatatgagattatgccactctttacaatggcagaactacctctggaaacagccttaatgagtacattatccggcattacaagttctgaggcgagtctatcaatcaaaaacttacccaaaaatgaacgaggcaatgactcactgcactatcgttgcaatgctgtaactgatggtgagcaatcttgtcatacatctgtcatcaatggcaagttgcgagctgaggtcattgagcttgtcgcatctgtcctggatgcaaatgtatcgaatcaacaacagatgtatcttctttctggattatctattatgggcttcttgcttcagtctgctacacctaagctgttaaatattgaaacactttctgcactgaagtatatgtttgatgttctaaggaactgcggcatgtcaaaagttctgctgaaagatgctattttacaaatttatttgaatccacaaatatgggtacactcaagctatgaagtgcagagagatctttatatgtttttgctaaaatattttgaaactgatggaaggtttttaccactgctttgcggacttcctaggatcattgacattgtgtgccaatattactcggagtatgtagattgtaggtgtgctgttggttccaagtctttgttgcgaacaggtaacaagcaagttgttggagatagacctaagatagaggaaatctgcaagcttcggcttctccttctgagtttagcagaaatgagcttaaagttacaagtttgtctagctgatataagagcccttgcttccctttttgagaggaatcaagatgtagcatgcgttgaggacatactgaaaatgatcattcgtgctctttcagagggcccagttttatcatctttcttggagcacgtaaattgccttggtggctgctgcattttcatcaatcttcttaagagggaatccgagccagttagattgttgggacttcagcttgttggaaagcttatggctgcttttttcaatgtccttcttggtggaaccagtccaatcaaggttatattgccaacttcatgtcatattaatatttcatttcttccttcttactaccgtttcacctcagtgatcttggtctgcatttttagatatttgcaatcttgtcaagattcttcagcgcgtataagaatcttaagtgaacttattggtttgctagattcaaaccctacaaacattgaggctttaatggagcacagttggaactattggcttgagacatccacaaagcttgatgtattgaaggagtacagtttagtttctaaaggtgagcttgacaatgtggagattgatgaagtaattcttgtgaggaaattgtatgcattggtccttgcatactacctgagtgctgtaaaaggtggctggcatcagcttgaagatacagttaactattttcttttaaaatttggccagggacaactatcaagttcctatttactgcgggacatacttgatgacattgttgggagcctgctacagacatcttcagaagaaaatattatcctttcacagccatgctgtgataatgtcttgtatcttttgaagcttatccaggagttgcttttcaatcaaataggaatcaagctcttgtttccatctaatccttcagaggaatctttatccagtattaaatggaaagatgatattaagtctacactaaatgaaattttaattgatgaaagccatagccaatataaaagttttccttggaaatcttgccaatttgctgacgaggatgaaaaaagtgaggattggtggaacttctttgacaaggtttgggatctcatttgtaatttgaatggaaaaggaccaaacaaattgctaccaaagggtccaaatattgaagtcccatcgttggggcaaagagcacgtggattggtggaatctctaaatgtccctgctacagaaatggctgctgctgttgtttctggaggtattggtactgcattaggtgcaaaaataaatagattttctgaaaaagctacattgttgagggaagagatattcccaagggttttctttcaccttgtaattctgtatctctgcaaagctggattagaaaatgcatctaagtgtgttctgcagttcatgtcactgcttcctgttcttatttcagaagatgagcaaagcaaaaacaagctgcacttcttaatatggtctttactcattacaagatctcagtatgggcaacttgatgatggcgcacgttaccatgttttatcacacttgatccttgaaactatcatatgtggaaaatccatgcttgttcctaatatattgggcagagatgattctatggaaatcggcaacagtaataaagacaccgggttcattcttaattttgtacagaaggaccgtgtacttgctgcggccactgttgaggttaagcacatgaaggcagttcaggctgatcgcttaagtcagttggacgaacttcaatctaagctcaatgagcacttcaccgaagagacacaactggagaagatgattgaagataacatacatatttcgatcacttctgctctttctgcagatgacaaaagaaaaatagcttttcggcttgcttttgatgaggatcagcaaattgttgcagataagtggatacatatttcccgagctttgattgatgagaggggaccatggtctgctaacccttttccaaatgatgttgtaactcactggaaacttgacaagactgaggataaatggcggagacgactcaagctaaagcgcaactacaagtttgatgaacgcctctgtcaaccttcatattctaggaatgaaagtacagaggcttgtgttgatcaaagttctttaagtaccaaagttcccttgaaactgaagcgtttccttctgaaaggtgtgcgagcaatctttgaagacaatgcatacgaaccaattgaagacaccaatgatacaggtgaatcttcccagagtagtctgttagagaaccaaaacccaaataatgtctcagatttatcagattatcgcactgccgttcagaataagaaagaatcagcatctaataatggagataacgattataccaaggtgctatgttcagttcattgtgtgcttataaccccaaagagaaaactagcaggacaattggatattactcggaccgttctacatttttcttttgaatttttggttgaaggaactggaggatcatctgtattcagcaagtttaaagagatagaggattccgattgcaagagtgatctaggaagtgtggaaagacttgatggaggccgagactatgtgatcaaaactccgaatggtgtcttgatgcaaaaacaatctaacaaaattaaacatcacagaaggtggaacataaccaagataaaagcagttcattggacgcgctacctgctacaatatactgcaacggagatattctttgacgattcaaatgcacccatatttttaaacttctcatcgcaaaaggatgctaaaaatgcagggtctctcctagtttccctcaggaatgaagccttgttccctaaaggaagtaccaaaggcaaaagtagagtcatttcatttgttgacagacgagttgcacttgaaatggctgagaatgctagggacagatggatcaagagggaaatcagtaactttgagtatctgatgattcttaacactcttgctggacggtcttacaacgatttaactcagtatcctgtatttccatgggtactgactgattatacatcagaaaagcttgattttaacaagtcctctacatttagggatctttcaaagccaattggtgctttggatgaaaaacgctttgagcaatatgttattgggcaggtttttgaagatagatatgttaatttcgatgacccagatataccaagtttttattatggatctcactactccaccatgggaattgttcttcattaccttctcaggcttgagccttttacaactctgcatcgtagcctccagggtggcaagtttgaccatgcagatcgcctcttccagagcatcgatagtgcttacaaaaacagcttgtcaaatacaagtgatgtcaaagagcttattcctgaatttttttacatgcctgagtttcttgaaaattcaaattcgtatcatcttggtgttaggcaggatggtgaacctttaggtgacgttgttctccctccttgggcaaaggcagcaaacatattttactacgttacatatgaaggcgcagttgatctagaaaatatggatgacttgttgcagaaatctgctatcgaggatcagattgcaaattttggacagacaccaatccagattttccgggtgaaacatccaagaagagggcctcctgtcccaatagctcaccctctgtattttgcaccacagtcaattgcattgacttcaagtgtttctagtacaatcagccacatgtctgctttgttattcattggcttgttggacaatacagttatactgatgaatgaaggactcatactgtcaataaagctgtggttgacaacacagttgcaatctggtggaaattttacattttcaggaccacaggatcatttctttggaattggctcagatgttatttctccccgcaaaattggcactttcctggctgaaaatgttaattttggaagacagtgcttagcaaccatgcaaattaatagtgataagtatttgattttatgtggaaattgggagaacagtttccagattatttctcttagtgatggaagaattgttcagagcatcaggcagcataaggatgttgttgcctgtgttgcagtttcatctcgtggaaatgtggttgcaactggaagttatgacacaactgttatgatctggcatgcatttcgtggcagaccaagtgatcatgttgtaatggaaaggccggttcatatcttttgtggtcatgatgacatcataacatgcttatttgttagcacagaactggatattgtcatcagtggttcaaaagatggaacttgtatatttcatacactgcgtgaaggaagatatgttcgatccattcggcatccttcgggcattggtttgtcaaaattggtggcgtcgcagcatggaagggtagtattttattctgagagtgacctttccttgcacatgtattccatcaatggaaaacatattgcttcttcagcatccggtggacgcatcaattgcatggaacttagttgttgtggacagttcttggtttgtgctggtgagcatggtcaaatagttctgcattctatgcattgtcttgacattatccggaggtatgatggagctgggaagaccattacttctttatctgtgacccctgaagagtgcatcctagcaggaaccaaggatggtagcttgcttgtgttttcaatggaatctcctctgcttagaaggaagagcatgccacggacaaggataaagcctcccactgctagttaa

SEQ ID NO: 5596 - DNA, 279 bp, Oryza sativa
  Clone ID: PAT_MRT4530_12368C.1
atggatgccatgcggggggagggcggccggccgctggatccgtgcgtggacgaccgccaccgctggatttttgcgttgatggccgctgccgctggatccgtgcagggacggccgccgcccgccggatcccacgccctccaccgccacaacgtggaggaggccggcgcgtgcctatgcccaccgcggctgtcaccgcgcgccgccgccgctgccgccatcgggaggagaggagaggacagtggagagaggagaggacattggagagaggagaggagaagc

SEQ ID NO: 5597 - DNA, 1357 bp, Oryza sativa
  Clone ID: PAT_MRT4530_12369C.1
ttttgtttttcgtctcgctgtcggccgggttgggttccctcctcgcccttttctttttctcttttttttttttttctctctttttttctttttttttttttttttttttttttttttttttagagtgaaaagctcatggaatccctttattatttagtgtgtcaaaggaaacagcagcacaccagtctcggctctagtattagcaaaatgaaagttacagcattgccgcagcggttgcgaaagaaaatcagcacattctggttccccagtgtgccagggagctcgaagcagactgttaaactcgttcaatccagcgtcaagagtgagtaggtcagaggagatctcatctcttccaccgccgagcttgctatcttgagtccacaacagtgccctcaggaagcgcagacaggtgtacgagagcgtgagatttttgtgggctatcggagccagtgatcttctccttcggccggctcaacaccttcctgacctcgttagctagctcgatgattgaatcatcttcatggcatatgttggacaatgccttctccattgagaacaggtaatccctgttattcccattggggccattggctgtagcaatttgccttgccatgtcctccaaaggagcaggcccaagatagtatttgttgcctactggatcaggagtggatacaaagactagtacacctgtcacagctggcttcaaagaatctccttccttgtagaaatccacagagatcttctggtcatactcacactctcttctttccaagtacttcattgcttcttgctcctttttaagcccccctttgacacagtatgcaatcccccagcatatggcttcctcgtcggactcaagtgtgcaggtcctcgcaggatgctccggcgtgccccgatggtcaatgcaagcaagattgaaggtgcgtttgtagcccttgacgaagcccaggatcttctcatcgaagtcgaatccggggttccagatcagggagccatagccgaagacccagagcaccatctttctatgcctggcgagcgggaacggacgggacggggccaagtgcgcgcagcgcaggcgagcgagcgagcgagcagggcaggaggaggatcggatttttgcctccctcgggcgacggcgtcgcctcctcctggccttctctcccccctcacacgcgcgcgcccgcaccaaacccccgcttccgcaagctctctggttgggttactgttgttggtgagagcgcgggggatgggcgtggcgtgctgtatttatgccgcgcgagcgggtggggggggtggcgagcggcgggcacgtcgtctcgtcgacgagagaaatggtcggacgccgccggacgcgtgg

SEQ ID NO: 5598 - DNA, 527 bp, Oryza sativa
  Clone ID: PAT_MRT4530_1236C.1
ctttgtcttctcgcagcagtttgttggcggccggataaacgagacgaggcgaggcgaacgcgaaagctccccatctccctccctccctccctcattattgattgattgattcgcagattcgccgctgccaccgcatcccgcccacccaccgcgcgccaccgcctccgccgccgacgagcccccgcgggcaccgccaccgccacctcatcttctctcccaccaccgctccacagccgccctcccttacatggaagtcgacgtctccatcgccacgcccgcaccgcaggaatcttagctgatttgtgctttggactgcaggtctggacacgttgtccgtttcctgcttgtgcagacgtaggtttggagtctttctgagtgttaaggtggctttcctttttgtccttccatggttgaaatttgtatgaacaaccttgactgtctcgaagatctgtgttggtcgataagatgaatcgaagcagaacaatgctattgcttatctggctctgtgcaacattctgcctcatgac

SEQ ID NO: 5599 - DNA, 1692 bp, Oryza sativa
  Clone ID: PAT_MRT4530_12370C.1
atgcaaaagttggttcgttcgttcgttcgccacctaactcgcctgcgactgcgagattctcactgcgacgcgcgcggtaaaagaaatggtggtacgggccaaggcagatcgcgagatgcggtgcagagtttgccggtggaggtgcctttgcccagctttgtgcgccatcgtggtggaccggggtcagatctagagctcgatgggttgcccacttcctcctccaatgcttcctcagggtcacacgaggaggatcacgggccattgcaaggggtgaagggagaggggtggatgcaagtgcagggaccgatcaagaactcagctgcccgttctatcggagaatgccaagaccagcggtaccggttggggtctgttcttttccatggtaagaatgaacggaagcagcgcccggcttcagttgattttggctgccccagtgttgacagatcctccacgcattctccgggtttcttggtcaatggtaccggggcgatgaacaagggattgagtgtatcatcgcaaaataaaccaggtgcgccgactagcccaggaacaccaagctacaatcgtcagggtgcaacagttgttgggtatcagcagggttggagctctgaaagagttgccctgtcttcaaacggccagagaaggcattcaggcaacagcatggtgttaccacataatactgggagaacattgccctcaaaatgggaggacgcagagaggtggatcttcagtccgaatcccagcaatgcacttggaaggacctcaatcccgcagtcgcggcgacctaaggccaaaagtggacctcttggacctcctggcagatttagtgaaccatactcatcagtttcgtcatcgtcatatttgcttgacaccgggagagtaggaaacctcacggcaaactcacctttcctggctggggtcttgctgcctgagcatgtttgtgtgtccagtagccatgctggaagggatctaagtggtgcatctggtgaggataaaagcaatggcatgggaggcaggtctggtgaagcaaatggtgcacatcctgccgtgtggtctaccagagtttgccaacgaatggatagcgcagttcagtcgtctccgtcattgcctacttcccaagaatcagttcaagcttgcacagatgaacagatcgaaatcacaacagacttgaccaccagcagtaaacctgaaatttcgagaaaagatgtggcaacacagactagccctgagcttagcaggtcatcttctcctagcgggaggccttcattttcccgctcactatcagtacagcaagtcaaagagttggagagctgtttctctaagcttgagataagggatgtgcagatggatgatcgggttactctgaccaggtggtccaagaaacatgtcacacgaggctctgagaagaactcgacaaacattatagagtggaagaaaaagacagtggaatctaaatcttctgcctgggaagtaacagaaactgcaaagtgtatatcaaagattgagggagaggaagcaaagatgactgcatgggagaatctgcaaaaggcaaaagcagaggcagcaatacaaaagcttgtgatgaaacttgaaaagaaaagatcatactcactggagaggattttcaataccctcaggcggcactgtcactttcaagatggaattggaggggggaaccaaaaggcttgctag

SEQ ID NO: 5600 - DNA, 285 bp, Oryza sativa
  Clone ID: PAT_MRT4530_12371C.1
atggaggacaatgaaccgtcggtcagtttgaagttttttgatggtgatgcggtgacagcaagcaccaccatggcagtgtgcgccaattttcttgctagggacgtcaacgcgttgacctggtatttctcctacttggtgctcggaaagcatgcagctcagcagttggatacgagaactggagaagaggatgaattctggatttctggtcaccaccacccgctccacactgtgcagcggcgtgggggagaaaatgcgcgaaggatctgcccggctgcccctggctag

SEQ ID NO: 5601 - DNA, 654 bp, Oryza sativa
  Clone ID: PAT_MRT4530_12372C.1
ccgggctgcaggaattcggcacgaggcttaacttgtaattataatgataaaaagatccctcacattcagaatgtagaaacacgtgaaccatttctaaggattaaaaggtgttagctacagcccaaaatgtatgttagacttctgtttgaagctaaactataacaatgcatgctctatgagggaattatttcacttccatagtccatatattgaccttcatctttctactgctcctattgtaatcaattatttgctactctataggggatgccatgcatcattcaccattttagaaaaatcatattgagtggcaaaagatcttaccacatatatagtggtgaataatggttacaacaaagagcatgggtaccctaaaattagccattttgtcgattggcatatgctccagctcctccttgttggttgcggtcattgtcaacttgtcatattaaaattaaaaatagtcctcttatatctactgcagtcatttaccctttgagagatttaagtgaatgccaaaatatcttacctgcccaaagatttgactaatagcaccgattgttaaactaatgggattgcagtgaatattcttaccacatgcaactgtttgtcttacaggaccaaatatgagcagaggacttctatatgacctta

SEQ ID NO: 5602 - DNA, 276 bp, Oryza sativa
  Clone ID: PAT_MRT4530_12373C.1
gaccgaggggcgaacattgtagcggctaacttcctactactgagctagcgtactggattgcatgagtgcactggatcgaggaggtgaccggtcatagtggacttaacggatgactacaccgacaacaagtgcacgttgactgagtatagctaggcgcacaagctgtatgcactagacagttcatgcggaaggacacttaacattttgattactgagaaacaagccggtgctgcagcctttgggcgtgggacggtttcagcaggtggagcgtgataa

SEQ ID NO: 5603 - DNA, 281 bp, Oryza sativa
  Clone ID: PAT_MRT4530_12374C.1
tcgaaagaccaaccgaaccgccggcgcatcgccatagcaagaacgatggccgcgtcggcgctggaccagaccagcaggttcgtcgggaccgccactcggcgggatgagctagtacgccgcgtaggggactgagcgggccgcataacaatgcgcctgaccgtgaagagcgcgcgcaacagcatctggtatggacctgaacgccctaagtacttgcgccagagctcggggcagactccatctgacacgcccggagagtatccgccagactacggacgggacac

SEQ ID NO: 5604 - DNA, 577 bp, Oryza sativa
  Clone ID: PAT_MRT4530_12375C.1
gctatctttttcttcttcaataacagtgaaggctatcctagatataaacctaaataaatggaggagtaccaggaggaggccagctctcatatggaactacataagggaccgagcccatagtaccagttatagctcagggctaaactcactgccggtcttgtactgggacggcatgatggtctgcgactagattaaacacgctgcgttggctctgtgattaaacagcctcaactacctaaacaataatcaagctaatacctaacctgaggacaccaccgactccttctccggtgacaacatctacacgctatttgacgcgctgctgttcatgcgacacagtacaaccacttcatcagctgctcctacgattaccatgaacagccatttcagtgccatctccgaccagaccactatctctgcatcttcaatctaccaaagcatggggatctagagctataaagacggctgttgccttgctgacgtaaaaatctgttcctcattctcagaatgaaatactctttgcatattatctgtgaatccaccaccagccatatgggctatatattttacaccaccc

SEQ ID NO: 5605 - DNA, 448 bp, Oryza sativa
  Clone ID: PAT_MRT4530_12376C.1
ctagacgctatagccgtcgacgctgcattgcttgtatgtcactgtcagtgactgcctcctcagagaggatctatgcaccgacgtcgccagtgatgcgacccgagcagcacgagggcatcggcctcggagcacgttgaagcggccgacgatgatgcgggtccggtttcggcgccaccgcatctagatcaggtctctctgcggcggaagcagttagcatggcgggggtgatggccatccgggcgagctccacctctgctgccggccacccgggcgagctccgcctcagccaccggtcgccgccgcttgggccggtgtcgtggaggataagggtggcgagcgtgcaggcgacctcgcccttttcagagtaggggttggaggcggagacttgcgcccagtgataggaggaagggatgggggattgtaactctggaatgcagtgacacttcat

SEQ ID NO: 5606 - DNA, 201 bp, Oryza sativa
  Clone ID: PAT_MRT4530_12377C.1
atgacggccctcctcgctgccgtccgcctcctgcaaagctccatctttcacgtcgccgacacccgtgctttgcgttcgctgtcgccgcccgctctccccgacgcgcccgcggctgagtctgaaaaactagcagtagtggcgcccatgcctccatctgctattactcctgtggtggccactgcaaatagaagtccgtcatga

SEQ ID NO: 5607 - DNA, 376 bp, Oryza sativa
  unsure (1)..(376): unsure at all n locations
  Clone ID: PAT_MRT4530_12378C.1
gggcggagaagggggaggtggtcggcggtgggctggatccggagctcagcgtcgccaggatctacctcgggagaattgtgagtncacgaagctgtgtaattctgttggtgtatcttagaggccgcgattttgttaggggttttgggggtggagctgcaatgcgtggtgtttttaccacggaatctgtcgatttgtattagtttataaaatatggattagtagctgctttttttttggatcgtagctagtgtagtatctagttaacggttctggcatttatcggggttttagtatggtgggcgttttattattttgtaatttttcttcccgggttcttaaattggagtcctttgatgtnaaaaaaaaaaaaaaaaaa

SEQ ID NO: 5608 - DNA, 135 bp, Oryza sativa
  Clone ID: PAT_MRT4530_12379C.1
ctgtgtgattagatatgttttgtaattttttcatgctagctgtccgaccgacgtgtgtgcggcagcggcaagcattttaattttagtagagaatgatagtactagtgtgtatggatgagtggaagctatgactga

SEQ ID NO: 5609 - DNA, 515 bp, Oryza sativa
  unsure (1)..(515): unsure at all n locations
  Clone ID: PAT_MRT4530_1237C.1
ccgctccgggcaactccagcttcgggcaacgtcagcaatggcngcagggatcaggtgcatgcaggtggtggccgattgaaggcatcaagaaattcganancctctcctacctgccaccgctcaccgtggaangaactcctgaagcanatcgaattanctgctccgttccaaatgggttgccctgcctcnaattcancaaggtcggattcctctaccgtgaanaaccacagattcccccngaatactaacaatggcaagtttctgggaaccatgtttgaaactgccccatgtttcgggttgcacttgaanccacccaaagtgctcnaagganctccaaagaaggccanaaaggcgttccctgatgcattcntccgtatcatcggcttcnanaacgtcanggcaggtgcaactcatcaacttcatcnccttacaaacccccccgggctgcnaaagaattctngtnggcaactaaaaccctccatcctcatangtancctngtttaattgttccacct

SEQ ID NO: 5610 - DNA, 364 bp, Oryza sativa
  Clone ID: PAT_MRT4530_12380C.1
tgcaggattcgcacgaggcatctcttgtcttctcgcctatctgtgagcattggaggcgtggggcacggagaccctggaggcgaggttggcgctgcggaaggtcgtcatcaccaagctgcccgtaccttgtcgtcggcggggcggcaacatcgcacgggcggaggccggcagcaggatgcgctccttgctcgatccctcccttgctgcctgctgctggatgggggagctcgcagcacatcggaggagagagaaatttagttggattgtcttgtgcttttatgtggccctattgaagaggaggaagaaatcaaatttcgactggtacaattttgagtttttgatgtttcagccaatgtatatggat

SEQ ID NO: 5611 - DNA, 369 bp, Oryza sativa
  Clone ID: PAT_MRT4530_12381C.1
atggccagattcaacctgaccctctcccgcgacaccgcgaggccacaaaccgatcgaattggagggatattgggaggtaaggagtactcggcatggcatatgcagtttgctctttgtcttgcaaacctggatggcctcctccatcgttgtgcaatcggtgctgcacacaactcactctgccgcgtcctgctcctgcatgaggtctgggagtgggagggagaggctgctgctgccgctgctgctgcagaggctgcagctgaagaccgggcactcaggggaatctgggcggttggcctcctctgccggtggcagccacagccacaggagtgcagccgcaaactgacaatttcctgcactccactccactga

SEQ ID NO: 5612 - DNA, 382 bp, Oryza sativa
  Clone ID: PAT_MRT4530_12382C.1
atggcggatgacggaggtagatttggggaaaacccgtcgccgatgtcagcgtctacttcccccacccgctgcccgtgtccatggctatcgcctcgtccgacgcgcaccaggtggcggcggcaacagcaacaaccccttgctgggatgaagaactccttcgtaggcacagaggacgacgacgaggtgggcccagggatgaagtaccgctggatctatgacggtcaccgtgtccaccaggaggagacgagatggcctcagcggtggccgacagcaacagcccgaagcagaggtggaggagcagcagggggggctcgcgattgccgttcctcagctcttccttccggcttgtttcgggcttcggccgccgcccgctgcccaccat

SEQ ID NO: 5613 - DNA, 816 bp, Oryza sativa
  Clone ID: PAT_MRT4530_12383C.1
gtgacggcaccaccactctttccaggggtaaccagattgagagtcgctcggtgactttcctttgcacccaaccttcttcttgttatgccaccacgtatccgggctttgcgcacggtcctcttggctctcgccgataacttctgggtggggaacattcatggcactctcacggtccctgtcatttcttagttactcgcgctctaggacgcattgctccctcttcaactcacttcaggttcagaggaccattttgtctggcgttggacgagtgaccaacgatactcgacaggcttggcttgccatgcgttatttctcggccaacaatcctttgcttgcgccaatcttctttggcaagctaaaagtcccgttaagtgcaaattattcctgtggcttgcgttccagcaacattgttggacggccgaccttcttctcaagcggggtatcaacagccactcggcctaccccttctacgcccaagagctggagacggcgaaccacatccttctcgattgtgtttttgctcgtcaggtctgacgccaagtcttgtcttcctctggctggtctgacctcgcctcttctcttggctgctcgctctaggtctggtgactgccttccagggcacgcctatcagagcatcttcgcaatggtttcgattctctaatcctcttgatatcctagcaggtgtggaacgaacggaactctagatttttcgactactcactcttttcaattttggtggtattggagttcatccgtttggaaggtcgtctctagtcttttgtcggcgctgctgtttttggagtatttctaggattt

SEQ ID NO: 5614 - DNA, 1524 bp, Oryza sativa
  Clone ID: PAT_MRT4530_12384C.1
atggctccgtcgctggagaatcctattgttcctttaaaggagcccgtgaagtccagcgagtccacctccctctcctgctccaccaccaccacctcctccttccaaagattccttctcttcttcttcgtttcaggcgctgcgcgtctgcgggatttggggaggggagcggcggcggagatgcacccgaagctgtcgcggttcgcgcacagggtgctctgctgcgggaggaaaggctccggggaggatttgagtgatgaggggagcggatcgttgaggtgggtgttttcattgcgggagcttcggtcagctacaaatagcttcaactatgataacaagattggagaaggaccattcggaagtgtctattggggacaagtttgggatggttctcagattgctgttaagaagttgaagtgcgcaaagaatgggacagaaacagaatttgcttcagatgttgaaattctgggaagagtgaggcacaaaaacctcttgagtttccgtggatattgtgctgatggacctgaacgcgttctggtgtatgacttcatgccaaattcaagtctttatgcacatctgcacggaacacattctacagagtgccttcttgactggcggaggagaacatttattgcaattggtgctgctcgagctctagcgttagcacatcttggtgactttggtctgataaggttcatcccagatggggtggatcatgataagataatcagtgaaaaccaacgtggctatcttgctcctgagtacattatgtttggcaaacctacaataggttgtgatgtctacagctttggcataatactgttggagctatctagtgggagaagaccagtggaaaggtcgggctctgccaaaatgtgtggggttcgaaactgggtgctccctttggcaaaagatggcagatacgatgaaattgtggactccaaactcaatgataagtattctgaatctgaactaaaaagagtagtgttggttggtctggcttgcacacacagagaacctgaaaagagaccgacaatgctcgaagttgtatcgatgctgaaaggtgaatctaaagagatgctttccaggcttgaaaatgatgaattgttcaggccagactcgacggtgagttcccatggaatgtcaacaccagaggggagctcggactgtgtgcccaagaatgatcaagaattggcagcggcatgatggattagtaccctaggaaatgtagagtcgcattttttttgtgggattggtgcttggtctgcttggtttggcatgattcaaatgtacaggcattgtcatttgtgaaggtttctcctctttttggagagaggaaattagatgaatgatgagttagcagttatacatggtgctttttttggcaaagaattattatacatggtgctttttgtgtgcactggatagaagatccatatacttggcctgatgtttgggtatgattggtcatgttgtcatataaattattctttaatgctgaaaaaaaaaaaaaaaaaaaaaaaaaaa

SEQ ID NO: 5615 - DNA, 462 bp, Oryza sativa
  Clone ID: PAT_MRT4530_12385C.1
gtctgagcagaacgatgaagatatattgagcatagtacggaggcactgggaagagggagcaattgcagagatgattgatcattccttaggaagaaactacagtgagaccgaggtgctgaaatgtgtcaatattggactcttgtgcgtccagcaaaaccctgtagatcgacctacaatggcggatgtcatgattttactcaatagtgacactacttgcactatgccagctcttgcacctaggccagcatatttgatcgatgggacctctggttactcccagaccgtaacacaatggtccggcaggtagcagggggccgaagcagatctagcaccgttgttggcttgttgctgcttgctttgttttatattgtaagtgtatcagttctcaatttgtattccatgataaccaagttcaactaataaagagtaaatatataccattgaaaaaaaaaaaaaaaaaaa

SEQ ID NO: 5616 - DNA, 177 bp, Oryza sativa
  Clone ID: PAT_MRT4530_12386C.1
ttattcaccataatcacaccagtacagtatttggggtagcctatctaactgttgtcgatttggcgatctgtagtattgactcgtagtcgacaacagggtagccttcctcctcgaatccgcatccggcgagatcagagacagcgctatgtctctcctgatggtagccataggcaccat

SEQ ID NO: 5617 - DNA, 271 bp, Oryza sativa
  unsure (1)..(271): unsure at all n locations
  Clone ID: PAT_MRT4530_12387C.1
ttnnnaaaacagtgtaaacagcatgggcataaataaatacgggggaaattaaagttaatattcttgcaataaaagttatagatataagtttttgatacaaaggttaaaactgaattttacagtattcaaagtggtacactataaccacaattgttttatttttttgacctttctttaacaataattttttcataatttttttctatgtttatcgttttatttatacatttaattttttttttttaatttccgtcatttaattaatttttta

SEQ ID NO: 5618 - DNA, 1388 bp, Oryza sativa
  Clone ID: PAT_MRT4530_12388C.1
gaaattcgtctcctccgctcctagcgccgccgagtcgcggctgaacagaacaagggagggaggggcggcgatctccatctggcgagcagagcaggggaggggatcctcatctggaagaggctcttctttttaatttcagagccttaaccttaatacaagtaacagtttgtttgttccccgatccgcccctgctgctggtacttgggctatttgattcctgcatagtttcagagctagagctagtgttgctctttacagctttgggcggattcgcgatggcggatgaagagtcgtctgacttcaccttttgcaagatcgattttgagggagatggtggtctggagttccctaaagctatccctgtggcaagtacacctggtgatgctggtggcggtggtggtgacgatggtgtccggtcttgtgaggccttttaccatttctcaccttttcatattcaccggcagctgcatcatcggatgactcctccagggagcgactcctacggtgcttatggttgttggaatctgatgttgcatcctcatcgcttgatctatgatgtttcttatgtcttgacctgcccctctcctcagactcagaccctgagtcatcaccagatgatcggtggtggtggtgcctgtgactcctggaactggaatggtccttcttggaagatctcctctcttcatcatcgctgctatagtctgaagcatcagaatcagaccttgatgaatgtcggcgatgctttctcctgtgtgagcgcttcttccttcgattttcttcttcagacccactatcatattcatcactatcagtatcatcgcttgagtctgagcttctcctctttgatctgcgcttgtgcctcttggcttcatcggaatcagagtgaccgtgtttcctgtgccttttgcggtccttcctcttcctgtgcttccgatcaccatcactgtcggaatcactttcagagtctgaggaagaatggcccctccttctgtgctttcttgacttaagcttcttttcctttgcttcagcatcagcttttgccttcgctgctgcttcgagcttttgctcccatttcagtggggcttctttcttctcaaggattctcttctttttctcttcaagcagctgtaggaacttcttggagtccatcccgacagatcagctacagacttaaaacctgtagggccgtgaaatgatgcaaggaggtgcatcttgtcgtccgtaagcttcaaatgtccagaaaagatccctcctttttccccttttactgagccgatagttcactggattggacgggagacgccgccgcgaggggaagagaagatctggagcagccgccgcgtcgaggaaggaggagaggggtaaggcggcgcgcgcccacgcgtccg

SEQ ID NO: 5619 - DNA, 2094 bp, Oryza sativa
  Clone ID: PAT_MRT4530_12389C.1
atggacacttgtgttgctgcagggccaaacccccaggagtgtcttcctttctcctgtggtgatcttggcaacatatcctaccctttccgtctccaaggcgattcacgtcagtgcgtttctactcctcgtccatggtacaacctctcctgcagcaggggcaaggccaccatccatatcaacacaagaaagtactatgtgattagtatcaactatactcgtgagaacttcttggttgtggatgccaccatgcagctggatgatgatacaaacggcaccagctgccctcttcctcgctctgatcaccttccttacatgatttactggtctgatctgtcttcaatcgattcttatggttttaaagatttggtcactgcttcagacacttgggcatgctttgtgaattgttcccgagcaataacgaatgatagccggtacaagcccgttacttgcctgagtgggaacaattcattcccttatgtgtatgtctatatttatgatgattatggttgctgtcctgtcaaaaggcttcaaccttcctgtcgatatttggggatgattccctttgattacgtctatcaaccagggtcatatgatgatgatatcatgtcaaatgtactacaaagtgcaagttacagagatatcgtgggattcataaggaagggattccgcgttaattttcccctttataataacgaccagagggctcccacgatcgtcgagagatgcctaaacaattcaatgagctacttcaaggatcagatatctggagcaagcatcccgcatctaactcgcgctcttttctggactgagatacacttcgtacaatgcgtatctactaaccacgactacacaataaagttattttcggttgtgataaccatagtatctgctattgatgtcaccaagctacttttcgttctatgcaggttcgtgttggcaccgctggtggtactcacatttcttgcccacaagtactggaaaacaaggatagcgatcgatgcagtggagaagttcctccggatgcaagagatgctaggtccaaagaggtacgcctacacagacatcatagcaatcacaagccatttcagggataagttgggccaaggaggatacggatctgtatacaagggtgtgcttctccctggtgacatccatgttgccatcaagatgttggatggaaaatccgactgcaacggagaagacttcatcagtgaagttgccaccataggcagaatccaccacatcaacgtggttcgtcttgtggggttctgctccgaagaaatgagaagagctctggtttatgaatacatgcctagaggatctttaaacaggtatatcttctcatccgagagaagcttctcgtgggacaagctcaatgagattgctctgggcattgctagagggatcaactacctgcaccaagggtgcgagatgcagattctacactttgacatcaagccagacaacatccttctggatgacaactttattccaaaggtcgctgatttcggccttgcaaaattgtacccaagggagaagagctttgtgtcagatagggctttacgaggaacatttgggtatatggctccagagatggcatgtcgtagttttggcgtcatatccagcaaatccgatgtttatagctttggaatgctgctgcttgagatggctggaggtagaaagaacgcagacccaaatgcaaactcaaattcgagtagggcatactacccagcatgggtgtatgaccagcttatagtagatcaacaagttgatgagatatctagtgctattgacatgcatgagaaagagaggaagctgtggcttgttgtgttttggtgcatccagatgaaatcatatgatcggccaacaatgagtgaggtcatagagatgctcgaaggggatgttgatgcgttgcaagtgcctccgaggccatttttctgcgatggagatagcacgccgcctcctcctgtgcctgtgatggattcaatttgcctttactcctccgagttgactgcgatctcagaggaggaggatgtggatggaataactcaactagatagtagttgcttgctaggctatgagcgaagtatttga

SEQ ID NO: 5620 - DNA, 3213 bp, Oryza sativa
  Clone ID: PAT_MRT4530_1238C.1
atgggtgtcaagactttacaggtatcagggtttgctctagatgacagtgctgattacgtcaaggatttgttggagcgaattgttggctgtgggaatgtgtatgcagtaaagctcaggcatccaaagaacgtcactgctacctcaagagcatatgctatagttcagtttcagaccgaggaacatgcttcacttgtaaaaaatgcggctcaaagaaagatactccgccgtgggcattattatctgaaagtccatccttcagatcgtgacattgttccaagaccaagagtttcaatgttcaagctagaggatgtaacactgcattttggttgcctgcttaaggaaacaattttatctgctctgtggagtcgaaaaggagtttctgttgagtttggtttcaatctgaaaaagatttacttttacctgcagctacccaacagctcaatcgaatataaacttgaactttcccatgagagcatatgggagatccagcttcaacgcccacccaagtcacaaacgaagtttcttttgatccaggttcaagctgcacctaagatttatgaacagacaccacgccgttctggtgttatgtacgaagatccattattcaactattttagggatcatacagatgatcaatggaccaggacaacggattttacttcatcttctagcattgggcaatcatatattttatgtcttgaggtaccacgtcgatgtgatctcccaaacattcgtgactacttcttttactatcatgagtacaatcatgacttcgagtgccggagtggggggtatccatattcaagtgatactcgctttgttccgattgtgaaatctcgtggttatgtcccctatgagatactcttcaagatcaaccatttggttcagaatgggacacttagcggaccgacagttgatgacagcttctttcgtctggactgcgagaagctccgtgcaactgatttatccccccgttctgcttcaggacatgatgcaaacagaactgctctgtataagagagttctgtcagtcctttcagatggcatcactattggtggcaagaactttgagtttcttgctttttcttcaagccagctccgagataactctgcatggatgtttgcttctcgccagggattagctgctagcgacattaggacatggatgggggatttccgtaacatcagaaatgtagcaaaatatgctgcaagacttggtcagtcttttagttcctcaaccgaaacattaaaggttcagaagtatgaggtggaagaaatctcagatataaaaaatggtacacagcatgtgttctctgatgggattggaaagatatcatctgcttttgctaatgaagtggccatgaagtgcaacctgaaacgctttgctccttctgcttttcaaataaggtatggtggttataaaggtgttgttgctgttgaccctacatcacgctggaagctttccttaagaaaaagcatgctaaagtttcagtcagacaatatcacagtagatgtccttgcatacagcaagtaccagccaggcttccttaatcggcagctaattactcttctttcgacacttggagttagagatagtgtctttgaacagaagcaagaagaagcagtgaatcagttgaacaaaatggttactgatcctcaagctgctatcgaagcaattgaacttatgcccatgggagaaataacaaatgcagttaaagagctgttgttgtgtggctaccagcctgatgatgaaccatatctttctatgctgctacaaacttttagggcatccaaattactagagctgaaaaccaagtcaaggatattaatcccaaaaggacgagcaatgatgggatgcttggatgaaacacgtacgctgaagtatgggcaagtgttcattcgagctacttcgggtgtaaatgacaatgacaggccgcatcctaatgagtgttcagggagtgatcttgacggggacatatattttgtttcttgggacccatctctcattccgcctcgtatggtgacacctatggactatactccagcaccaacagaaacattagaccatgatgttacaattgaggaagtagaagagtacttcacaaattacatagtcaatgagagtttaggaatgattgccaatgcacatgtagtatttgcggataaggaagacctcaaggcagagagttcaccatgcattgagctggccaagctcttctccattgctgttgactttcccaaaactggagtgccagccctgattcctcctgaactacatgtgaaggagtatcctgatttcatggagaagcttgacaaagtcacctatgaatcaaaaggagtaatcgggaagctctacagggaaataaagaagcacacccctcacataaagcacttcacaagggaggtggcaaggcggtcttatgacaccgatatgattgttgatggctatgaagattacatcactgaagctatggcattgaaggacgagtacgacttcaaattgggtaatcttatggatcactatggaataaaaagtgaggccgagataataagtggatgcattcttaagatggcaaagaatttcacaaagaaaagcgatgctgatgctatcagattggcggtgagatctttgcgtaaggaagcaaggtcaaggttcagtgagatgagcttagatgataatgggcatggccatgatgcctccgaagccaaggcatccgcctggtaccatgtcacttaccaccctgaattctggggttgctacaatgaaggatatgagcgaccacactttatcagctttccatggtgtatctatgagaagcttttgcgcattaagcaaaggaggaagttcgtcaggaagatgcagcccgagttgttctctctccacaacttgagaatttgagtgtggccagcatgtttgctcttatacatatatctgaacttttgcattgaacatgtctattctggtgcttgaatgcttactgaatgcgggcgaactgctatctagcttgtgatgtatatatgtgtttccacaaacctttggattcagtcgttcacttggtgccttcggtttattgtaatgaaatttggtattgttcccgccttttgcgtaagacgaactgcagtagtagtaatgtaagacaagttgctgtgaatcgtatgcgagtcccatatatgaatgtgtgatctgagatcaacgaatcctttttttctttgc

SEQ ID NO: 5621 - DNA, 2384 bp, Oryza sativa
  Clone ID: PAT_MRT4530_12390C.1
aagaaatgtactgcacaccacacgcagtacagtactcctacatggctaaaaacgttatgcagctcgcaatactatccacgcaacgagtagtattgctgctgtggcttctccatgcccctgctgcggcagacgcagcactgactacggtggcggggtgcccgagcaagtgcggcgacgtggacatccccttgccgttcggcatcggcgaccactgcgcctgggagagcttcgacgtcgtctgcaacgaaagctttagccctcccagaccgcacacggggaacatagagatcaaggaaatctcggtggaggcgggggagatgcgcgtgtacactcccgtggccgaccagtgctacaactcatcatccaccagcgcccccggcttcggcgcctccttggagctcacagctccgttcttgctcgcccagagcaacgagttcacggccatcggctgcaacacggtggcgttcctagatggcaggaacaacgggagctactcgaccggctgcatcacgacgtgtgggagcgtggaggctgctgcccaaaacggcgagccatgcacggggctgggttgctgccaggttccctccatcccgcccaaccttaccaccttacatatttcgtggaacgaccagggcttcctcaactttacgcccatcggcaccccttgtagctacgccttcgtggcccagaaagactggtacaatttcagccggcaagatttcggtcctgtcggcagcaaggacttcatcaccaacagtacttgggataaaagtgtccccacggtgcttaattgggcaatcaggaacaatggatcgtgctcatcaattacagggctagctcctgcctgtgtcagcgccaacagcaactgtgtcaacaccagtaatggagtgggatacctctgcaaatgctccccgggatacgccgggaatccctatgccactggcgctgacggatgcacaaatatcaatgaatgtgatcttagaagagcagagcctgccaaatacgagaaactctatccttgttacagtggtagcaagtgccatgacacagagggtgattacaaatgcaaatgccggttttggcatagaggggatggtaaactcgacaagggatgccgggccataattccctggactgcagttgcggcagtagcaacacttttggccagtgcttttctggcagccctgctgctatacattcgcagggagcgtaagaggcggcaacggaaaggattattcgacaaaaatggtggcaacatactacggaatgtattgaacatcaaaatctacagcgaagatgagctgaataagatgaccacaaactacagcaatatgcttggaaacggttgcttcggcggggtatacaaagggatcaccgacgagaagcaagaggttgctgtgaagcgcttcaacccacgagacgaggaacgcagcagagatgacgtggtacgagagataaccagccagtcctctatccagcacgacaatcttctccgcctcgttgggtgttgcctagagacggatgtccctaggttggtcttggagttcatccccaatggaagcctccatactgtgctccacggtgctggccggaatatgcatatccctctattggctcgcttagacatcgccgttggcagtgcagaagctctggcgtacatgcactccaacattggccacaacagcatcgttcatggtgatgtcaagtccgctaacattcttattggcgacaacatggagcccaaggtatctgattttggggcatccaagctcatgtctgtcgcgaagtacaacaagtggtccgtctttggggatttgaactacatcgaccccgtgtacacgagcacaggagatttcacggataagagcgacgtctatagcttcggtgttgtgctcctagagctcatcacccggaggaaggccaagtacgatgggacaagcctccgggtacaatttgataaacattacaaggatgatgacatgaggagaaagatgtatgatcaggatttgttgtctgacgatgcccaacctcactgcttggagtgcctcgacaagatggcagacatcgcggttcaatgcctaagaaacaacgtcgatgagaggccaaccatggcagaggtactggaggatcttaagaagttgagagaaagcgcaaaaactcacaacacatatccaactcgtgtagacggtgaagggaagcctgatcgttaagctcttaggtggctgctgatatgcatggtttcatgcttgttcttagtgtttattttactttttgagtctccatagcgaatgccaagttggtgtgatctacatgcgagtacatacactactacaccgtgtgtgattatatatttttatgctaaaaaaaaaaaaaaaaaaaaaaaa

SEQ ID NO: 5622 - DNA, 394 bp, Oryza sativa
  Clone ID: PAT_MRT4530_12391C.1
atacttgtgtttaggcgaaacttaaaattggggggaaaaaagggattgatttgtctcctctgcaagtattttttgggtgttttagctgctgcgtatgaatttgaatcaatggaacaaatcacaaaaaatggtgagggggttttgatggaataatcattttgcggaggctcctctccatcatcttgttgtactgcacttgcagcgagcgaggagatcgttttgcctttgcaacttcaccggtagagcggctatcgcttgcaactcgcactttcgcttaactctgaaacctgaaactttttttacagggaacagtaaactgaagaaacaatcttcacaagactgaagaacagatcaggaacaaccaaagaaggcgttttttttcttccccttttat

SEQ ID NO: 5623 - DNA, 270 bp, Oryza sativa
  Clone ID: PAT_MRT4530_12392C.1
atggaggaggaaaaacgtggggcgcttggtgggatggggtgggattggggatcgaagcgctggtccaccatccgtagccgagaccgaggcccaggcgagaagccatgctccctgctgggccaagccaacccggaccagacgctgatcttcatatcgaggatcgatctcgcggccgtccttctcgtatcatcggtgctgctttccagctcgatcgtctccggctcgatctacggccggctggtggcacgttgctttttcttcgatgcttag

SEQ ID NO: 5624 - DNA, 213 bp, Oryza sativa
  Clone ID: PAT_MRT4530_12393C.1
atgccgggaggtacacccacccaccctatatgaccagggtggtcaaacaagcaccaaggggcaccgcttcatggtcaatccaaggaagtggggcatacacacagatctgtacaccggcatccacgcgttccagggctgtttaggtgaagcgccagtgcgtcggccgtggcacggcacgccgccagccgagcaggtccaggcagagactgtctg

SEQ ID NO: 5625 - DNA, 1661 bp, Oryza sativa
  unsure (1)..(1661): unsure at all n locations
  Clone ID: PAT_MRT4530_12394C.1
ttttttttttttttttttttttntgcactggccagaaccaggttaaaatgaagtttcgtattcaggaaatatgaactgtccacacgaggtattttttctcaaaaatatgtttctaaatggaaatgccaacttgtcagtaacaaatatgagcaatacagcactacacagatcaaggatatctgaatgcattggacctctaagctacaattttatatatccagcatttgttgatcaagccaatccttcaaaaacaaccacctagtgaccgcatgactgcatcatatcatgtacaacagagcatcaagctgaagacctacatgcaagttcgtcagcaaacagttgatacttgaagcatgttactcaataaactcatcatcggtgctgtcataatcactatcctcatccagatcttcatcttccacctcatcctctactcgctccgacaaagtgttcgtgtcaaaagagttatcaacttccatttcctcgatgccaatcgtatcatatttcatgcgctcatcgaatttggcatcagaacagtttagaagccatgcaagagagcatgtgaatcccttcttcgccaccatctcatgccgtggccttacagtcgactcaaggccatatgtaaagaatgcagggaattcaaccagctcctccaaatccctctccatctcattctggaagtactcaaagctcatcttcattatatccatgttcaatgcgagcagctgtgggcatgctacgaccatcttgctgacctgagagagcaagaagccacaagatgtaaggaaattaacatgctttagaactgcagttcggccaaggctaatggcttgtggcatcctctctatcactctaccaaaatcttcactgctgaccaaaatgctagactcaaacaagctctgttgtgtagcaagcttgtctctcagctcaattccaagaatgtctgggtattgtgccacaatgaatgctaatgcctccttcctcaccccaaattccagaagcgcctcaatattaggcttcaccttgtcctccaacccaaaaccaagaacatatggcttcttctcgatgattcttgcaatagctagcctctgcaacccaatgccctcaaggtgttcgacgaaaggcttaatgatcttacccacccgcatgcccagcacctctgggaaacgggtgatgacgctgccaacctgccgccttgccacgccaatgccgacgaggtaggcgatagaggtgctcatggttccctcgagcttgaagccgaggagctcggggtagcgctcgagcacccgcggcacgtcgtgcggcctgacgtccatgccctggaggtacttgacaacgggggcgaggtcgacgacgacgctggcgtggagcacctgcgggtagcggcggagcaggtccgggagcgcgtcctggcggacgccgagcttgccgaggtagtcgaggacggggaccatgttcttgcggacgctgcagcccagcgcgagcgggtacgcggcgaggtcctcgttggagaggtcgagggagtgcaggaactcgacgcgctcgcgcatgacgtcgacggtggcggggagctcgaggcctgcgagctcgcccgggtcgacgccgagcaaggcgaggaacgcgtctacgtttgcgcggcaggctgcgcggccgcgctccat

SEQ ID NO: 5626 - DNA, 331 bp, Oryza sativa
  Clone ID: PAT_MRT4530_12395C.1
atggggatccatagtcctcggagcgggtgctgaaatgcgagaaagactgaaaaaccgggccgtggcaagtctcatgtgttgggactaggcttatgtgttgggcaagccgcggagtgcgggattaaaagccttagattaggaaagtggtgtgaccttgcccgatgggtgggaaggtcatggtgatgttgggattgtggaaaactggatgcgagggtaaaccggaccaagcggaagagttggagtcgactgttcggaaataatgctgatgaacagatgtcgaagatggtggagtcgggacctaggttcaccagtcgatgcctgtggagtacga

SEQ ID NO: 5627 - DNA, 333 bp, Oryza sativa
  Clone ID: PAT_MRT4530_12396C.1
atggggatccatagtccttggagcgagtgccgaaacgcgagaatgactgaaaaaccgggccgtggcaagtctcgtgtgttgggactaggctcatgtgttgggcaagccgcggagtgcgggattaaaagcgtacatcatgaggaaagtggtgtgaccttgcccgatgggcgggaaggtcatgttgatgttggaagtgtggaaaattggatgcgagggtaaaccggaccaagcgagggacttggagtcgactgttcggaaacaatgctgatgaagagatgtcgaagatggtggagtcgggacctaggttcaccagtcgatgcctgtggagtacgt

SEQ ID NO: 5628 - DNA, 327 bp, Oryza sativa
  Clone ID: PAT_MRT4530_12397C.1
atgccggcgcagtcggagagacttcgcttgccagcggcggcgccgatgccgcgcggtgcgcacgctctctacggactactcgcgctgctcggcgcgtcggtggtggtgtggtccgtcgccggcaagccgcccgccgcccacgccgggcacgcactcgccggcttcctgctttggctgctggggatgatagcactgctgctgtccccgtacgccgcgcagccattgttcccggttgcaactactgccaatctcgccgtggagaaactgaagcatcgcttctccaacccccggacgccggcgcaggcgcaggcgccggctttggcttaa

SEQ ID NO: 5629 - DNA, 1317 bp, Oryza sativa
  Clone ID: PAT_MRT4530_12398C.1
atggcgccgccgccgccgccgccgcctgccgccgccgcctcccccaccccaatgctgctcgccctcacgggcctctccaccttcagcgacaggctcgtcgagttcttcaatcactggaactccttcatccgctatgccaccgccatctccgacgacttaccaccccttcccgccgccgaccaaccgcccaacctcgccgatgtcgccgagccagaatccactaccccgcacagccccgtcgccgtcgatgagccagaatcctctaccgcgcccaaccccgtcgccgtcgccgtcgccgagcccaagcctgcacccgtgccccagcccgaggagcccaggccgaaccgcggcggcgacccatcggcggagcatatgggccgcatctgcgagcgcatgggctcgggggagctcctccgcttcgtcatctcccgcatgggggacctctcctggctgctccgcgctgtcccgcccgcgctccgccgcgcccccaaccccgcggagctcgtgctccgggctatcggccgctactacatccgacccgggggcaggcacaccgaggccgcgtgcgagctcctcctgctgtcctacgtgcgcgccggctgccccctccgcccgggccaggaggccggggacgaccacctgcgggcggaagcccgcgaggcggcgctctcgtggcgcagccggcttgtgcggtccaaaggacgggttgccgctgccgccgccaacgatgcccgcggccttcttctcctcatggctgccttcggcgtgcccgtggagttcccgtcgcaggagatcttcgagctgttgcatgctgctggcggcctggcctgcgccgaggtgctcaaatgctccaagcatttcttagataagctgcgtgatgttgttgctcatatgctgaatagaggaatttatcatcaaaccgttgctacaataattgcatttgaacttcaggatgcattcccgctttctgcgatagcgacttgtgtcattgagagagttgggcgtacaaaggatcaagacagtcaagaacagcaccatctgccaggatcgaaagagaatgatgaagagaagctagctctactgagattactatccaaatacgtggaggatccaaaacaatgttccacagagaatttcagcattgctgataggattgcgatgctggaacaaagcctcgcaaagccacatcaagcatttacaggaacaaagcgcaagaggacagcacaggaggacagtgtagaatgcactcgagggcctaaatgttcatacactccagctgcttctagtgcctcacgtaacaaaaatcttgaaggatag

SEQ ID NO: 5630 - DNA, 1292 bp, Oryza sativa
  Clone ID: PAT_MRT4530_12399C.1
cacccctatccccgccgccgccactcggtgcgcggtcatagacgacggcggcggcgtcgccactgcagccgccagccatgctccacctccagaaacacctcctcctcctctccctccctccccgcgccaccgcctccaccctcctctccctccgccaccatggcctcttctcccttacccgcttctccgccgccgccgccgccgctaaatccgccggccacttcgccgtcgaggagtacctcgtggccacctgccacctcacccccgaccaggctaccaaggcctccaagtccatctcccacctcaagtccccgtccaggcccgacgccgtcgtcgccttcctcgccggcctcggcctctccgccgccgacatcgccgccgccgtcgcctacgacccgcgcctcctctgcgcggaggtcgacaggacgctcgccccgcgcctcgcggagctcgcgggcctcggcctctccccctcgcagatcgcgcgcctcgtcctcgtcgaccccgcccgcttccgccgccccaccgtcatctccaagctccagtactacgtcccgctgttcggatccttcgagaccctcctccaggcgctcaagaacaactcctacctcctcagctccgacctcgagaaggttgtcaagcccaacgtcgcgctcctgcgggagtgcgggctaggtgcttgtgatattgctaagctgtgcatcccgttgccgaggctgctcaccaccagcccagagcgtgtccgagatatggtggctcaagcagaaaacgtcggcgtgcgccgtggctccaagatgttcaggcacgctattctggccgtcgcgtacatcagcgaggaaaagatcgccgccaaaatgcagttcttgatgaagacattaaagtggtcagacgcagaggcgaggattgcggtgtccaagcttcctgtggtgctgaggagctcggaggacaagctgagccgtgtgtcggaattcttgatctctgaggtcgggttggagccggcatacattgcttacaggccggcaatgctcacttatagcctggaacgccggctcatgccccggcactgcgttctgaagtatcttaaggacaatggattgatagaatccgacaagagctactatagcgcggtccaggtgaccgaggaggtctttgtggagaaatacataagtccatacgaggacactgcgccgcaccttgctgaagactatgctgctgtatccagcgtaaagatacccaccagattcagattgaaaggaccaaaaacaggccatgcaagtgcgcaaactgcctaa

SEQ ID NO: 5631 - DNA, 218 bp, Oryza sativa
  Clone ID: PAT_MRT4530_1239C.1
ggcacgagcaccctctggaatcttgtttaacactagtattgtagaatcagcaatggcagcatacaccagcaagacctttgccctgtttgccgtaattgcccttgctgcaagtcccactcctgcaatcacccttatgcagtattgcccaccaacatgagccatgggcacctggatccttgtaggcagtacttggaggcaaactgtcgtgcattggttag

SEQ ID NO: 5632 - DNA, 479 bp, Oryza sativa
  Clone ID: PAT_MRT4530_123C.1
gtaagccatgggccatgtacatctccctgaaaagatgaacgaactgtgccactgtgagagattatcccaggacgatcggtaggaaattctctgcttttgctgaagttagcaggggacacagggctcgacgacaaggtgagagagaaggctacagtgcagcctactgtctacatcttcttcatggcgcacgcgaggccatggccatggcaatggcaatggcatcctaggttgccgtgccactgcattcaccatagccaacaatgccgtctctggctcctccaaaacggacaacctccaaggcccccacacatcatctagcttagctttagctagagcatgcgatgctgctgcttggctcatctcacccgtgtgagttcagttgtgaccctccggtcaaagcaatggctcgcctctccatgtggacctgtcctcctctccgtcggcagactactgatcgaggattagtgatagataaatat

SEQ ID NO: 5633 - DNA, 1678 bp, Oryza sativa
  Clone ID: PAT_MRT4530_12400C.1
atggacaagaagcagggcttcttctccgcgctccgggaggaggtcgcccgcggcctctcgccggcgcgcgctcgccgccggtcgcaggcggccgccgcggcagaggtggccgcggcgctgcggtacgcgggaggtggtggtgggggggagatgctggcgccgctcatggagggcccggatccggagtcgggagacggcgggagatcgtcgtcgtcggcggcggcggcgaggagggaagggtgggggcggtgggtgcgcggccagctgtcgcgcgcgccgtcgacggccggcgcggcggtggtcgcggcgggtggtggcggcggcgcggcgaggcggaacgacctgaggctgctgctcggcgtcatgggcgcgccgctcgcgccggtgcacgtcgccgccggcgagccgctcccccacctcagcatcaaggacacccccattgagacctcgtcggcgcagtacattctgcagcagtatctggctgcctccggggggcagaagctgctgtcatcggtgaggaactcgtacgccatgggcaaggtgaggatggtggcgacggagttcgagaccggcggccgcgtggtgaggaaccgcatggcggcgcgcgccacggagtccggccggttcgtgctgtggcagatggccccggagatgtggtacattgagctcgccgtcggcgggagcaaggtgcacgccggctgcaatggcaagctcgtgtggcgccacacgccgtggctcggcgcgcattccgccaagggccccgtccgccctctccgccgcgcactccagggcttggatcctctgaccgcggcgagcatgtttgccggtgcgcggtgcattggcgagaggaaggtgaatggggaggattgcttcatcctgaagctgtgcgcggaccctgagacgctaagggcgcgcagcgaggggcttgcggagatcatccggcatgttctctttgggtatttcagccagaagactggcctccttgtgcatcttgaggattctcacctcaccaggattcagtccaccaccggaggggacgcagtttactgggagaccaccatcaattcgttcattgaggactaccgcccggtggagggtataatggttgcgcacgctggtcgctccgctgtgaccctcttccgtttcggagaggttgccatgagccacaccaagactcgcatggaggaggcatggagcatcgaggaggtcgcgttcaatgtccctggcctctccatcgattgcttcatcccgcccaccgacatcaagtctggatccatcagcgagaccgtcgagcttcctcatggcgagaagagcaaggttggtcttctccaatgccatagtgctaaggtggccgcgttggagaaggcagacgacaacgtcgcgtggagcggagcactgcagcgagatttcaagtgatttgctgtctgttcatagttgcttcttgcagtgccagtgctactgactcattttgatggttgtagggtagcaagaaagagccaagggaggatgatttggagctttgcaaattccaaatgtcctgtaaataggaagcttaaggaattcacatggtcttccatatccctgaggaggcctattgtgaagaacccttacctatcttattcagatatatggtagtaggtagttgttagtaacttctgccgtcttcctttgtccgggc

SEQ ID NO: 5634 - DNA, 284 bp, Oryza sativa
  Clone ID: PAT_MRT4530_12401C.1
tttatttcctatcgagcacccacaaagtgctgcgcttcaagaggcctattcaacccccatccttgcacttgattttcttgctgataggcctccataaaagaagtttgaatggcctaataggcttgtgtcgaactactggtcgctggtgtcctgtgttggcttgtttggagtgtttatctacctgattgcaagccctttaaattccatcgtgtcaaaagcatgcaagttgaggctttcgtaatacttgtctaccatatataacgctgtcgtttgtccttttttat

SEQ ID NO: 5635 - DNA, 456 bp, Oryza sativa
  Clone ID: PAT_MRT4530_12402C.1
atgccagacttggcaaacgaacaaacagtcgagcaggatatagctcgctgtttcaagctcctgagtgcagaaggggcaagccaagtggttgtcaatgccgcgtttatgcagaagatctgtcatccagcaacactgctggaacgcaagccaaaggaaaatcttgcacttgacaggacccttagcctaccaaagcagatcgacacaagggaaaaagtgatgccccacgaagaaggtgtgaaattgggagatgacggggactgtgagggggccacagatgtgacccacccaagagttgtcaacaagagcggaggctaccgtgggtggatagagcgcagaagccagagccagcgcatgcggagagcgaaaaccgccgtccgcaagtccgagatgcccaggctaccgacgactttagggcggctgacattcgtccaagacacaaggcaacgctcaccctga

SEQ ID NO: 5636 - DNA, 276 bp, Oryza sativa
  Clone ID: PAT_MRT4530_12403C.1
atgacaggagcggtggcgacaagagccagcaccgcaacaggtggatccaccaccgccagccccgaaaagggcagatctagcgacggtggagtcgtcggatctgccctgtcagagggccccatcggcctggccggtcagaccgacgttgagtggccggtcagaccggccacggctcggtcagaccgctgtcagctcggtctgaccgaatacggcttcgttggctctgtatcggccacctcgagcagcaccatcccggccaccagagggccagtctga

SEQ ID NO: 5637 - DNA, 1101 bp, Oryza sativa
  Clone ID: PAT_MRT4530_12404C.1
tactcccaaaaggtctccaaacgaggctgcaccagagagagagcagagacgatcctccttgcagatggatcccataaccatcgagatcggcgaaagcaaaaatcgaaaaccctagcattccgctccttccaaagctgctaggacattagaaggaccaacgagtcaaaacccttgcgaagatgcgcaggcatgcaggcaaactttagctgtcggccaccagacctaaatagaatcgccacgggtgagggagataggatgcaatgccagacttggcaaacgaacaaacagtcgagcaggatatagctcgctgtttcaagctcctgagtgcagaaggggcaagccaagtggttgtcaatgccgcgtttatgcagaagatctgtcatccagcaacactgctggaacgcaagccaaaggaaaatcttgcacttgacaggacccttagcctaccaaagcagatcgacacaagggaaaaagtgatgccccacgaagaaggtgtggtaaggtgaggcgggggagtaacgctagttgcttgtccagcgccagacaagacaatcctcagtgctcggagtgagatggacgagttgcaccgcatcccatactaacagaaattgggagatgacggggactgtgagggggccacagatgtgacccacccaagagttgtcaacaagagcggaggctaccgtgtgcgtcgcctagaggcgagggggtagctaggatgagatccagagccagggatatcacagagcggccctgaatccactggtccaaccataagagggtcgactcgccatcactcagcatgaggaaggtggaagccacaaacatgtcaaagacggtccgctcaaggggtgacttgaggtcggctcagtaggggtggatagagcgcagaagccagagccagcgcatgcggagagcgaaaaccgccgtccgcaagtccgagatgcccaggctaccgacgactttagggcggctgacattcgtccaagacacaaggcaacgctcaccctgaaccgaatctgtccccgactacaggaaagcacagcgcttcttatcaaaggcaccactgactttgtcaagttgaataatatgccatcgtgt

SEQ ID NO: 5638 - DNA, 477 bp, Oryza sativa
  Clone ID: PAT_MRT4530_12405C.1
aaatctgaaggtgtttcgaacccacaaatgtacattccttgttttgctgctgttcaagattcctgctagccagtttcgactgacaacaggttgttactacctccatcacagaatataaaggattgagctaaatcccttgtattatgggacagagatggtacaagatttacaagttgcaatgataaggtcaggttgggcacagctaactaaggatgataggaagttaggaactaatcagtgcaaggtaaggcgtctccgatcatcatggggggcagcggccggccggaaagggaaccttgcaaacttgatattaagaacagcggcgtcgggtttcctctcgtcgaagcggtattcttggagagcctccatagcagttattgcacattttgcatcactgaactccacaaagcatagaacataggccctatcactactatgtcttggctccttatgcactagtctgatgtcccggacgcg

SEQ ID NO: 5639 - DNA, 319 bp, Oryza sativa
  Clone ID: PAT_MRT4530_12406C.1
ggaaaaaaacagggggggctttttattagggcttaaaaaactaaaaacaaacccgccaaaaagtttaaaatactgggggaatttttttttttttggaaagacctatcctttttatttagaacataacttgggggccttgttttccgactcatttgaaaagcctaggtgggtttgttgttgatttttaggagggagggccccgggcttttttcccatattattttaaaggtttggggcttgctccctgaattggcgggaagaattagcgatcacatccactggcttgggacggaattttgggtttttccttgcaaggggg

SEQ ID NO: 5640 - DNA, 1110 bp, Oryza sativa
  Clone ID: PAT_MRT4530_12407C.1
atgagaaaaaggcagcgagaaggtgtaagatattctcccatgcttcttagagatgtggagcgagatgcacggctaaatcgtttgtttaatggtaccgaggccaactgtgtttctgagctacggatgcgaaaagccatttttcataagctttgtggtcatttcagatcgcgtggtcttttagtagacaccttgcatgtaacagtggaagaacagattgcaatgttcatgcatatagtgggacataaatggtgtaataggtcagttggttttgagttttttcgatcgggtgagacagtcagtaggtacttcaacgctgttctggattcacttgtttcaatttctaaggaactaatatacatcagaagcactgaaacacatccaaagatcacaagtagcccaggaagattccacccgtattttgaggggtgcataggagctttggatggtactcatgtaccagcatctgtccctgcacatatgcaggacagatttaggggtagaaagaaatctcccactcaaaatgtccttgcggctgttgattttgacttgcgatttatttatgtccttgctggatgggagggatcagcccatgattcacatgtgcttcaagatgctctaagccgccctagtggtctaaaaataccagaaggaaaattcttcctagccgatgctggatatgcagcaagacctggtatactacccccataccgtggtgttcgttatcaccttaaagaatataaaggtggtagagaacctcaagattacaaagaactatataaccatcgtcattcgtcatgtagaacaacagttgaacgggcatttggaaccctgaaaaatcgatttaatatcctcaagagtcagccaaatttccctttgaaaacacaagtgaagacagtgattgcttgttgtacgcttcacaattggatactggataatggtgatgatgaatatgtatatgaccatgaaacctggtatagagtcttgccaaggagcaatagggtatatcaagatatccgtgaggagaatgaggcttgggtgcttaaacgagatcagatggcacaagctatgtggcaagataaagctgggcaatctacttctgcagctaattaa

SEQ ID NO: 5641 - DNA, 753 bp, Oryza sativa
  Clone ID: PAT_MRT4530_12408C.1
atgctgaagttgacaattcgcaagaggttgccgggtgctgcttcttctctgatgcttcttcccctgcataaggtccaggctaggctagctgaccaaggagaaaagcacaacctcaaatgccatgttgaagaaagacctatggcgtttgaggttgtcacgtcaataaactttaaactttgtcatgcgaacacattaactttgcgtggagaaaaggtcatcttcttgcatgcaaacgggaaggccatgggctcatgcgctagcaaccgcagtacctcgcgagaaaacaagggaaatcaccgtgtcagccgtcggtacggcgtggacggcatcaccgtgttcggtcgagcacacgaggtgaagctgacggccaaggtcgacggccgagtttatcgctgcatcaaggtcagggaggggatgttcctcacgctagcgacggagtacaacatgcctgcgctgatcggctgcccgggggacgaaccgaggatgctgaccccgtacgtggatgacgacgaggacgaggacgacgccaccgagtcaccgaccctggcgcgcggcattaccgtgtgttttgcaagaacctgccgttggaggcatggtggtgttctgaaaagtgaggtgccacccaaagcagaagacgcaaatcttgctggagtggatcctagtgcaagtgtggaagctgagccaaatggtgtgggctgcagcatagacccagatgaactgaaagggctgggtgatggagcaggacttgtttga

SEQ ID NO: 5642 - DNA, 153 bp, Oryza sativa
  Clone ID: PAT_MRT4530_12409C.1
atgactattaccacctaccggccatctcaatttttgggtagcaaacaacaaagaaagatcaatttggaatggagggagtactactctagccttgtgcagaaacttcattctttatccagagtcctagtactagagcactcagttgcacactaa

SEQ ID NO: 5643 - DNA, 768 bp, Oryza sativa
  Clone ID: PAT_MRT4530_1240C.1
atggccatggagcccgtcggtcccgccgcccagtggctcctgccgctccgccgggctcccgcggtctcgccgcccagtggctcctaccgcccccgccgccccgccgctcccaccgctccgccgggctcccgcggtctcgccgcccagtggctcctaccgcccccgccgccccgccgctcccaccgccgcctcatcgctcctgccgttcccgccgagttcccgccgtcccgtcgctcgcgccatctgtctctggggatgtggaacgggccaacgcggccgatggcgctcgaggggttgacggcgctggagctgacaggggccggccggacggggctcatctcggaggtgttcgccgtgctcgccgacatggactgtggtgttgtggagggccgcgcgtggatgcaccgcgtccacctcggctgcctcatcttcctccgcaacaaggaaaccgacaccgagaggatggcacgcatcgaggccgcctcggacacctcctcctcggcgactccatcagcgccggcggcggcgccgtggccgccgtccccgcccccgccgtcacgcacgccgagcgccgcctccacgttggacaaaaccacctccgaaaccaccgagggaggtgcaaatcgcttggtcactgctcctgaaacggcgtctggtgcctttgccttcgccagtagtaggatcagctgcagcactgatgcttcgccgatcaacagggactcgtcagtttctctctttcgtcagtgcgccgtgcactcacgccggtga

SEQ ID NO: 5644 - DNA, 512 bp, Oryza sativa
  Clone ID: PAT_MRT4530_12410C.1
cccacgcgtccgcccacgcgtccgctttcaggtcatggacttctataagatgattgatttgtatggacatgtgagttgttttggaaatctgacatagtttcagcggatttggccgctgctgacgatagccaccaacagctcgggttctctctgctatcgatgcttcttactatttgatttgttggtctacatattagtaaattcagatgagctgatgaatcagggaattcaggtaagatcatgacttccagcaatttggtactatacaacgaagttttgtccaattgtcctcttcaatatgtatttcagtaatgctgagtttattttctaatttgtcaaccatagcgagagatatcagtaaacaaatatcgcaattgtttttgtcgaactgccactgttaataagagttctggagtaatatatatttataataggtacacaggatggttaagtaaatgtacttatttagattgctatgcctaacatccttagttcatctgatgttgctacat

SEQ ID NO: 5645 - DNA, 1290 bp, Oryza sativa
  Clone ID: PAT_MRT4530_12411C.1
atggtcggtcagaccgggtttcctcccggcggtcagactggaccccaaaccggtctgaccacgcctttggatgccggtcagatcaggccctggaccggtccgaccggcgcaatcatctcaatacaggggattgatccaatgacaaataatgggtttttacaccatattccagtacatgattcctttgtatctactgtgaatccccaaattcccccacatatccctaatgtctacaataatcctaataggggatatcctcccgacaatagatatggccaatataatcatattgcgccgcaacaacaacctcttaggccaccaaacccaccaccaaatcagcatagtgttaacgacgaaattttgatcaaatcaactggcatgctcacgaacctaaaggcgagattttggacctgcacaggagttaagcagatcttctgggccagtaaaaacattcaccagcgtcgacaggcaagcctccaaaccctccgatcaaggaccaaggatccaaaacctccggggaccaatcaatcatcatatgaagttggagctaagaacattgttccggtcaccatatacaaattatcaccggagcataagctggagcttgaacagatagtgaatagcgctcaggagaaattcatgaactcgttcaaggagacccgccagggaacggtcattcagaagtacaagctaaaggtggttgctgccgatgaacctggaacaagctcatctcaagacggtggaaccatgggagctaagggtggtgcagatggttcgggtgacaaaggtatagagcctagggatggtgaggttgaggatgttggtgaagaagatgctgaggggcaacaagagcctacaaggtgcaataatttccaagaccaagtcgactatgctgtgcaacatgctttgattaaccaatcaggagtgcttgtcaatattttaacaaatatgattaaatttgtggttgatggcatgatagctaagcatcaaaacacggggccagtctttctaccaggtggcgtcttcccaccatacaggaacttggtgacaggcaaccagcatcatactaccaatacaccaccagttcagccgacggcggtagttcagccgacggcggtagtttcagttcctgcaccagttgcaccgtcgtcggcacaaaggcaagtggttaatcctcgagtcttgaccagggaacaaccacaacatgttgggcagaacctcaatcgggcgactcaggagcaaattgccgcaatgtttgcgccaactcagccatactgtttccaagaataa

SEQ ID NO: 5646 - DNA, 232 bp, Oryza sativa
  Clone ID: PAT_MRT4530_12412C.1
atggcggtggcgcacagcgaggctggctccagcgaggcaagcggcatccactgccacccctcttcctctctttccccagatcgacctcgggaggtgatgcggactccgggcttcggcgaggtagggcctcagacgccaccaacgcccctcttcttcggcaccgacgagctgagcactggcacatggtcctcgcagagtgcatgcctgcaggtcgactctagaggatccccgg

SEQ ID NO: 5647 - DNA, 342 bp, Oryza sativa
  Clone ID: PAT_MRT4530_12413C.1
atggcggtggcgcacagcgaggctggctccagcgaggcaagcggcatccactgccacccctcttcctctctttccccagatcgacctcgggagggcttaccaaatttcactgttaacaccaccgcagccctctttcccaggatcgacctcaggaggcaatgcaggcttcggcgaggtagggcctcagacgccaccaacgcccctcttcttcggcaccgacgagctgagcactggcacatggtcctcgcagagtgcatgctacctccatggttccaggtgacagagctcaaggttgtgaagaggcggcgaccaaaagaggagcttgtgcggaggcggcggtga

SEQ ID NO: 5648 - DNA, 637 bp, Oryza sativa
  Clone ID: PAT_MRT4530_12414C.1
tcatcgatcagcttcagttggtctgggatgtggtgcaactagtccaagctctctccgcgcactatgacaatcttgtctggcactggataggtgaccaaagctactccgccagctcagcttaccacagctttttcatggggcagcactcctccccttgcgccgacatgctttggcaggctaatggccctgtcaactgtaagcttttcctctggcttgtgttccagcagcgctgctagacggcagatcttctgcataagcatggtattgacaaccactcgacttgccccttttgcgcccaggagcatgaaacggtgagccacatccttctcgacgtattctctcgccaagtctggcgcattacatcctatctccctccggctagtctaggttcgctccctcccatcgcgattctctttaggtctagtggacaacggccagggctcgcctgcctttgcatctttgcaagggttccgactctttggtcctcctagtttcctgtcagctttggaaagagtgaaacgccaaggttttcaattattccctttcaccgtttttgatggttatagggtccatcctttaggagggtcgtctctggtctctcgctggtgccgcctcgtttagggacctattaggagat

SEQ ID NO: 5649 - DNA, 1217 bp, Oryza sativa
  Clone ID: PAT_MRT4530_12415C.1
atgagacaggtcttagaggaagcaccataggtccaggtcgattttaggcaccaaaaccctacaggactcctccttttccctccaatttcttcgggcttcttctataatatgtcatagatggacatacttgtattccaataatatagcccaatatttgtaaagtggatactggaataaagtttagcagtgtagatgaggcttggaaattttgggttagctatggtggtaagattggttttgatgttagaaagcagcataacaacaaaagtgttgtagatgggttgtttacttctagtaggtttgtttgctcaagtgctggtcatcgaggaaaagataaaagagattatctaaccaagaatccccgagcacagacaagaactgactacaatgttcatatgggaataaaattaaacaaagttgaaggaaattatgaagtatatgatttggtgactgaacgctaccacatcctttagttgccaaaaacatgccacctaaatgccatcaccacagaaaatttcacatgtgcaaggttttcaaattgacatggtagatgattatggaatcagacctaaagctggatatgagttagctagtaaggaagctggtggctcaagtaacctttggatttatggtgaaactggaagtatgctaaaatactttcaatataaatgtgtagagaatccttcgtttcactatgtagtacacttagattgatgaggattgctaacatatttttttgatgtcattacttttgataccacctttggaacaaatagagatcatagatcacttagtgtgtttgttggatttaaccattacggagaaagagtatatattttgaggtgctctcttgtatgatgaaacattcgactccttcaaatgactttttgaaacatttttggcagctcataatcaaaagcatccaaaagccatctaacagatcaaggtacggctatgaaaaaggctatagttatagtatttcatggaacttggcatgggctttgtacttttcacatcatgtaaagtgcggtcaagctagcctttgacacttaccaagagtgatagaccaaatatacttggtgaatttagtgcccgcgcatttgaatatgaggatgaaagaacattcggagaaaaaggaggtctggagacgaggagcaaagcagacaccaggttgggttgacaagtttcacaagaaaaagagcatgacacaaaaaaag

SEQ ID NO: 5650 - DNA, 1187 bp, Oryza sativa
  Clone ID: PAT_MRT4530_12416C.1
tcaagttcctctcgttgggacttgggtgaaatcactaggagaatggacacccttgatgtgcagacgggggagatctagtacaacctcacggaacacatagctcaaacgcaagaatggcaacaatctgctgatgctcagttcaccaacatcaacaacataatgtagcaacaacatgatgaccttcaggcgtactttcgctttcaagggttcaatcctcatcaaagaccctgagcgaaagccaagcttgggggagacctcgctccgccccattgaggtaacttgtatcacattgcatatttccctgctccgacaggttatggacctcggcggcgcgccagtccggcgcttcaccgccggtcgcttcgacggcagggtttcattggcgaactcgctaaggctgtcaacaagctcgtccctcccctgcttgaacagcgtgtagctcccgctcccgctccccgacccgcacgacaacgcgccggtggtgcgcgcggcgcccaacccctcctcctcctcgcgcggggcagcggcgtcgatgtcctcgtcgtcgtcgtccgcgggcagcgccgacaccacgaccgcattgctgccgcagatgctcagcccacgtcggccgagcgggacaaggaggcggagaaagcagagaagccgccgcgcttgcacgccgcctccgccggcagccgtcgcggcgccgccctcccgcctcgcctcggccagcttgcagttgcagagaagcgagatagagagagagatgaggaagggagagaagagaggaaagagaagggggtgacgtggacacctgcagagctcctgttcgtcctgatccggctctgacttctcctccaaatctggcctcccctttcttatcccaaaacggtgaaccctagtatttcccagcacaattccttgcgttccaagcccgatctgttcccatgctctcctctttggtttgccaccctcgcccgaagcgccgctgccactgccatccgaagccgcctcggtcgcctgcgctctgctcgtcgcctccctcggcaccgcagcagcgaggagaaccccgtccacccctccgttgccgccgctcgtcgccggaaagccatcgccatcgtcaacccaaggtcgccgcccaccgttctcgtgctcgccgtgtcgatcccgcgtggcagccatgtcatcgctgacatcagcgccat

SEQ ID NO: 5651 - DNA, 232 bp, Oryza sativa
  Clone ID: PAT_MRT4530_12417C.1
ggggtcaatttttgttttttaaataaggtggagtaccctccaccgtttccaaggtttacatacaacaggctttacaaaatgttcggcttccaacatgggggttttcacttcaaaaaaacttaaactttgatcttcctcggggattccaaagacccgcggaaatgatatcttaaaccttagtttttgatcttttttttgggcctcaactggttgctggggccacacttttttt

SEQ ID NO: 5652 - DNA, 1245 bp, Oryza sativa
  Clone ID: PAT_MRT4530_12418C.1
ggagaccccaatccgaatccaaaacgtgtagaactttatctcttatcttctatgaaccaaaagtgacgtggtgagatgaaaaaagacttggagaaggtcttggtttggtccccaatcaacttcttcaatcatccatgcattccttacgctcgatctcttttctttcgcccaagcaagaaaatattgatatctgcaatctcgtggaaaaagttgtgagcagtcgcgtttagtgatgctgaaacatggagagttatatcagcaaaatggcctagaaagtcagccgtcttccttgcagcctccaatcaccctcaccaggaacgccgggacctttgtcaccaagcaattctatttggaaggccaaatcttcttctgcataccttataaaaaccttctcatatgtgcaggcagctttcaacatatcatatgtggagttccacgtagtgcacacatcaaggttcaagaaagccttgctgtccaccttctccaattctgcactccttgaatttcaccaaccttgccgtaccattttttatgaatttaacagcagcacgaacacgcttgatagaaatgtccaccactttcaaaccatcagaaacaatcaaattcacaatatgtgcagcacatctcatgtgtaggtactttccttgtgcaatgctagtattcaaattgttcatttgttttctcaaataactaacagcaacatcatttgcactagcattgtcaacagtgactgtcattactttgtctaactcccaatccaacaacaccttttgcaagtgtttcccaatttcttcccccttatgacttttgaccttgaaaacggcaattatcttcttatgtaagttccaatcattatcaatgaaatgggctgtgacaatcatgtaactttcttgctgctgtgatgtccagcaatcagttgtgaggctaactctttggcaattatgtttgagaaatattttcaattttgctttctgctcataatatattttgacaacctccctagttcatgttcttctagatggtaagttgaactgtgggcaagcaacagccataaacttcctaaaaccagacttctcaacagccataaaaggaagctcatcttctatgaccattatacaaaaggcagtcttaagcaattcaggatcaaacttccaagtggcaacactagcaccatcatctacttgcaaaataccttgttttgggtccttgagttctatcaagtattgtttagtagtcctagtgcta

SEQ ID NO: 5653 - DNA, 888 bp, Oryza sativa
  Clone ID: PAT_MRT4530_12419C.1
gccgcgacgcccgccgtccctccctccccccccccatggccctgctccggacgcgtggggccgccggccgccatggccatgctgctccggcgacccctccacacccttcccatcctccccctcctcggccgccacctctcctcctcctccgccgccgcggaggcggtcaccgcggaccaccaccaccaccacgacgcggacctcctgtcgccgccgttcgactacctcccgggccacccgcggccggacgcgaagcacgacgagctcatcctcgccgtgccgcgcgcctcctcggggcggcacgtggcggccaaggagcggaaggccgggcgggtgccggccatcgtgttcgagcaggagaacgggcaggagggcggcaacaagcggctggtgtccgtgcagtccaagcagatccgcaagctcgtcgaccacctcggccgctccttcttcctctcccgcctcttccgcctccaggtctggtccgagcacgccggccagggggagctcatcgagagcgtccgcgtccttccccgcaaggtacacttacatgcaggaactgatgagcctctgaatgtgacattcatgagagccccttcttcagccctactcaagatagatgttcctttgatgttcatcggagaggatgcatcgcctggtctcaggaaaggggcttacttcaacaccataaaacgaactgtcaagtatctgtgccctgctgacatagtgccaccatacattgaggtggatttaagtgagttggatgtcggacagaaactgttgatgcgtgatctcaaagttcacccagctctgaggttgcttcagtcaccggaacaacccatctgtagcattataggatcaagagcacctgatcagaagaagtcaaaataa

SEQ ID NO: 5654 - DNA, 128 bp, Oryza sativa
  unsure (1)..(128): unsure at all n locations
  Clone ID: PAT_MRT4530_1241C.1
ggggntagtaaaagcagatgcctttttatttattaacgcgatgtttaatcaacattataagctcattctttttttgtgttgtaaaagcccaacccccccattttggggaaaccgagcccgggggaccc

SEQ ID NO: 5655 - DNA, 285 bp, Oryza sativa
  Clone ID: PAT_MRT4530_12420C.1
atgtccacccatggtggcgagggcgccgaggaggagatacggtcgttatcgctggacgtgcttgccgatgacgccggaggcagagggagagcagcgccggagggagggcgacatggacgtctcgctaccgtaggatttggaggacttcacgaaaagtcaagagaagcccaactgcccaagtgcctagttaatccgttaatcgtacaagatactggagggtggagatttttctttgtggatcaccatatctcaagtttaatgctaaaaaaagagcatatcccttag

SEQ ID NO: 5656 - DNA, 2467 bp, Oryza sativa
  Clone ID: PAT_MRT4530_12421C.1
gggagaccaaactatccacattttcatcctctttatccccaaatcttattagttcttcacaccaccaaatgagcacgtacacccatcagaatgtattcagtactcgttgccaaccctcggtataacttaacccactgcggctcaaagcctcaaatcaaataattaagcaagaagaatcggcaggtactatgtaccaacaatcaagctaacaactacgagagctaattaacacgatgaatgcttcagagtgcttcaccgtggtctcctcgccggagcttttggaaattgccaagatcagccggcggtgagctacctcgccgtcaccggggggcttgcccgatcaccggggccgtggcctttgccggccctgaggcgaagggagatggttctgggagtgctgtagcatctcaaccatggatggcgtctggtaggagtagatgacggtgctgctgtccgtcgagtcacctcgtgctgttgccctctgccacgagtgtgagctcagcccggacagcatgtaagccctccctgaagactcgtagagctggcgatttgccatcctctcctgcatctctcgcagctccgcgtcgagggacagcgacagacggtcaccgctccggcttgcgaatgactgtgacagtgtcctccggcaatcctcaagaatggccacggcctcagagagagcacccttctcggcagcagcccttgcacactctatggattcagcagcttgtatgcggttcctctcgcggtcaacctcaatggacacatgctcagatatgttggatgttgtcggccggttgatcttcacctcgtcaccttgaatcttgattgtctcacctgtcaccggatctctgtaggcacaagaaaccttcagtgctgaggtctgatgacgagattgtgggatgttcacggacagtaagatgtctctctcctcatcagcatacaggtgaccaatgtcgacggaaccgtttcgtccatctcttgccaccttacttgggtagctaccagatttgatggaagaaagttgaacaccaggatgaacacattccatgctaactcgcatctcttggatgacaatgctaagaagcccaccaatgcattgagcaaatgcatcttgcattacaccttcatcctcgataaaggaaaaggtgccaccagaagcttgagcaattgagtgcaaggaatccgagtcatggtctgctccaaatccgaaggcatgaagaggcaccgtatggcgagcatcatttataatggaagatgggacaagtgacttgtaatctggtgaagccccctgaacacttgaggaaatgttgtatgtatcttggccgtccgacagaagaatgatgctgcacactgaattcttgtaactgcggtcttcaatcaccttcatagctttcttcagtgcatcagcaatgtttgtaccgccgctagcaccaagtgagttaattgcctgcaatgcctgctgcctgccatgatgtgatattcgctgaaggtggaacagtcttctggcactagatgagaaagcaataacagaaagacgatcgcttggtccaaggtgctgaacaacaaaacccattgctcgctttaggagcgctagtttggtgcctgccatgctgccactaacatcaagcacagtaacgagatcaaccggagcacggtttcttgaagatccagctgagctttcattcgccaatttacctgtgccctggtctgggttagcactaggagccttcagatggatcagaatagcaaaatcatctttagatgaggactgcggtatggttgagaattctggatatgtgtttatctctgcagtcttagtagatcgaacattaagattgtcaaaaacttctggctgctgcaaaggttcatcatcattgaagtctgctggctcagaagtatgtgggcgacgaactcgctgatgatggtttggaacttggtggagaagagccatattggcatcttgttgggtcaatcgagctcggctaactccaattcttccatgcggaatgttagaagatagcgatcgattgaagggtatctctttccactttgcccgacaaattgggcagaaataattcccatgtttcacattagatgagatgcagtgaaaatggaacatatgagaacattcagctgtgaatagggcttgaccattcccatgccgcatggagtcaaagcatattgcacatttcctcttagaggaggatcggctgctccccgacttggacctccgcaccacgccggggagcggcagcggcaccggaacgtccgacggcgccggcaccgactccggccccaccgtcaccgcggcctcgccccggcaccgcgcgccgctcgccgccgccggcagccgcctccgccgctcgctcgagcagtcctccctctccccctcctccgcctcgggcacgtgcacgcacaggccgagccccagcgccctcttcgccttcctccacgcgtcctccat

SEQ ID NO: 5657 - DNA, 396 bp, Oryza sativa
  unsure (1)..(396): unsure at all n locations
  Clone ID: PAT_MRT4530_12422C.1
cagcttctgagcttcagctcgacttctgtcagccatttcattaatcagacttgttaccagactgatgcatcacaaccctttccnacattcactgtctgaatgacgtgcgtgtagatggttacagattgcacatttcaacttgcttgatgacgccgccctgcagctttgtctgcgaataattttacaggcatgtcgatgcaactatgggagaagttcgatagagaaatggtagtaatctgcaacaataaaacatctgtccccaaaatcagtactctgtctggtttagtggcaaaaggatgccttcttttttccctgaactcctaaagcatatactcctatataagttaaaaaagaccagaaaaaagaacagccagacaaacaagcgccatttttaca

SEQ ID NO: 5658 - DNA, 399 bp, Oryza sativa
  Clone ID: PAT_MRT4530_12423C.1
atggcgctgatgaaaccgctgctactgattttctgctctaacgactacccgcgaaggtcgctggaaccggaggcgcaggaggagtcgcgtgcggtggcagcggaagctcactgttctggacgaaggctgggacggtgtcgtgttcaaggccgagcatctccgcaacggcgacaagaacctcaccggcgggcgctgttcgacgactcgtcggacgagacgatgttgaaggagatggccgacatgcatgcgagaccggctcgaggccacggggacgtgttcgacgagcggccggagctgtcgccggccgggcgcgaggtcctcgatcgctgggatgctggccttcaaccccgacgagaggacgacggcagcggaggtgctggaccacaggtggttcactga

SEQ ID NO: 5659 - DNA, 1713 bp, Oryza sativa
  unsure (1)..(1713): unsure at all n locations
  Clone ID: PAT_MRT4530_12424C.1
atgacagttagacaattagtgttttttgcgaagcctacctttgaggagttaatgtctcgcatcaagcatgaattggattggaatgatgagtcggttggtatgcaagggagatacgatgtgggcggcggtgtcatgtcacataaatttatgttagacttgaatggagagatcgaatggcaaacatatatagatatagtattggggtcacatttcaaatctcttgaggtgtttgcatggaagaaagatggtaggataggaaagaaagaacttgtagaccttaatgaaagttcactcatagaatcacccattagctgtcacgaactgtcggagaggtgtagtaggaaggaagaattgattgaggaagacgtggaggggggcgagggagtaaatgatatggcggatgtggaggtcagggaagagaatgacccggtaagggaggaagtacatgcagaggagaatgtgccgttaagggaagaagtacatgcagaggacaatgtgccgttaagggaggaagttaatgtggaggagaatgtgccggtaagagaggaaggagatgttgaggatggtcgggaggtangagatgatgtggagttgcctgaggaagaagcgaatgctaagaatgtaagtatgggcctaagggagttggctaggctgaaattctatacccgagaggagtgtgaggaggctatgatacgcagtggattgaacccaggctggttggagtatgatacagaggatgaattggatgagtccgcttccgactccgatgatgatcgtccagtgcgtaagatgtcagagcatgaaaggactgtgtttgcgaaactggtgggtagaaatccggaaataacacaattcgaggatcttaccagatctgggctagcaattgctgatggggatccacaatatgacggtgccttcgaaccaatgtgtgatgaaccaaggaaggggttggagtttcgattgatggatgatctgaaaatatggctacagagttattctatccgtgtccaccggccgtaccatgtgaaggaatctaacgcgtcagtaaagttacatgcatttgtgcgagctgaaccaactttatctccagcagcgattgtcgaggcagttgagcaaatatggcactatcggcctacgtatggcaaagcatggcgtgctaagcaagttgctatgaaggtcatttggggagattgggacgaggcgtatgttcgcttgcctacactgatgcgtgccatcaaagcaaagaaccctaccatgcatttccgtgttgaggctcatcccgagaagtccaggatggtggatggagtacagaggcgagtatttggacatgcatattggatatttggccagtccatagaagcattcaagcacttgaggccggtgctagcaattgatggcactttcttaaccggagagggcggcaccctccgcaacgccctacagagactacggcagcgatgtcggaagttggcagcaaggctcggctgcaggtcgactgatgtggtcgaacatgctcatgcccaccaagagggggatgaagaaggggaggtgggtgacgaggagggcgagcaagacaaagaggcggaggaaggagatgaggaggaagaaggggatgaggacagagaaaaggaggcggatgagctcggtccctcgcagctagaggacgcaccagagtcgtcacagccggatatctcgcagcccggcccgtcttga

SEQ ID NO: 5660 - DNA, 288 bp, Oryza sativa
  Clone ID: PAT_MRT4530_12425C.1
atgggcattttcacccatgatttcatttcccattcgctccgtagttcatcacgggcctttacgaggcacatcggagcaccacaagtacttacatacacccttcgtctcctctcccagccatcacaagcacgctccatcatcaaacaacatcggcagggagaggacactgactacgatgaccccactaccattgaattaaccgtgttgagagctgcaacaagcaacttctcagcagaaaataagctgggagaaggaggtttcggagaagtttttaaggagttagaataa

SEQ ID NO: 5661 - DNA, 1754 bp, Oryza sativa
  Clone ID: PAT_MRT4530_12426C.1
ggttaccatggcaggaggatgtttattcatgaaatagcaccagacagtgtaccttcaccaacaacagaaactgtttcacttcccagtcatccacatcaaaaagcctgagtacatggagttattaatattaccactaccagcctgtccagaggggaatccccaaagcaatgtgagctgaacaggaacagacaaggtccagaatttaagctccacagcgggtgtgatgaggaactactacgctacagcacaacgaatgatgaaacgctatgctatccatcatgcagaaaccgagcacatcccctaagccggagcccataacgctagaaggaaagtgagcttctataggtacagacattgagcagcatcgctgtacatcagtcttttgcatccaggcggagtacttgcagaacatgatggtgtgtgtgtgtgttctggacatttgcctcgaagcagaggggtttgggatatttcatgatccataccatttgatgagtgaaccaaagaggaaatgctgcataatcggcactttctcaagcacctcagccttgtacatcttgagcagcccgctgttcaccttcttccaatgtggtacgccactgatatcatccaacattggcgagtgctctgcgaacggccccttcttcaccttcttcacataggcaacgcatgcgaggtacatatactcctttgagaagttatccaggatatccgggttgtggatcgacttgggcttcatgtacttgtgatcaatcaactgcgccgcgccaaatatgaatgggaggaagtggtaatcgtcgagcccccacacgccatgcgagccagcgggctccagcaagtaggtgtcctgaagcgtgcgcattaggtccaggtatgcagcgaagacccgtagcacaaccgcggggtaatcagcctcggtgatgagcccaagccgtgctaggcagtagaggaacgccgcgaagttggtctcatgccccgtgccgtagtcgatgcgggtggcgttgccgaaggagtcgagaaggtacggcgcaagctcggcctcggcgccggcgaggtcgggcgacccggcggtggccatgatcggagcgatcagctggttggccgagtcggagagcttctcgtgccacaggcggaaggcggggttgccgtagcgggagttgtgtgggagcggtggggtggacgcgacgaaggcggagagcgcggagatgagctcgaggagcgcggaaacgaccggggatggcggggacgggagcgggtcggagagcttgcggccgtggacggaggcggagagcgcggcgacgaagccgaggaagtggcggccgtggacggaggcgtggaagcgggcgatgtcgtcgggggaggtgatgcgcttggcggggacctggaaggcgaacggcggggaggcgggcggcacggggagcggctggggcaccggggagaggacgatggcggcggtgttggtgggcgcgttgatggccggcatgcggatggggcggtacgcaggcggcggggagtcggaggacgccgaccaggggggaggcacgggcgtcgtcgtgggcgcgccgcaggagcggcagagcggggcgtggcccgcgtgcgcggcggagccgggaggcgggcaggatgtggcggatggtggtggtgggttcgattcggggttggacatggctgccggtgtcgtcgtcgtcggcggcggcggcggatcggagacgggagtgggtcgacgagggctgctactggaaggcacaccctcgtgc

SEQ ID NO: 5662 - DNA, 4650 bp, Oryza sativa
  Clone ID: PAT_MRT4530_12427C.1
cctgcggacgcaccgttttttttgacaaattgacccttttcaaaaacttatttcgaaattaacccctaccaaaaacttcaatcaaaaataggccgtcggttcagcaccaatgcttttggcgctgaggttgggcgcgtcagcgccaacgggcctggcgctgacctcgtgctaccgtggcggccgagccgatccccccgtcgacgtggcaggtacctcagcgccaaccacttcggcgctgaggtgcccaacctcagcgccacatcgtttggcgctgaccttgggctggcgcgagcgccaggaagagcgtgaggagcggcaacggcagcgtgccgcaaaggagaaggccgagagggaaaggagagaggagttggagttaagggagtttgacgccagtcctgcgaaggagccctcctgcgtcgtggtcgagacataccgggttgcaagaaatccggctgtgacgactctggtgcgtcctccagctgcgaggaaccgagctcatccgcctcctcttcttcgtccccctcatcttcttcctcctcatccccttcttcctccgcctccttgtctttctcgccctcctcatcacccacctccccttcttcattcccctcttggtgggcatgagcatgttcgatcacatcagtcgccctgcagcccagccttgctgccaacttccgacatcgctgccatagtctctgtagggcattgcgcagggtgccgctctctccttccgagccaggagccgtgccaagcgccactcccacgtcgttgacagtccgcaagagctctcgagccactctgtcgcgaacaggttccgtctcgaccatggtaccttgacgggtatgagtatcgtacttgttctgctcctcaacatcctcggggtcatccgttatgtcggctagcgtccatgccagacgtaggacaagacggtaggtcctgtggagccacgccaagtacgcgtcgaactccatcctgttgtgctggcactggtgtagtactccattctcctcgaacttctcccattgcgtgatatgatcctgatggtagtaagcccaatcagtcaccttcttgttcttccggcggtccaccttgtgtaggtcgatacttgtggagaaacggtgcgggattgtttgaagcctcccgaactgccgcatcacgcggttgcacatctagaactccactgcatagaagcagataagtgggcaccgtagggtcttcaacgcatcctctatatggcacatgggatttatgtctagctcgagcactttctgtgcctcatatggcctccacaccacatgttctggttgtagatagtccatctcgtttgtgtagtggtagtaggccaaattcctgcggcctagtaccgcctcgtcccagtccgcgagtaccgatagccacatccaagaggccatgtctccactagagtcagggaacagaatactgccgaagatgtataggacgtacaccctgcagtatcactgcaccatggcctcgtctgccttggctggacactgaccgaagttggcacgcaactaactcaaaggaacctctgaggtcttcgtctgcctctgaccgtcaggtgcaactgcaggctccacaccaaggtactcctcgacccgctgcctccagttccccgacgctgtgtcacctgtgactgcctgaccccggataggaagacccaggatcatcacgacgtcctctagagtgaccgtcagctccccgcaaggtaggtggaaggtgtgagtctctggacgccaccggttcacgagggccgtcagagcagcggtgttgtacataggcaccggtcactgtgccatggtcacgaacgccaagagcttcgcccgccgtaggtacgggacgtaccggtcatcgaatagtatgtgtgccgtgtgacctctgactcgaagggtcttcaggcgctctccgctcgcaatctagggagcccggtgcttctcctcgtagaaatcctctaaccccaaaacgtgctccatccgtcggttgcctgaacctttgtacgctttgtccatgtcgttcttgaaccttcttgtccttcttcttcctcgtgtgttgttcttcaacaacaagtccgaaacgaagaactctccgtcataacttggccattgcaatggatctaggtaaggttcaaaccttgaggagtatgtgttctgcacagctctattggaagcatcataacacattcggggggccacctcgacatccaaacctctcaacctacaaacagttatcatgtgggagcatggcaagtgatggagctgagggaactgacaggtgcatgtgttatctcttgcaaccacaacgtagtggcgtccaccccattgcaccccaaccaccatgactccgccttgctcgctaacctcatacttcattgaagggaatcgaaacatgctgttttttgctccaaagttcgtctttgttgctcctccaatatgtccttaacttttgtgggccacttctttccactcaggatatctacagttgcctctttgtgtctatcaacaaaccaactattgcacttcgaaaatgtgtatgccacaatagctgtaaccggcagttttcgaatgcctcgcaagacattattgaaactctcggccatattactggtcatgatgctgtgctgacgcccgttggtatcaaatgctcttgcccatttgaccttatgtgccatatggtcttctagccacttctttggcctctctccgaccacacccaagaggcattttatctcacctaggaacaatgctttctcatttatttaacatatgcactcgagatctttcatctgatccgtcgtagctccagctgtgcagaagttagcacataagtgcctcatgcaccacctgtggtgaatggttaggtgctgaggcatgcggaggttgatggagttcaaaatgccagggtgtctataagaaattatgcacacttctctattaggaccgatcagttgtttctcaacatgttgatgaaccactcccagttggatgtattctccttctctaccagagcaaacgccgaaggaacaagatgtaaccctgcgtcgacccctattgtcgtgagcaatgtaccttagtatttaccggttaagaaagtcccatcaattgctagcaccagcctcaagtgcttgaatgcctctatggactgtccaaatatccaatatgcacgtccaaatactcgcctctgcactccctccaccatccttgacttctcggggtgagcctcaacactgaaatgcatggtagggttctttgctttgatggcacgtagcagtgtaggcaagcgaacatatgcctcgtcccaatctccccaaatgaccttcatagcaacttgcttagcacgccatgctttgccatacgtaggccaatagtgccatatttgctcaactgcctcgacaatcgctgctggagataaagttggttcagctcgcacaaatgcctgtaacctgtttccaataaaccttgaagtaagttgcaaatgcttgccggttacttccgcactacagcatgtgtggtcttcgcccaccctagtcacccgccacctatctcctccactcttccttgcattaatctgccatttgcaatggcgatcgagacaagccacagtatactttactgacgcgttagattccttcacatggtacggccggtggacacggatagaataactctgtagccatattttcagatcatccatcgatcgaaactccaaccccttccttggttcatcacacattggttcgaaggcaccgtcatattgtggatccccatcagcaattgctagcccagatctggtaagatcctcgaattgtgttatttccgggtttctacccaccagtttcgcaaacacagtcctttcatgctctgacatcttacgcactggacgatcatcatcggagtcggaagcggactcatccaattcatcctctgtatcatactccaaccagcctgggttcaatccactgcgtatcatagcctcctcacactcctctcgggtatagaatttcagcctagccaactcccttaggcccatacttacattcttagcattcgcttcttcctcaggcaactccacatcatctcctacctcccgaccatcctcaacatctccttcctctcttaccggcacattctcctccacattaacttcctcccttaacggcacattgtcctctgcacgtacttcctcccttaccggcacattctcctctccatgcaattcctccctcacctccacatcctccccaccatgtactccctcgctcacctccacgtcttcctcaaataattcttccttccgattacacgcattcgagtgttcgtgagaactaatgggtaattctatgagtggactttcattcaggtctataagttctttcttccctatcctaccatctttcttccatgcaaatagctcaagagatttgaaatgtgaccctaatactatatctatatatgtttgccatttgatctctccattcaagtctaacataaacttatgtgatatgacaccgccgcccacatcgtatctcccttgcataccagccaactcatcactccaatccaattcatgcttgatgcgagacattaactcctcaaaggtaggcttcacaaaaaacactaattgtctaacagtcat

SEQ ID NO: 5663 - DNA, 4146 bp, Oryza sativa
  Clone ID: PAT_MRT4530_12428C.1
atgacagttagacaattagtgttttttgcgaagcctacctttgaggagttaatgtctcgcatcaagcatgaattggattggaatgatgagtcggttggtatgcaagggagatacgatgtgggcggcggtgtcatgtcacataaatttatgttagacttgaatggagagatcgaatggcaaacatatatagatatagtattggggtcacatttcaaatctcttgaggtgtttgcatggaagaaagatggtaggatagggaagaaagaacttatagaccttaatgaaagtccactcatagaatcacccattagctgtcacgaactgtcggagaggtgtagtaggaaggaagaattgattgaggaagacgtggaggggggcgagggagtaaatgatatggcggatgtggaggtcagggaagagaatgacccggtaagggaggaagtacatgcagaggagaatgtgccgttaagggaagaagtacatgcagaggacaatgtgccgttaagggaggaagttaatgtggaggagaatgtgccggtaagagaggaaggagatgttgaggatggtcgggaggtaggagatgatgtggagttgcctgaggaagaagcgaatgctaagaatgtaagtatgggcctaagggagttggctaggctgaaattctatacccgagaggagtgtgaggaggctatgatacgcagtggattgaacccaggctggttggagtatgatacagaggatgaattggatgagtccgcttccgactccgatgatgatcgtccagtgcgtaagatgtcagagcatgaaaggactgtgtttgcgaaactggtgggtagaaacccggaaataacacaattcgaggatcttaccagatctgggctagcaattgctgatggggatccacaatatgacggtgccttcgaaccaatgtgtgatgaaccaaggaaggggttggagtttcgatcgatggatgatctgaaaatatggctacagagttattctatccgtgtccaccggccgtaccatgtgaaggaatctaacgcgtcagtaaagtatactgtggcttgtctcgatcgccattgcaaatggcagattaatgcaaggaagagtggaggagataggtggcgggtgactagggtgggcgaagaccacacatgctgtagtgcggaagtaaccggcaagcatttgcaacttacttcaaggtttattggaaacaggttacaggcatttgtgcgagctgaaccaactttatctccagcagcgattgtcgaggcagttgagcaaatatggcactattggcctacgtatggcaaagcatggcgtgctaagcaagttgctatgaaggtcatttggggagattgggacgaggcgtatgttcgcttgcctacactgatgcgtgccatcaaagcaaagaaccctaccatgcatttccgtgttgaggctcatcccgagaagtccaggatggtggatggagtacagaggcgagtatttggacgtgcatattggatatttggccagtccatagaagcattcaagcacttgaggccggtgctagcaattgatggcactttcttaaccggtaaataccaaggtacattgctcacggcaataggggtcgacgccgggttacatcttgttcccttggcgtttgctctggtagagaaggagaatacatccaactgggagtggttcatcaacatgttgagaaacaagttgatcggtcctaatagagaagtgtgtataatttctgatagacaccctggcattttgaactccatcatccacatcatgcctcatcacctaaccattcaccacaggtggtgcatgaggcacttctgtgctaacttctacacagctggagctacgactgatcagatgaaagatcttgagcgcatatgtcaaatagatgagaaagcattgttcctagatgagataaaacgcctcatgggtgtggtcggagagaggccaaagaagtggctagaagaccatatgccacttaaggtcaaatgggcaagagcatttgataccaacgggcgtcgtcatagcatcatgactagtaatatggccgagagtttcaataatgtattgagaggcattcggaaactgccggttacagctattgtggcatacacattttcgaagtgcaatagttggatggagcactttccggggttggaggatttctacgaggagaagcaccgggccccacagattgccagcggagagcgcttgaagacccttcgagtcagaggtcacacggcgcacatactgttcgacgaccgcgtcgggaactggagggagagggtcgaggagtaccttggtctggagcctccagtggcacctgatggtcagaggcagacgaagacatcaggggttcctttgagttggttgcgagccaacttcggtcagtgtcccgctgaggcagacgaggctacagtacagcgatactgcagggcgtacgtgctgtacatcttcggcagtattctgttccctgactctggtggagacatggcttcttggatgtggctgccgttgctcgcggactgggacgaggcgggtaccttcagctgggggtcggctgccctagcctggttgtaccggcaactctgtgatgcttgccgaaggcaaggcggggacgcgaacctagcaggctgtgtttggttgctacaggtttggatgtggatgaggcttccagttggtcggcccatgtggaggacccatcaggcttggccgcaccaggatgcagaccgatgtcccactgtagctcacctgtgggaatcggtcccatctccagtagtaggccgcaggaatttggcgtactaccactacacaaacgagatggactacctacagccagaacatgtggtgtggatgccatatcaggcacaggaagtgctcgagctagaactgaatcccatgtgccatatagaggatgcgttgaagaccctacggtgcccactgatctgcttctatgcagtggagttccagatgtgccaccgcgtgatgcggcaattcgggaggcttcaaacaatcccgcaccgtttctccacgagtatcgacctacacaaggtggaccgtcggaagaacaagaaggtgactgattgggcttactaccatcaggatcatatcacgcaatgggagaagttcgaggagaatggagtaccagaccaggccgacatagcggatgaccccgaggatgttgaggagcagaacgagtacgatactcgtacccgtctaggtaccacggtcgagacgggacctgttcgcgacagagtggctcgagagctcttgcggaccgtcaacgacgcgggagtggtgctaggcacggctcctggctccgaaggagagggcggcaccctccgcaacgccctacagagactacggcagcgatgtcggaagttggcagcaaggctcggctgcaggtcgactgatgtggtcgaacatgctcatgcccaccaagagggggatgaagaaggggaggtgggtgacgaggagggcgagcaagacaaagaggcggaggaaggagatgaggaggaagaaggggatgaggacagagaagaggaggcggatgagctcggtccctcgcagctagaggacgcaccagagtcgtcacagccggatatctcgcagcccggcccgtctcgaccacgacgccggcgggctccttcgcaggactggaggtacacccccgacgtgcctcgtcctcgcactagagcgccagtgcacctggcgctgaggtcccagcccagccatccagaaggcttgctgagctgggccacggccgaaacggccaagtccaacctcaacgccaggtgggctggcgctgagtttcccacagtcagcgccattatggatggcgctgaggtcccagcccgcaagccatccagaaggctcgaaacggccaaggcccacctggcgctgagtgtcccacggtcagcgccattatggctggcgctgaggtcccagcccgcaagccatccagcaggcttgctggtctgggccttgtgggctggcgctgagtgtcccacggtcagcgccattatggctggcgctgaggtccaagcccgcaagccatccagaagccttgctggtctaggccttgggggttgcggccaagtcccacctcagcgccagtccggttggcgctga

SEQ ID NO: 5664 - DNA, 436 bp, Oryza sativa
  Clone ID: PAT_MRT4530_12429C.1
aaaaaaaaatattttttttggtttatttttaaaaaacttatatacagaaattttttttttttacaaaaacacatttttttaacagctcaagaaagggggctaatgaaaaaggataaggcggaagaaaaggaattgaagttttgggcatgatgggcttgatcatgcccaaacttaccaaagttttgggaattttaacaatctataacctatttaaaacccgtagaccacgatcgggctgtttaaatctttctgcaaatgttctcagtctgaaactttcaactcggaatcgatatatactctgaacattttgcatacatcaatcaacacaagaaaccaagtctgcagggagagatcatccgactgctttgccgacgaactcaacataaaaaaggaaagtggagttgggcggaatgactcaggaggtgggctcccaccc

SEQ ID NO: 5665 - DNA, 339 bp, Oryza sativa
  Clone ID: PAT_MRT4530_1242C.1
atgccgccgcacgacgactccatattcctcctcggcgcggcccaccagccgccgcgccctcccgtcgtctccaatgccctcaccaagctcgaaatggtgatggcgccgagacgacgcaagaagcagcgtcactgcccgccgccccagcccggcggcctcccctcaagccgccgccgtactgcccaacgccctactgcccgccgccgtgacgctagtcacccatcgctgccgtttctggctttccgtgagagagagagagagggagcaagagagatatggaagggaaaggaggtgggagaacatatagaggagctgaccggtggagcccactttttttaa

SEQ ID NO: 5666 - DNA, 3750 bp, Oryza sativa
  Clone ID: PAT_MRT4530_12430C.1
atgggcgcggagagcgcggcgcacgcgcggacgtggccgacgtggcccggggaaggcggaggcgtgggcgcggcgacggttgcgggcgcggcggcgcgccgggatcggcgggaggtgggagacgggtctgacaggaaaacttcggggtgtgacaccgatcccctagctgacgtggcagctacctcagcgccaactgcttcggcgctgaggtgcccaacctcagagccaaatgaaagtacacatggaagccaatttgagggaatgacagttagacaattagtgttttttgcgaagcctacctttgaggagttaatgtctcgcatcaagcatgaattggattggaatgatgagtcggttggtatgcaagggagatacgatgtgggcggcggtgtcatgtcacataaatttatgttagacttgaatggagagatcgaatggcaaacatatatagatatagtattggggtcacatttcaaatctcttgaggtgtttgcatggaagaaagatggtaggatagggaagaaagaacttatagaccttaatgaaagtccactcatagaatcatccattagctgtcacgaactgtcggagaggtgtagtaggaaggaagaattgattgaggaagacgtggaggggggcgagggagtaaatgatatggcggatgtggaggtcagggaagagaatgacccggtaaaggaggaagtacatgcagaggagaatgtgccgttaagggaagaagtacatgcagaggacaatgtgccgttaagggaggaagttaatgtggaggagaatgtgccggtaagagaggaaggagatgttaaggatggtcgggaggtaggagatgatgtggagttgcctgaggaagaagcgaatgctaagaatgtaagtatgggcctaagggagttggctaggctgaaattctatacccgagaggagtgtgaggaggctatgatacgcagtggattgaacccaggctggttggagtatgatacagaggatgaattggatgagtccgcttccgactccgatgatgatcgtccagtgcgtaagatgtcagagcatgaaaggactgtgtttgcgaaactggatcttaccagatctgggctagcaattgctgatggggatccacaatatgacggtgccttcgaaccaatgtgtgatgaaccaaggaaggggttggagtttcgatcgatggatgatctgaaaatatggctacagagttattctatccgtgtccaccggccgtaccatgtgaaggaatctaacgcgtcagtaaagtatactgtggcttgtctcgatcgccattgcaaatggcagattaatgcaaggaagagtggaggagataggtggcgggtgactagggtgggcgaagaccacacatgctgtagtgcggaagtaaccggcaagcatttgcaacttacttcaaggtttattggaaacaggttacaggcatttgtgcgagctgaaccaactttatctccagcagcgattgtcgaggcagttgagcaaatatggcactatcggcctacgtatggcaaagcatggcgtgctaagcaagttgctatgaaggtcatttggggagattgggacgaggcgtatgttcgcttgcctacactgatgcgtgccatcaaagcaaagaaccctaccatgcatttccgtgttgaggctcatcccgagaagtccaggatggtggatggagtacagaggcgagtatttggacgtgcatattggatatttggccagtccatagaagcattcaagcacttgaggccggtgctagcaattgatggcactttcttaaccggtaaataccaaggtacattgctcacggcaataggggtcgacgccgggttacatcttgttcccttggcgtttgctctggtagagaaggagaatacatccaactgggagtggttcatcaacatgttgagaaacaagttgatcggtcctaatagagaagtgtgtataatttctgatagacaccctggcattttgaactccatcatccacatcatgcctcatcacctaaccattcaccacaggtggtgcatgaggcacttctgtgctaacttctacacagctggagctacgactgatcagatgaaagatcttgagcgcatatgtcaaataaatgagaaagcattgttcctagatgagatcaaacgcctcatgggtgtggtcggagagaggccaaagaagtggctagaagaccatatgccacttaaggtcaaatgggcaagagcatttgataccaacgggcgtcgtcatagcatcatgactagtaatatggccgagagtttcaataatgtattgagaggcattcggaaactgccggttacagctattgtggcatacacattttcgaagtgcaatagttggtttgtcgatagacacaaagaggcaactgtagatatcctgtgtggaaagaagtggcccacaaaagttaaggacatgttggaggagcagcaaagacgaaccttggggcaaagggcagcatgttttgatttcccttcgatgaagtatgaggtcagcgagcaaggcggagtcacggcggctggggttcaatggggtggacgtcactacgtcgtggttgcgagagataacacatgtagttgtcagttccctcagctccatcacttgccatgctcccacatgataaccgtttgtaagttgcgaggtttggatgtggaggtggccccccgaatgtgttatgaagcttccaataaggctgtgcaggactcgtactcccctaggtttgaaccttacctagatccatcgcagtggccaaaacaacacacgaggaagaagaaggacaagaaggttgaagaacgatatggacaaagcatacaaaggctcagccaaccgacggtcccacatgatactcgtacccgtctaggtaccacggtcgagacgggacctgttcgcgacagagtggctcgagagctcttgcggaccgtcaacgacgcgggaatggcgctaggcacggctcctggctccgaaggagagggcggcaccctccgcaacgccctacagagactacggcagcgatgtcggaagttggcagcaaggctcggctgcaggtcgactgatgtggtcgaacatgctcatgcccaccaagagggggatgaagaaggggaggtgggtgacgaggagggcgagcaagacaaagaggcggaggaaggagatgaggaggaagaaggggatgaggacagagaagaggaggcggttgagctcggtccctcgcagctagaggacgcaccagagtcgtcacagccggatatctcgcagcccggcccgtctcgaccacgacgccggcgggctccttcgcaggactggaggtacacccccgacatgcctcatcctcgcactagagcgccagtgcacctggcgctgaggtcccagcccagccatccagaaggcttgctgggctgggccaaggccgaaacggccaagtcccacctcagcgccaggtgggctggcgctgagtgtcccacggtcagcgccattatggctggcgctgaggtcccagcccgcaagccatccagaaggcttgctggtctgggccttggggttgcggccaagtcccacctcagcgccagtccggttggcgctgaggcagctgccacgtcagctggggatcggcccggccgccacggtggcacaatgtcagagccagtcccgttggcgctgacacggccaacgtcagcgccaatgtgtttggcgctgaggcgacggcctatttttggttga

SEQ ID NO: 5667 - DNA, 958 bp, Oryza sativa
  Clone ID: PAT_MRT4530_12431C.1
atgggcctcaaggcccacaaaatcacggcccacgagttgcttccagactccacggctcagcctctgccacgcggccgggacccgacttctccttctcctcttcccccgccgtcgtggaagggaggagagcggcggcgccggccaccggccaccggaagggttcgggagtggtggtgttgggtagtgaagtcggctgcggcgatgttgtccaggatctcgcagctcggggcgcggcttctgcgcgagaacagagctgtagggaatttggcaagcagtacaaccagctattatcgaggtcaactcagccgacgttttgtcccaacgaagaacatcttattctccacagcaacaactagtagtgatcgtgacgatggcagtcagagcaaggagaagatctctgtaacatttgtgaacaaggatggcacagagcagacaatcagtgtccctgttggaatgtccatcttagaagctgctcatgaaaatgacatcgaacttgaaggagcatgtgaaggttcacttgcgtgttcaacctgtcatgtcatagttatggatgtaaattattataataagctagaagatccaacagatgaagaaaatgatatgcttgaccttgcatttggacttacagaaacgtctcgtcttggctgtcaagtgatagcaaagccagaacttgatggcatgcgactggcattaccagcagctacacgaaactttgcggtggatggctttgtaccaaaaccacactaaaaagactgataactgagactgagaagtgagtagcacaggttcttacacagcatcatcaattttgtagcccaacacttgtaacttaaacaacagcctttggtgttatgaggcttttgtgttccagagaggatttgttcattgttgagctcctcggttagttacggaaattattatttcatcagtgccacactaaaaaaaaaaaaaaaaaaaa

SEQ ID NO: 5668 - DNA, 1596 bp, Oryza sativa
  Clone ID: PAT_MRT4530_12432C.1
atgagcgccgccacccccgactccgccgccgccgccaagcgccccatcgacccctcccacgccgacccgtcgccggcggcgaagctccagaggtcgtccccgccggatccctcgccgccggctgaggcgcagggcgacgccactgacggcggcggcgaagtggctggggtgagaagcggggagatggccggcgcgcggaaccctcaggcgcagcggtacctggtcgccgtggagtacgtcggcacccggttctccggctcccagcagcagctcaaccagcgcaccgtcgtcggcgtcctcgagtggaggctacatggcattgttttccccaagtctgtggctatcaacagatttgtgacctggcgttgctgccataatcagcatcttgtgtggcaccttctggggaatttgaaccattccaatcctggcgcgaagctcttggaacttgacccgcccaagagacttggtgagaaggtcagcgagctgatcctgggtgttgatgtagctggccttgatgctcccctcgtccaagcagctccgaatgaaatgaccgcctacgccaagcgcatcgtcgagttgggtgggctcaccggctgcaacccagcctacactctcatggaggaaaggctgaagctgagccgtgacagcacggccaaggaggttgatgccacgcagtaccggcgcattgtgggcagccttcgctacctcgttcacacgcggccggacttggcgtttgctgttggctatgttagccggttcatgcagcgaccgatgacagagcaccagcgggctgccaagaggatccgccgttacgtcgagggcaccagtgactacggcgatgaggcatttcacaaattcattggtcagccagtctcaatcttctgttctagtcgaacggacacaggtgttcatgctttatcaaatgtttgtcatgttgacgtggagcggataagtaaaagaaagcctggtgaaatgaagaatgaaggtgacataatggtgactgatgtccgttgtgttgcaccagacttccatgctagatacaaagccctagagcgcacgtaccactatcgtttgctttctggatctgagccactatcagtttttgagaaaacctctgcttggcacatacccgaggatttaaatgtacaggcaatgaaggcaaactctcccatgagaactttggatgagcttagtgttacagaagtatttccttccatgttttttccttcaagcatggagcgatcagagatggagtcattagatgggcatcttgtttattcaagaacgtcagttgtggaatcttctggaaaaggatctgatgcttctagtacaagtgagcaatcaagatttgagaatggagaagaatttggaaagaggctaaggcatcgttgcttcgttgttactgcacgggcacgttcatttctttaccaccaggtaaggttaatggttggtcttctaaaatctgttggtactggagatctaacaactgaagatgttgagagaattctgaatttaaaggcagtgactgcggcacctcctatggcacctgcttgtggtctctaccttgccaacgtgaaatatgacctgagcgtttga

SEQ ID NO: 5669 - DNA, 3378 bp, Oryza sativa
  Clone ID: PAT_MRT4530_12433C.1
atgtcggcggatgtgggtcgctggtggcagcaagtggaggtgcgcggtgaggatagcgacggcgaggtggctaggcgttcaacaacagcggctgtggtggtggtggccgtgatcgcggtcaccggaggcatggcggcctcagacagccgagggagtgggagacggctacatttggtcggcgcggcatcgtctggtggagggtcggagaccggcttggcgcagagaggcgtagccgatggcggcggaggccggctcggcgcgagaggcgcgggcggcggagatggaggccggcttggcgcaagaggcgcggccgatggagggaggccggattggcgcgagagacgcgtccggtggaggaggccggcttggcgcgagaggcgcggccggcggtggaggaggcgacctaggtgtgaggaggagctgccgatggatagattggtccggcttcattatggtggttgtgtggtagatgaaagtacacatggaagccaatttgagggaatgacagttagacaattagtgttttttgcgaagcctacctttgaggagttaatgtctcgcatcaagcatgaattggattggaatgatgagtcggttggtgtgcaagggagatacgatgtgggcggcggtgtcatgtcacataaatttatgttagacttgaatggagagatcgaatggcaaacatatatagatatagtattggggtcacatttcaaatctcttgaggtgtttgcatggaagaaagatggtaggatagggaagaaagaacttatagaccttaatgaaagtcaactcatagaatcacccattagctgtcacgaactgtcggagaggtgtagtaggaaggaagaattgattgaggaagacgtggaggggggcgagggagtaaatgatatggcggatgtggaggtcagggaagagaatgacccggtaagggaggaagtacatgcagaggagaatgtgccgttaagggaagaagtacatgcagaggacaatgtgccgttaagggaggaagttaatgtggaggagaatgtgccggtaagagaggaaggagatgttgaggatggtcgggaggtaggagatgatgtggagttgcctgaggaagaagcgaatgctaagaatgtaagtatgggcctaagggagttggctaggctgaaattctatacccgagaggagtgtgaggaggctatgatacgcagtggattgaacccaggctggttggagtatgatacagaggatgaattggatgagtccgcttccgactccgatgatgatcgtagcacacaggatggagcactttccggggttggaggatttctacgaggagaagcaccgggccccacagattgccagcggagagcgcttgaagacccttcgagtcagaggtcacacggcgcacatactgttcgacgaccgcgaccggtgcctctgtacaacgccgctgctctgacggccctagtggaccggtggcgtccagagacacacaccttccacctaccgtgcggggagctgacggtcactctggaggacgtcgccatgatcctgggtcttcctatccggggtcaggcggtcacaggtgacacagcgtcggggaactggagggagagggtcgaggagtaccttggtctggagcctccagtggcacctgatggtcagaggcagacgaagacatcaggggttcctttgagttggttgcgagccaacttcggtcagtgtcccgctgaggcagacgaggctacagtacagcgatactgcagggcgtacgtgctgtacatcttcggcagtattctgttccctgactctggtggagacatggcttcttggatgtggctgctgttgcttgcggactgggacgaggcgggtaccttcagctgggggtcggctgccctagcctggttgtaccggcaactctgtgatgcttgccgaaggcaaggcggggacgcgaacctagcaggctgtgtttggttgctacaggtttggatgtggatgaggcttccagttggtcggcccatgtggaggacccatcaggcttggccacaccaggatgcagaccgacgtcccactgtagctcacctgtgggaatcggtcccatctccagtagtaggccgcaggaatttggcgtactaccactacacaaacgagatggactacctacagccagaacatgtggtgtggatgccatatcaggcacaggaagtgctcaagctagaactgaatcccatgtgccatatagaggatgcgttgaagaccctacggtgcccactgatctgcttctatgcagtggagttccagatgtgccaccgcgtgatgcggcaattcgggaggcttcaaacaatcccgcaccgtttctccacgagtatcgacctacacaaggtggaccgtcggaagaacaagaaggtgactgattgggcttactaccatcaggatcatatcacgcaatgggagaagttcgaggagaatggagtaccagaccagggtcagcacaacgggacggagttcgacttgtacttggcgtggctccacaggacctaccgtcttgtcctacgtccggcttggacactagccgacatagcggatgaccccgaggatgttgaggagcagaacaagtacgatactcgtacccgtctaggtaccacggtcgagacgggacctgttcgcgacagagtggctcgagagctcttgcggaccgtcaacgacgcgggagtggcgctaggcacggctcctggctctgaaggagagggcggcaccctccgcaacgccctacagagactacggcagcgatgtcggaagttggcagcaaggctcggctgcaggtcgactgatgtggtcgaacatgctcatgcccaccaagagggggatgaagaaggggaggtgggtgacgaggagggcgagcaagacaaagaggcggaggaaggagatgaggaggaagaaggggatgaggacagagaagaggaggcggatgagctcggtccctcgcagctagaggacgcaccagagtcgtcacagccggatatctcgcagcccggcccgtctcgaccacgacgccggcgggctccttcgcaggactggaggtacacccccgacgtgcctcgtcctcgcactagaggtaggaggagaggtcccagcccagccatccagaaggcttgctgggctgggccacggccgaaacggccaagtccaacctcagcgccaggtgggctggcgctgagtgtcgcacggtcagcgccattatggctggcgctgaggtccaagcccgcaagccatccagaagccttgcttgtctgggccttgggggttgcggccaagtcccacctcagcgccagtccggttggcgctgaggaaactattaccccttcgcagctagcttgcaagccataa

SEQ ID NO: 5670 - DNA, 509 bp, Oryza sativa
  Clone ID: PAT_MRT4530_12434C.1
tttgtttcatgggtcagactgtgggagtcatcggagggggtttttaaaactaaggttgggccagaatgacacaggtgttcatgctttatcaaatgtatgtcatgttgacgtggagcggataagtcaaagaaagcctggtgaaatgttgccacctcatgagcctggagttgtaaaacgtgcagtgaaccattttctacagaagaatgaaggtgacataatggtgactgatgtccgttgtgttgcaccagacttccatgctagatacaaagccctatagcgcacgtaccactatcgtttgctttctggatctgagccactatcagttttttgagaaaacctctgcttggcacatacccgaggatttaaatgtacaggcaatgaagaaagcgtgcagcatacttgttgggcatcatgatttcagttcatttcgagcaactggatgtcaggcaaactctcccatgagaactttggatgagcttagtgttacagaagtatttccttccatgttt

SEQ ID NO: 5671 - DNA, 2655 bp, Oryza sativa
  Clone ID: PAT_MRT4530_12435C.1
atgggactggcgctgacattgtgccaccgtggcggccgggccgatcccctagctgacgtggcagctacctcagcgccaaccgcttcggcgctgaggtgcccaacctcagcgccaaatgaaagtacacatggaagccaatttgagggaatgacagttagacaattagtgttttttgcgaaacctacctttgaggagttaatgtctcgcatcaagcatgaattggattggaatgatgagtcggttggtatgcaagggagatacgatgtgggcggcggtgtcatgtcacataaatttatgttagacttgaatggagagatcgaatggcaaacatatatagatatagtattggggtcacatttcaaatctcttgaggtgtttgcatggaagaaagatggtaggatagggaagaaagaacttatagcccttaatgaaagtccactcatagaatcacccattagctgtcacgaactgtcggagaggtgtagtaggaaggaagaattgattgaggaagacgtggaggggggcgagggagtaaatgatatggcggatgtggaggtcagggaagagaatgacccggtaagggaggaagtacatgcagaggagaatgtgccgttaagggaagaagtacatgcagaggacaatgtgccgttaagggaggaagttaatgtggaggagaatgtgccggtaagagaggaaggagatgttgaggatggtcgggaggtaggagatgatgtggagttgcctgaggaagaagcgaatgctaagaatgtaagtatgggcctaagggagttggctaggctgaaattctatacccgagaggagtgtgaggaggctatgatacgcagtggattgaacccaggctggttggagtatgatacagaggatgaattggatgagtccgcttccgactccgatgatgatcgtccagtgcgtaagatgtcagagcatgaaaggactgtgtttgcgaaactgatgggtagaaacccggaaataacacaattcgaggatcttaccagatctgggctagcaattgctgatggggatccacaatatgacggtgccttcgaaccaatgtgtgatgaaccaaggaaggggttggagtttcgatcgatggatgatctgaaaatatggctacagagttattctatccgtgtccaccggccgtatcatgtgaaggaatctaacgcgtcagtaaagtatactgtggcttgtctcgatcgccattgcaaatggcagattaatgcaaggaagagtggaggagataggtggcgggtgactagggtgggcgaagaccacacatgctgtagtgcggaagtaaccggcaagcatttgcaacttacttcaaggtttattggaaacaggttacaggcatttgtgcgagctgaaccaactttatctccagcagcgattgtcgaggcagttgagcaaatatggcactatcggcctacgtatggcaaagcatggcgtgctaagcaagttgctatgaaggtcatttggggagattgggacgaggcgtatgttcgcttgcctacactgatgcgtgccatcaaagcaaagaaccctaccatgcatttccgtgttgaagctcatcccgagaagtccaggatggtggatagagtacagaggcgagtatttggacgtgcatattggatatttggccagtccatagaagcattcaagcacttgaggccggtgctagcaattgatggcactttcttaaccggtaaataccaaggtacattgctcacggcaataggggtcgacgccgggttacatcttgttcccttggcgtttgctctggtagagaaggagaatacatccaactgggagtggttcatcaacatgttgagaaacaagttgatcggtcctaatagagaagtgtgtataatttctgatagacaccctggcattttgaactccatcatccacatcatgcctcatcacctaaccattcaccacaggtggtgcatgaggcacttctgtgctaacttctacacagctggagctacgactgatcagatgaaagatcttgagcgcatatgtcaaataaatgagaaagcattgttcctagatgagataaacgcctcatggagactacggcagcgatgtcggaagttggcagcaaggctcggctacaggtcgactgatgtggtcgaacatgctcatgcccaccaagagggggatgaagaaggggaggtgggtgacgaggagggcgagcaagacaaagaggcggaggaaggagatgaggaggaagaaggggatgaggacagagaagaggaggcggatgagctcggtccctcgcagctagaggacgcaccagagtcgtcacagccggatatctcacagcccggcccgtctcgaccacgacgccggcgggctccttcgcgggactggaggtacacccccgacgtgcctcgtcctcgcactagaggtgggctggcgctgactttcccacagtctgcgcccttatggatggcgctgaggccccttcccgaaagccatccagaaggcttgaaactgccaaggcccacctcagagccaggtggactggatcgtgacgtccccttggcaacacacattatggctggaactgaggtccctatccaaatgccaaacctaaggcttaccagtctgggccctgcgggctggcactaa

SEQ ID NO: 5672 - DNA, 3528 bp, Oryza sativa
  Clone ID: PAT_MRT4530_12436C.1
atgggcgcggagagcgcggcgcacgcgcggacgtggccgacgtggcccggggaaggcggaggcgtgggcgcggcgacggttgcgggcgcggcggcgcgccgggatcggcgggagatggatagattggtccggcttcattatggtggttgtgtggtagatgaaagtacacatggaagccaatttgagggaatgacagttagacaattagtgttttttgcgaagcctacctttgaggagttaatgtctcgcatcaagcatgaattggattggaatgatgagtcggttggtatgcaagggagatacgatgtgggcggcggtgtcatgtcacataaatttatgttagacttgaatggagagatcgaatggcaaacatatatagatatagtattggggtcacatttcaaatctcttgaggtgtttgcatggaagaaagatggtaggatagggaagaaagaacttatagaccttaatgaaagtccactcatagaatcatccattagctgtcacgaactgtcggagaggtgtagtaggaaggaagaattgattgaggaagacgtggaggggggcgagggagtaaatgatatggcggatgtggaggtcagggaagagaatgacccggtaaaggaggaagtacatgcagaggagaatgtgccgttaagggaagaagtacatgcagaggacaatgtgccgttaagggaggaagttaatgtggaggagaatgtgccggtaagagaggaaggagatgttaaggatggtcgggaggtaggagatgatgtggagttgcctgaggaagaagcgaatgctaagaatgtaagtatgggcctaagggagttggctaggctgaaattctatacccgagaggagtgtgaggaggctatgatacgcagtggattgaacccaggctggttggagtatgatacagaggatgaattggatgagtccgcttccgactccgatgatgatcgtccagtgcgtaagatgtcagagcatgaaaggactgtgtttgcgaaactggatcttaccagatctgggctagcaattgctgatggggatccacaatatgacggtgccttcgaaccaatgtgtgatgaaccaaggaaggggttggagtttcgatcgatggatgatctgaaaatatggctacagagttattctatccgtgtccaccggccgtaccatgtgaaggaatctaacgcgtcagtaaagtatactgtggcttgtctcgatcgccattgcaaatggcagattaatgcaaggaaaagtggaggaaataggtggcgggtgactagggtgggcgaagaccacacatgctgtagtgcggaagtaaccggcaagcatttgcaacttacttcaaggtttattggaaacaggttacaggcatttgtgcgagctgaaccaactttatctccagcagcgattgtcgaggcagttgagcaaatatggcactatcggcctacgtatggcaaagcatggcgtgctaagcaagttgctatgaaggtctttggggagattgggacgaggccaaagaaccctaccatgcatttccgtgttgaggctcatcccgagaagtccaggatggtggatggagtacagaggcgagtatttggacgtgcatattggatatttggccagtccatagaagcattcaagcacttgaggccggtgctagcaattgatggcactttcttaaccggtaaataccaaggtacattgctcacggcaataggggtcgacgccgggttacatcttgttcccttggcgtttgctctggtagagaaggagaatacatccaactgggagtggttcatcaacatgttgagaaacaagttgatcggtcctaatagagaagtgtgtataatttctgatagacaccctggcattttgaactccatcatccacatcatgcctcatcacctaaccattcaccacaggtggtgcatgaggcacttctgtgctaacttctacacagctggagctacgactgatcagatgaaagatcttgagcgcatatgtcaaataaatgagaaagcattgttcctagatgagatcaaacgcctcatgggtgtggtcggagagaggccaaagaagtggctagaagaccatatgccacttaaggtcaaatgggcaagagcatttgataccaacgggcgtcgtcatagcatcatgactagtaatatggccgagagtttcaataatgtattgagaggcattcggaaactgccggttacagctattgtggcatacacattttcgaagtgcaatagttggtttgtcgatagacacaaagaggcaactgtagatatcctgtgtggaaagaagtggcccacaaaagttaaggacatgttggaggagcagcaaagacgaaccttggggcaaagggcagcatgttttgatttcccttcgatgaagtatgaggtcagcgagcaaggcggagtcacggcggctggggttcaatggggtggacgtcactacgtcgtggttgcgagagataacacatgtagttgtcagttccctcagctccatcacttgccatgctcccacatgataaccgtttgtaagttgcgagaacaacacacgaggaagaagaaggacaagaaggttgaagaacgatatggacaaagcatacaaaggctcagccaaccgacggtcccacatgatactcgtacccgtctaggtaccacggtcgagacgggacctgttcgcgacagagtggctcgagagctcttgcggaccgtcaacgacgcgggaatggcgctaggcacggctcctggctccgaaggagagggcggcaccctccgcaacgccctacagagactacggcagcgatgtcggaagttggcagcaaggctcggctgcaggtcgactgatgtggtcgaacatgctcatgcccaccaagagggggatgaagaaggggaggtgggtgacgaggagggcgagcaagacaaagaggcggaggaaggagatgaggaggaagaaggggatgaggacagagaagaggaggcggttgagctcggtccctcgcagctagaggacgcaccagagtcgtcacagccggatatctcgcagcccggcccgtctcgaccacgacgccggcgggctccttcgcaggactggaggtacacccccgacatgcctcatcctcgcactagagcgccagtgcacctggcgctgaggtcccagcccagccatccagaaggcttgctgggctgggccaaggccgaaacggccaagtcccacctcagcgccaggtgggctggcgctgagtgtcccacggtcagcgccattatggctggcgctgaggtcccagcccgcaagccatccagaaggcttgctggtctgggccttggggttgcggccaagtcccacctcagcgccagtccggttggcgctgaggcagctgccacgtcagctggggatcggcccggccgccacggtggcacaatgtcagagccagtcccgttggcgctgacacggccaacgtcagcgccaatgtgtttggcgctgaggcgacggcctatttttggttga

SEQ ID NO: 5673 - DNA, 2337 bp, Oryza sativa
  Clone ID: PAT_MRT4530_12437C.1
atggtatttggcctcaactgtccagctaagcagattgtatacgtggagaagaaaagaagatggggcccatgtattcaccagctccgcgcgtcctcgtttggctccgagagcctcgtcagaaaaacagcttttttaatcgcatttgcacatgagaaagcaggacacagagagaagggggagaagctgaccaaaaaagatatccgatcgattggaattggaatggatctgggagcggcgtcggcggtggcggtgtcctccagcggcgggcggcgggcgacgggcgaaatcggccagcgacaggtggaatcggctggagagttagggctcacagacaagcagctgcagatgtggttctgccaccggcggttgaaggaccgtaaaccaccgccgaagcggcagcagctggaggaggaggttcatgtgccagttatggcgccgcctcctgtgctgccaccaccgctgccacacagcgagctaacaatggctcctggtgggatgtatggcgagcagttgctgccctcctcttcccgtagaggaactggccggccatcagccattcttgatatgtctgatcttcagtgcctccccctactcacgagccacgcgacattgaagctgattgattgtattcctcatcaagggaaagcatggcagattgtacagcttgatgcacttgacgagaggatggagcactttccggggttggaggatttctacgaggagaagcaccgggccccacagattgccagcggagagcgcttgaagacccttcgagtcagaggtcacacggcgcacatactgttcgacgaccggtacgtcccgtacctacggcgggctaagctcttggcgttcgtgaccatggcgcagcgaccggtgcctctgtacaacgccgctgctctgacggccctagtggaccggtggcgtccagagacacacaccttccacctaccgtgcggggagctgacggtcactctggaggacgtcgccatgatcctgggtcttcctatccggggtcaggcggtcacaggtgacacagcgtcggggaactggagggagagggtcgaggagtaccttggtctggagcctccagtggcacctgatggtcagaggcagacaaagacatcaggggttcctttgagttggttgcgagccaactttggtcagtgtcccgctgaggcagacgaggctacagtacagcgatactgcagggcgtacgtgctgtacatcttcggcagtattctgttccctgactctggtggagatatggcttcttggatgtggctgccgttgctcgcggactgggacgaggcgggtaccttcagctgggggtcggctgccctagcctggttgtaccggcaactctgtgatgcttgccgaaggcaaggcggggacgcgaacctagcaggctgtgtttggttgctacaggtttggatgtggatgaggcttccagttggtcggcccatgtggaggacccatcaggcttggccgcaccaggatgcagaccgacgtcccactgtagctcacctgtgggaatcggtcccatctccagtagtaggccgcaggaatttggcgtactaccactacacaaacgagatggactacctacagccagaacatgtggtgtggatgccatatcaggcacaggaagtgctcgagctagaactgaatcccatgtgccatatagaggatgcgttgaagaccctacggtgcccactgatctgcttctatgcagtggagttccagatgtgccaccgcagactacggcagcgatgtcggaagttggcagcaaggctcggctgcaggtcgactgatgtggtcgaacatgctcatgcccaccaagagggggatgaagaaggggaggtgggtgacgaggagggcgagcaagacaaagaggcggaggaaggagatgaggaggaagaaggggatgaggacagagaagaggaggcggatgagctcggtccctcgcagctagaggacgcaccagagtcgtcacagccggatatctcgcagcccggcccgtctcgaccacgaagccggcgggctccttcgcaggactggaggtacacccccgacgtgcctcgtcctcgcactagagcgccagtgcacctggcgctgaggtcccagcccagccatccagaaggcttgctgggctgggccacggccgaaacggccaagtcccacctcagcgccaggttggctggcgctgagtttcccaatgtcagcgccattttggctggcgctgaggtcccagcccgcaagccatccagaaggcttgctgggcagggccacggccgaaacggccaagtcccacctcagcgccaggtgggctggcgctga

SEQ ID NO: 5674 - DNA, 1282 bp, Oryza sativa
  Clone ID: PAT_MRT4530_12438C.1
ttttttttttttttttttttggttgaagcaaattcttgacagaagtgaagtgaatcagcttcaagttattgcaaatttcaacatgaagaacagatacatcataatgcaatgcctctaccaggactaaatctatttacaatcacctatattatgttgctaacattcattcatctgtgcctaaactagatgacaaatgctcaacaaactaactaattaattaattaattaaattttcttaaggtgtttcaacttcaaaattgaaacaatattgtcctaacttcttcccggagcttgagctcattccactccttcacccacagggagtagctcgactgtggcgcaacgacatcaatggagacctccttgttctccaccagctcgctggaatggcgctcaaacttgtgcaagtcctccagcatcctcgccagcgatgtcatgtcgcgttcgctcttggcactctctgtctgctcgcgcgcttcctccaccctcgcccagaagcacgggtcctgcgttagcccagcgaacttgctcctcctcgctgtcgtggtggcagaggtgtcaccagtgctgggatctgtgcagcccttctgtttccaccacttgtcgaacagctcataccttctctcccggccatgggtgatgtaagagccgcgtgtgcggtgtaggttgtttcggtggtagtcggcaatgtcaagtggctcaacaaggagctggtagaagtgggcagcgttgacccacttggcacggcggtggaagtcgtaggggagctggctggtgtcaagcatggagaggacgccatcccagaactgtgcgagcttgatgcggtacatgttggccccgctgaacttcttaggtgatagccgctgcttgaatgcgtcgtaatacccggtgttggcatcgaacaatgccttgtaccactcgatctgcgctcggcacggcgtgatccgtcccaaccgcgttgcgaggctcgcacagttcaggctcgggctccggcccacgcgcttcgacgtcttcagccactgccgtgccggtgctgcctctgtagcttcaccggtgatacctgatgcctccagtgcaatggagatgccgacgtcgtagttggacgcggcaggtgcggtgactgtggcaccaaggcgcctcttgagcagcaagtggtgcggcatgctcagccacgaggtcacccgtagcaggagtgtgcaagacctcaggtggcaccgcgcctgtctctgccgcgcgccttgcagcaaatgttgcatatagcatctgaactgctgcctcgtgc

SEQ ID NO: 5675 - DNA, 2073 bp, Oryza sativa
  Clone ID: PAT_MRT4530_12439C.1
atgtggaggtcagggaagagaatgacccgggaagaagaatatcaagaggacaatgtgccgttaagggaggaagttaatgtggagaaaaatgcgccggtaaaagaggaagaaaatgttaagcatggtcgggaggtaggagatgatgtggagttgcctgaggaagaagcgaatgctaagaatgtaagtatgggcctaagggagttggctaggctgaaattctatacccgagaggagtgtgaggaggctatgatacgcagtggattgaacccaggctggttggagtatgatacagaggatgaattggatgagttcgcttccgactccgatgatgatcgtccagtgcgtaagatgtcagagcatgaaaggactgtgtttgcgaaactggtgggtagaaacccggaaataacacaattcgaggatcttaccagatctgggctagcaattgctaatggggatccacaatatgacggtgccttcgaaccaatgtgtgatgaaccaaggaaggggttggagtttcgatcgatggatgatctgaaaatatggctacagagttattctatccgtgtccaccggccgtaccatgtgaaggaatctaacgcgtcagtaaagtatactgtggcttgtctcgatcgccattgcaaatggcagattaatgcaaggaagagtggaggagataggtggcgggtgactaggggagattgggacgaggcgtatgtttgcttgcctacactgatgcgtgccatcaaagcaaagaaccctaccatgcatttccgtgttgaggctcatcccgagaagtccaggatggtggatggagtacagaggcgagtatttggacgtgcatattggatatttggccagtccatagaagcattcaagcacttgaggccggtgctagcaattgatggcactttcttaaccggtaaataccaaggtacattgctcacggcaataggggtcgacgccgggttacatcttgttcccttggcgtttgctctgatagagaaggagaatacatccaactgggagtggttcatcaacatgttgagaaacaagttgatcggtcctaatagagaagtgtgtataatttttgatagacaccctggcattttgaactccatcatccacatcatgcctcatcacctaaccattcaccacaggtggtgcatgaggcacttctgtgctaacttctacacagctggagctacgactgatcagatgaaagatcttgagcgcatatgtcaaataaatgagaaagcattgttcctagatgagataaaacgcctcatgggtgtggtcggagagaggccaaagaagtggctagaagaccatatgccacttaaggtcaaatgggcaagagcatttgataccaacgggcgtcgtcatagcatcatgactagtaatatggccgagagtttcaataatgtattgagaggcattcggaaactgccggttacagctattgtggcatacacattttcgaagtgcaatagttggtttgtcgatagacacaaagaggcaactgtagatatcctgtgtggaaagaagtggcccacaaaacgcttgaagacccttcgagtaagaggtcacacggcccacatactgttcgacgaccggtacatcccgtacctacggcgggcgaagctcttggcgttcgtgaccatggcgcagcgaccggtgcctctgtacaacgccgctgctctgacggccctagtggaccggtggcgtccagagacacacaccttccacctaccgtgcggggagctgacggtcactctggaggacgtcgccatgatcctgggtcttcctatccggggtcaggcggtcacaggtgacacagcgtcggggaactggagggagagggtcgaggagtaccttggtctggagcctccagtggcacctgatggtcagaggcagacgaagacatcaggggttcctttgagttggttgcgagccaacttcggtcagtgtcccgctgaggcagatgaggctacagtacagcgatactgtagggcgtacgtgctgtacatcttcggcagtattctgttccctgactctgaggttgactggcgctga

SEQ ID NO: 5676 - DNA, 360 bp, Oryza sativa
  Clone ID: PAT_MRT4530_1243C.1
ccgactcgtgggttaatacgtttcctgtgtctagacgagcctggctttaactacatataggcggtagcattaacatctagctagcagatcactcaaggagaagggctcaggtcttgctagaagcacagggatataggctagtggcaatattataatagcacgagacacgtgagatcgctcgagataaacacacatacaaccatgtacttggtgagactgattgccctatctataccaaaaaatggacagggatcctatgacgatgggcgttccgaggcaggaacaaacattcagacaacaggatcatgagctgtacagactgtaccatgttcagatacaggatgatgacaatgccggtgc

SEQ ID NO: 5677 - DNA, 413 bp, Oryza sativa
  unsure (1)..(413): unsure at all n locations
  Clone ID: PAT_MRT4530_12440C.1
ctgggcaaaaaatgtggccccccactgctgtggaacgctatganatagcatgcattgcaagtggtgatgatgaagtattactacttatggatatgcctatctgccagctgggctggatgccatgatgcgaatggattatgaagcatgccatgagctgctggtgaccatatgcaagtggtgatgatgaccgactggggtgttgatgtgccgtgtgtgcaatgaaaaaatgtgtgcaattgatgtgctggtgatgacccctgatgttgagtgttgcactgcctgcactgctagatgaaagctggtggaacatgctgtgcttgatgaagattgggcggatgggtgatctgngacaagnggatgcaccagaacaaagaggngttatgatttctgaataaaaaaaaaaaaaaaaaaaa

SEQ ID NO: 5678 - DNA, 1602 bp, Oryza sativa
  Clone ID: PAT_MRT4530_12441C.1
atggcggtgatggaggataaggccttccaatttagcaccacttacctcaactccacggtattcaacgacacgtacaaagagggagttccagttgtgttggactgggtcataacattggatacatgtgagaaggctaaaagcaaaaccacttcctacgcttgtgttagtacaaacagcatctgcaatgatgatccgagtggaggttaccgttgtaattgttcacatggatatgaaggaaacccgtatattaaagatggttgtgaagatatcaatgagtgcctcgacaatgttacttatccttgtccggggatatgcaataatacaatggggagtttcacttgctcatgccaccaaggaaactatatggagaatggcacttgcataccaaatcggaagtccggttttcttgcacttcctatagtaggcacaagtgttggacttgtcatcctagtgatcaccataacttgtgcatgcttaattcatgatagaagaaagctacagcacatcaaaaatcaatactttcgacggcatggtggcctgctactatatgaagagatgaaatctaaacaaggtcttgcattcaaaatcttctcggaagaagaattgcaacaggcgacaaacaaatttgatgaacatcaagttctaggccaaggaggcaatggaattgtttacaagggacatcttaaggacaacttggaagtagcagtaaaaagatgcatgacaattgatgagcaaaagaaaaaagagtttggcaaagaaatgctaattttatcccaaatcaaccacaaaaacattgttaaactattaggttgttgccttgaagtggaggtccctatattggtctatgaattcatcccaaatgacacactttaccatctcatccatggaaactataatggttggcacatccctctggttactcgcctacggattgcccatgagtctgctgaggcacttgcctacctccactcttgtgcttccccaccaatcctccatggtgacgtcaagtcgtcgaacatcctccttgatagcaacctctcagcaaaagtttcagattttggtgcatctatcctagctccaacagatgagacgcaatttgtcacactagttcaaggaacttgtggataccttgacccagagtacatgcaaacgtgccaattaacagataagagtgatgtatatagctttggagttgttcttctagaacttcttacacgcaagaagccgttcaatcttgatgcgcttgaaaatgagaaatgcctgtctatgaggtttctctctgcaatgaaggagaataagctcagtgatctattggatgatcaaatcaagaataatgagaatatggggtttcttgaagagattgccgagttagcaagacaatgcttggagatgtccggtgtagataggccatcaatgaaggaagtaagagataagcttgataggctgaggaaagtcatcgagcatccatggacacacgataacccagaagaattggagagcttgcttggtgagtcatcatgtgtggtcatctcagaggttgagagtacaggaaattttagcattgaaaggaaagttgtcaagggtttggaatcagggcgttaa

SEQ ID NO: 5679 - DNA, 1249 bp, Oryza sativa
  Clone ID: PAT_MRT4530_12442C.1
gcacgaggccccccccatctcccccccccgcccccctccgcggccgcgagagaggggggcggtgcgagagtcagcgggcgggcgcgggagaggcgtgatggctggtgtggaggtggcgcaggagaggagaggagaggagaggagattcattatgggggtggactactacaagctgctgcaggtggagcggggcgccaccgaggaggagctgaagaaggcgtaccggaagctggccatgaagtggcacccggacaagaaccccaacagcaagaaggaggccgaggccaagttcaagcagatctccgaggcctacgagggaatggcatgttatattcaatttttagaacaaaaattgctgcaggaggtgctaagtgattcccagaaacgagcagtctatgaccagtacggagaagaggggctcaaagggcaggtgccacctcctggagcaggtgggcctggtgggtcttcatactatgggggtgatgggtcgacgttccggttcaaccctcgaagcgcggatgatatatttgctgagttcttcggattttccagcccattctcaagcatgggtggcatgggtggtatgggtggaggtgttgacaggggcatgcggggatcaaagtttgggatgtatgacaatgatatatttgggtccttctctcagttccctggtgaggcatcaatgcatgctccccaacggccccagaaggctgcaccaattgagaaccgactgccttgcaatctagctgacttgtacaaaggcaccaccaagaagatgaaaatttcacgggaaatattagattctagcgggagaaccatggttgttgaggagatcctaacaatcgacataaaacctggatggaagaaagggacaaaaattacttttcctgaaaagggtaacgagtctccgcatgtgattcctgcggatattgtattcgtgattgatgagaaaccacatgatctgtttacacgagaggggaatgatctcgtcatgacacagaagatttccttggctgaggccttgacaggatgtacagttcaggtaacagcactagatggtcggaacctaacagtaccaatcaataatgtcgtctaccctggctacgaggaggttgttctccgagagggcatgccaattccgaaggatccatcaaagaagggaaatcttaggatcaagttcaacatcaaattcccctcaaggctgacgtctgagcagaaatcagaaattaagaggctactagcttcttga

SEQ ID NO: 5680 - DNA, 1706 bp, Oryza sativa
  Clone ID: PAT_MRT4530_12443C.1
tttttactctgatcaataaaccggtaaagtaggtccacatccttagcacttggaggatctgaatcaggaactatctgtttatctcttagaaactggatgtacctttccctattgtccttcggctcatttatcatagctgcacatcgagattgactggtccgaattctctgatctaggaactctggatgatactggcaggatatctcccggtgacttggatgaggtgcaagtaccatctacatcatcagttaagttgtcaagagtcttctttctgaggttactagtatagtagtattctgaaaaggatctttttgcaacgaagaatctgcatagactacttataaaggcataatcctttacaacgtaaggacatgttattagtattctgaaaagtgaaaaagaccttttgcaacgaagaatgtttggtacagctagacttcccatctgaagtattctgggcagtatctccccacatcttgcattaattttcaaggataaaatactatcagccctggtctcaccaatggtgatcgccgcaattggagcattcgcttcatgtgcaagccttgcgagcctaaaagcagacattgtcattagtgctgaaccaaccactagaagagcatcacaatttcttgcagcctccttagtgctttcagctctctcttcaggaacattatcaccaaacatcacaacatcaggtttcagcactccaccacattggttgcaactaggaatatcaaaatcttgctcccagaacttctcatcaatctcaatatcaccatcaggtcgctgctgcattccgaaacttttgtctgagcccggttgtcctacttccaaactgtcaatagctagagcccactttgggttgaggtccttgacctgctcctggaatgattctcggtcaatggatgtaccacagtctaaacatgctacctcatacacacttccatgcaattcaactggcttactcccagcacgatgatgcaacctatccacgttttgagtaaccattgagtgtacccggccaattctctccagtgatgcaagagcataatgggctgagtttggttgtgctctcctgaaccttctccatccagcatagctcctagcccagtaccgccttcgggctcgaatagaacgaacaaactcctgatgagtaagtggtttaaaaccagaactgtaagcaccattagggctcctataatcaggaattcctgattcagtgctcattcctgctccagttaacaccatgagttttttactctgatcaataaaccggtaaagtaggtccacatccttagcacttggaggatctgaatcaggaactatctgtttatctcttagaaactggatgtaagtttcgcaatagtccttaggtgcaacagctgacgaatggttatatcttgcttgtatggagcgaaaagagcatataaaatggagttgtattttccttctgtggagaagtccattatttactgacgcatggaagttgcataactgaggagaaaatcctttatatgctgctcgaagagcacctgtgagacctgcaatgatcggagccgaagcgcgcgacgcgtgcgcccccgccgccataggatccttcttggcggggagggtcggggaggccctccctctccggcggtggcggccggccgacgtggtgcgtcgccgcgaagctgctcggcgatttggtttcggacgcgtgg

SEQ ID NO: 5681 - DNA, 708 bp, Oryza sativa
  Clone ID: PAT_MRT4530_12444C.1
aggaaaaggggtttattgcgtcagcggctagggtttgcggtggaccgggcgcacggcagcagttcacgggaacggacggccgagatcgatccatccaaaacggacgaccgagatcgaacggtccacgaccgaaccacggaagacgacaatgacgacgtcagcgatgacgtcacttccggcggcggctcggcggctcgggcacgcaagctcgccggcgaacgacggcgcgacgacgcgaacggagggctctaggacgtagagcgcgacgcggcgaactcaccgatgaccaaaacggcggcggaagatcaacggacgacgacggcgttgaggaagaagcggcggcgaccttcggcttgacgacgacggcggtggtccggcggtcgacagcgacggcggatgggcggacgagaaagacgacgctacggcgaccacgacggcggccttcccgagcgacggcgacgactggagcgatggcggcgcacggctgaagcggcagcgacgacggcggcactaggctgcacgaggctagggcgctacagacgtcggcgagcaaaggcgagggtggcggcgggtagaggagacaccggggatccttttataggggcaaggaggcggcggcgaaggcccacggcggacggcgacggaaaggaaagattggggaaaaacgaatccgaatcaaactcgaatctgcctatttccaaaggagat

SEQ ID NO: 5682 - DNA, 276 bp, Oryza sativa
  Clone ID: PAT_MRT4530_12445C.1
atgttaaccggaagcggccacgcggccggtgaatcaatcaatcgcgcgcccgtggccgtgggagctgaacctgatcgagcacgtataccgcacgcgaaacgtggatcggatcgcgacatgcccccggccggcggccgcgggcagcgtgcgggccaggcaggcgatcgcgagagagggcaaaccgtgccttctaagcatcacggaaatgaagcccacacgccggtgcatccacgtcgcctagctaaatttggcccggtgtcctctccagtttcctga

SEQ ID NO: 5683 - DNA, 849 bp, Oryza sativa
  Clone ID: PAT_MRT4530_12446C.1
ccggccggggaatcgatctcttgtgtttgttgatcgatcgaggtcgaggatgccgaagaacaaggggaagggagggaagaaccggaagcgggggaagaacgaggcggacgacgagaagcgggagctggtgttcaaggaggacgggcaggagtacgcgcaggtggcgcggatgctgggcaacgggcggtgcgaggcgcagtgcatcgacgggacgaagcggctgtgccacatccgcgggaagatgcacaagaaggtgtggatcgcggcgggggacatcgtcctcgtcggcctccgcgactaccaggacgacaaggccgacgtcatcctcaagtacatgaacgacgaggcccgcctcctcaaggcctacggcgagatccccgaccacgtccgcctcaacgagggcgtcgtcgacgaggacgacgccgccgcccacgacgactacatccagttcgaggacgaggacatcgacaagatctgatctcatctacccactgctgctgctgcttcatcagtccaatggtacaaagaaacaatccaagaattgcttcttgttacttgctactattgtgatgtgtggtgtgatattataatcacggtggtgtgatgtgtgaggtcgtctgcctgagagagacctgtatatatggaagagattcggggggcaattattctgcccaataatcaaatattgaatcgaattgctcgctttacgcgatggggttcatctagttttgttctactctggttcatgtctgatcagtctctgttgttacacagttttcattacttagggctgtagcctgtatgcactggaactaatatattaacagtatttagtattctgactgattc

SEQ ID NO: 5684 - DNA, 822 bp, Oryza sativa
  Clone ID: PAT_MRT4530_12447C.1
atgaagaagaccatggttctctaccccggcctctccgtcagccacttcctccccatgatgcagttcgccgacgagctcatcgaccgcggctacgccatcaccgtcgcactcatcgaccccgtcttccagcagcacatcgccttccctgccaccgtcgaccgtgccatctcatccaagcccgccatacgcttccacaggctcccacgcgtcgagctccctccggccatcaccaccaaagacaacgacttctccctcctcgggtacttggacctcgtgaggcgacacaatgagtgcctccatgacttcctgtgctccatgcctcccggtggtgcacacgccctcgtcgtggaccctctgtccgtagaagccctcgacgttgccaagaggctcaacgttcccggctacgtcttccacccagggaacgccagcgccttcgccatccacctccagcttccattgatccgtgcagagggtcagccaagcttcagggagctaggagacacccctctcgagctccctggcctcccacccattccggtttcttacctctatgaggaacttctcgaggacccggagagcgaagtgtacaaggccatcgtggatttgtttcacagggatattcaagactccaatggcttcctgatgaacacgttcgagtcgctcgaggcacgggtggtgaacgcgctcagggacgcgcgccgtcacggcgacccggcggcgttgccgccgttctactgcgtcgggccattgatcgagaaggccggcgagaggagagagacagccgagaggcacgagtgcctcgcatggctcgaccggctgtga

SEQ ID NO: 5685 - DNA, 426 bp, Oryza sativa
  Clone ID: PAT_MRT4530_12448C.1
atggcccctattgcaccggcgacgtgggggagtggggaggaagagagagagaggagagacgggattcaaaccgaatcccggcctctaaacgggcgcgcgtgcgcgggagaggtggaggaggtgggcggcgacgtgggcgcgagttgcgagcggtgtgggggcacggataaggcgggaaacggtggcggcgtggggaggtggggcgccggcgtgggcggcaggaggttagggacgaccgacaggtggggcccacctgtcggcgcccgagagagagagggagggagggaggacttcggggaggggaagggaaggagggggccggcccagcaaggagggcgcactggagggaggttgggccgacagcccaacaaggaaaaagaagggaaagaaatggagaaaaaggaaaaagacttttcctgggattaa

SEQ ID NO: 5686 - DNA, 1386 bp, Oryza sativa
  Clone ID: PAT_MRT4530_12449C.1
atgggcaccgcattgttgtctcgcgccgccggcgtgcttgtcctcgtcgtcgttgttgcggcggcggcggcagcgccacggtgcgacctgttccaggggaggtgggcggcggacgagtcgtacccgctgtacgacgcgtcgcggtgcccgttcgtcccggacgtcttcgactgccgccgcaacggccgccccgacgccgcctacctcaacctccgctggttcccctcctcctgccgcctcccacggtttgatggggtggagttgctgcggaggtggcgagggaagacggtgctgttcgtgggtgactcgctgagcatgaaccagtgggcgtcgctggcgtgcatgctccacgccgccgtgccggcggacggccgcgtgtcgttcacctccggcgagccggtgtcgtccgtgcggttcctcgactacggcgtgtcggtggtgctctactacagcaggttcctcgtcgacgtcgtcgacgacgagcccggcctgggccgcgtcctcaagctggactccatgcgcgacgccgccgcatggctcggcgccgacgtgctcgtcttcaacacctggcactggtggacctacaggggagccagccaagtgtacgtggatcgaagacgcgcacgcacatacaccactacgcacgatgtatcgtttttaggcaccgacacggtctctcatgtatacatatatgtgatgtgtaggtgggattacgtgcaggaggggaacaagacgtaccgagacatggacaggctgaccgccttctccaaggggctctccacgtgggcacgttgggtggacgccaacatcgacgcgtcgcggaccaaggtgttctaccagggcatctccccgagccactactacacctcctcctcgtcatcatccaacgacgacggagacggcgaggtggcggcggcggacgggggttgctaccgtcagacgcggccgctgcaggagtcgacgacggcggatggcggcggcggcgcgctgctgccggagcaggtggtggtaagaggggtggtggggtcgatggcgacggcggtgtcgctgctggacgtcacgcggatgtcgcagctgaggatcgacgcgcacccgtcggtgtacggggggccggggcgggaggggatggactgcacgcactggtgcatcgccggcctccccgacgcctggaaccacatcatgagctcgccggcaaggagagaggcagcggccagcaaccccgtctgcgggaggcaacagcagtggtgggaggccaacaacaagggttctttggtggtccacgatggaggaggagaaggggagggaggtgagggagccgacgagctagagctcgctagccgtccattagaaggcgtcggtgggtggtctaagacaatgggtatgtga

SEQ ID NO: 5687 - DNA, 546 bp, Oryza sativa
  Clone ID: PAT_MRT4530_1244C.1
atggcctccgacctacgcccgccagagcaccaagtggcggggaactacgcgtccaccgataagttgggcccgctcgtcccgcgcgtctacaagatcctccaggccggggagcgcggggagcacgaggccgccttcttcccgggagggggaggggaaggcggtggaggtggggaggcggggagggggaggggaaggcagcggaggcaggaaggacgccagatccgcgcccgcctgggggagggggagggacggcggcgtcgcgggcggggagcggcgcggcggtcgcatgcggaggagcggcgcggaggagcagcgtcgcgggagatcgccatgcggaggagcggcgtcgcagccagatccgctgcctctacgcactctactccgtggcggcggacgaccggaggcaggtgggcgaggggcggcggcggacgactggaggcgggtggaggagccgcggaggaggcaggtggcggcgagcgggcggcggtgtcgggcgagcagcggggacggcggcgcgggcggccagatccattaataagtaattaa

SEQ ID NO: 5688 - DNA, 1268 bp, Oryza sativa
  Clone ID: PAT_MRT4530_12450C.1
tttttttttttttttacaatctctccagaagcaatttagaatgcaggttggtaactatgatacggagtagctagtacaaactgttttgactatgtcaccactatagccacaccttttctatgaaggaagttccaacataaatcaaaatgtaaagatgaacatgttacatttacatcactacatgacaagaactgtatttgtgagattgcacttggacatagtttgatgctcctgtcctatccatttttattgattatggcagatgttcctgtatagttgggccagtgtacgtgccagggcgcatattaatattcaccggtacgattaaggcctcaagccaagcataattatctggcccatggactacttttgcttgtccagctgctgcagagaagctagaaaatggataatcatgaaaataggggcaaacacggccagatgattcagagtatggtggggcaatgacatcaagaacagcacaagattttactgaagtgaagcagtgcatgttcccaccactttggggatacaaaacagcagttggacaaggggcattcagaacatcatccgtatgtaactttccaagtttcactggcttgccatttgctagaacagcaggctctacccaatcatacgatttgacatgcatcgaaccatagagtaatttgctcaacacagtcattcccggatgatcatggagaggaataaccgccgatgttggtaagcagaatattccaatagagaaggcgtcacactcgtagacatgcaggtaggttatgggttgcgcccatctagcaacccttgctgaattcttcaagaagtttgattcaaagaacccaaatcctcttccatcctcaagattatcatctctgagtccaacatccacaggagtgattgtatccatgagagaggagatggcgcggatggcgtggtcgggaggtggagacgacggcgaggaggacgcggcgacggaggacggcgacgggaaggtgcgcttgcagagctcgtacagcgcctgcacccgcgacggcgtcgacgtcgccggcggccgcgtcggtatgccccaccccattgatgaggccgtcgacgacctagatgtccccctctcccgctcttccagctcgctcccttctcgccttcttcctcctcttctccctcctcgcgtggtcgccggagaggagcagcgccgccgcggcgagcggtgtcgcgacgcgagggctcaggcggcgcgtggcgtattgtctcgtctcttccagcgcgaggattag

SEQ ID NO: 5689 - DNA, 282 bp, Oryza sativa
  Clone ID: PAT_MRT4530_12451C.1
atggctcgacgttttctcattcctcttgacgtcggatcttctcttccttgcaaccttcgtgctcgctatctacgtcgcctcatgcagcagctcgacaagcttctccgggctcctttgcgccgtcctcgaagttgcaggggctgtggtgctagctttgctggccatggcccacgcaccctcacgacagtgatgctcgacacctgcaatgcactagaatgcattctggtggagtcgccgcgccacttcaagtcccatggatggacggcaagggtgcggttgtag

SEQ ID NO: 5690 - DNA, 153 bp, Oryza sativa
  Clone ID: PAT_MRT4530_12452C.1
atgacgggcttttgctcaattgagatttttcctcacatcagtgacctttacccagtgacggtggccttacccgatagtgatgatgctttcagcccatcacagataagcgatcacgttctagtgttaggtgaagttgatctaactcttgcatga

SEQ ID NO: 5691 - DNA, 1002 bp, Oryza sativa
  unsure (1)..(1002): unsure at all n locations
  Clone ID: PAT_MRT4530_12453C.1
tccggnaattcccgggctcgacccacgcgtccgcttttttttttttttttttttaaagaataactcaatgggagttttgggtctttatttctctgtaccaactcaataggctgagtagcaacaaagaataataaaaccacagaagctcaaaagtgcaaagatgagctctgtgcgccatcacttcggctacaatattactgcaaatgcaaaaggagctaaacctgcaatatatcatctaatcgagaaccctcatctcatgcatcagctttctttagcttggcttcctctctgtctatctcttcaagtgcgctccaaagcttggggtcttcataatccttgatgatcaacgtggctcctgcatccagtagggacttctctgggttccttgttgccacagcaacaacaggaattccagcagcaacgcctgcacgtgtgcctgaagcagaatcctcaaagatgaaggtgtggtccgcagacacctgaagctccttgagagccttcaggtaggggaatggggcgggtttcggcttctcacattcgcctccaacgatgacggcctggaagaaatctgtgaggccaagaagggagatcatgagctcggaattaatcctgggggcattggttacagccgcacgcttgtatccatgatctttgacccactgaaccactttagcaaggccctttacaggttccaaacgctcctttgccaaacttctgtatttagcttccttgtcctcgaggaatttcagccccttctcaaggggccaatcagggaacaaattctgagcagcttcaacatcactccttccagcaatattgtttatgaaaaactcctcgtctattggcacaccgttgttatacccaatctcaagaagcatttcttggaaggccacatgatgaagaggatctgagtcgcacaaggtcccatcaatgtcgaacagaactgcctcaattggaactgatgaagccagaggtctggaagctgggatgccgttgggagtg

SEQ ID NO: 5692 - DNA, 592 bp, Oryza sativa
  Clone ID: PAT_MRT4530_12454C.1
atccaaacatattagcacgttttaaggtaagaaaatggcagtgcccaatatctgttagtgaaaggaactgatcataagccatcatatattcagctatgcaacccgttttgcaattgcataccatgaattagatgacaagatcaaaagacaatcttcaccataaccattgtacctgtaatcaaaggcataccccaataaagaaaaactagaacacaaatcataacttctacaacaatgctggttttagtaatgacttgagctgtaacaggtgcaaaaatgtgtggatgctacctatctggttaagatattatcctgtgatatcttggttgcaggctgaggagtacaactattctgccctaccaatctcaatctctcccctcactccactcccaaaatcaaacagggcagatctttttcctggttggtgaggctgtggggcagtgattgtttcactgtgaccaaaccctagccttgtggtcacatgggaagcactatgagcagagaggctggctagctaggtcttggccattaagccaagtgggggctgcaatgcaattgcaatgcatggagtggtggccagtggtcacaccaa

SEQ ID NO: 5693 - DNA, 975 bp, Oryza sativa
  Clone ID: PAT_MRT4530_12455C.1
tcagccaaacatgttgggaagaggccttattgccatgaaagcatcaaccatctcctcagtcacttgagctctagccctctgatgtctagcaaccagctcagatagaacttcgatgagtcgttgcttcacttcgccagttaacatccttcctgccttgtactccttctttatgtgctcaagctcatcatcgtcttgtaggaagaagtttaggtacttgattgagacatccacatcaagattagcaccaagttccctatggagctccacggtgtcctggccacctgagaaagcatatttattcacctttgcctttatttgtttagaattatctgtcacatatattgcagagtttgggtcactggccgacattttagtgctctccccctgaagtgcagggaaaaatcttgactcaatcagtgaaggtttctgaaaaccaagtttgggagcaacatcacaagtcatcctaaaataaggatcctggtctatagcacatgggataaggcacggcagatggtcatcattgtcatgaaagagatgtggaaacgatgatgagaatgattgagcagcctgcacaggaggaaagctgaccttgccaatttgatcttccggactaattccaaatatccctttaagcaggaagaaatcaccattcaccaaacaaatctcccgcagctgcgccacatgaaaatgggaaagaaaacaggggatttgcagcagatttccaccatgcacaagatttactccattatgtctcctaatcctgctcgctgctcgctggctcgctggccgacggagccgccgctcctctccgccgccgcgctggccacggggccgccggccgccgcgcctccctgcgcgtgcacccgcgaggccgccacgccgcgcctccatgcgctgccgcagcgcctccctgcccgcgccccgactccgccgggcgctgttccgcggcagctggccccaccgccactcctccat

SEQ ID NO: 5694 - DNA, 320 bp, Oryza sativa
  Clone ID: PAT_MRT4530_12456C.1
atgggcccacaagtcaggtgtaaccgtcctgaaaactgcgtcaactacaataacagtcataaggacccacctgtcaatgacccagagaagtgtggaggcatgctgggccagcctaggttcggccgaaccaggggttcggttgaatcttggctgctgcggctccggctggccttacacgtggacgtctaggatggcttgctgatggtggttgccgggtagaatggtcatttcgccttttctacaaccttcataccgaccttataaatggaggagctcattttacttcacacacactcaagcaatctcaagattcctctcta

SEQ ID NO: 5695 - DNA, 204 bp, Oryza sativa
  Clone ID: PAT_MRT4530_12457C.1
gaattattggcggcgtccccagcatatacgtggtttgaccactgaataaataaaagccccagaaacacagatcgtgtggttggctctctggtgcaagtgtagcatattggcgtggtgtgtcgtcttgagttatctggtttctttgtgtttatgtgccacatgcacccacgagtggtgggacacaactacacaaatggttgaatg

SEQ ID NO: 5696 - DNA, 602 bp, Oryza sativa
  Clone ID: PAT_MRT4530_12458C.1
atgtgggccccacatgtcatctcgtgcgccggtgcccggtgggacaagccgacggaggcggaaggccgacgaaggccatcgctgagttcgagcgtggtggaggccggcgacgggtctgggtggcggaagcaggattgcggatggcgggaggcggcagagggagctcgtccacccagtgagggcgtcgtgctggtagaggtgaggatagggtccatccccccggctgcgccgccgccgtgctgcagtcaaatgctgcttcccagggcgtcggcgagctagcctttgattttgcttcgacgtacagctagccgtggatggcggagggagctaacgacggcgacggcgacagctgtccgcgtgcggggaggagctcacaggccatccgcgcacggggaggagctcgccggccgtccatgcgcggggaggagctcgcatgccgtcctcgcgcgggggaggagctggagctcgccggtggtcaggagcagcggcgggaggatctggagctcgccggtggtcgggagcggcggcggtcggcgccggcgtccggtggccatgggcaacgacgaccacgacgccaccaggccgggggagagaaagggaga

SEQ ID NO: 5697 - DNA, 1789 bp, Oryza sativa
  Clone ID: PAT_MRT4530_12459C.1
gagcagccgcagcagcagcaggaggaggaggaggccatgaagcttgacgtgaacgcgctccgctacctctccaaggatgacttccgcgtcctcaccgccgtcgagatgggcatgcgtaaccacgagatcgttcctgccgagctcgtcgaccgcatcgccggattgaagcacggaggcacatataaagtgctgcggaatttgttgaagaacaaattggtgcatcatgatgctactaaatatgatggttatcggctcacatatcttgggtatgatttcctcgccatcaaaaccttggttaatcgtggagtatttgcttcagttggtcggcaaattggtgttggaaaggagtcagacatctttgaggttgccacagaggatggtaccgttttggccatgaagcttcataggttgggtaggacatcttttagggctgtgaaatccaagcgtgactatttggcacaccggaggagctttaattggttatacctgtcacgactagcggccctaaaggaatttgcttttatgaaggctttaggagaccatggatttccagttcccactgctgttgactgcaaccggcattgtgtgatcatgtcacttgtgcagggatatccactcgttcaagtaaaagagttacaaaatccagacgatgtttttgacacaattcttggccttgttgttcgtttggcggagcatgggctgatacattgtgattttaacgagttcaatatcatgattgatgatgatgagaaagttacaatgattgacttcccgcagatggtatctgttaaacatcggaatgcccagatgttttttgatcgagatattgaatgcatctacaaattctttaggaagaggtttcatctttcctcagagaaatgtgaagaacaggatgggtcagacattgatgatgatgagaatagcaggccatcctttctgtctatacaaaaggctgctggttcattggacaaggagctagctgccagtggtttcacccgaaaagagcaagttgagatggacaagtacattgaccaaaatgctgaagaagagagctcagatgatgattcaacatcagaacaagataatgaggatggtgatgatgtggctgttaaaatcggttccttaaaaatagcagagcaggattctgctgaggtgcctgattgcactcttgcttcaaaagattcaaatgaacctgaaacttttgccaaagagaacgaaacgagcacaagttgcagtggtgagaacaactcaataaatccctcgcgttctagcaatggggacgctaaggagccaactgaatcacaagacaacgatgatagtgacgatgactcatcagatgatcctgatggcgaggatgatgatgctttggcaaagcaactgaacaagcaaaggaagagggcaattgctgccgcgcatgggcggagaaggcctatctcctcaaggaatgcatacaagtacaagggaaagggcaccatgaattccaaaatcgagaggcaggcatgcaaatggtgattgttgtacgagtcatttatagcaggaatacttgagataagtcgagcttacgttttgtacggctgtaagaactgatgactgttatatggaacgagcattatgtgtgttcttcacagttttggtcgtaagagtgatgcttcgtccattattagcctgtcgaatagttaacagttaaagcgccatttactctatatgcatcatctgatgagtgttgttgcttgctgctggacagcctgaattgaagcaaagttcagtttttttgtgccagaaaaaaaaa

SEQ ID NO: 5698 - DNA, 245 bp, Oryza sativa
  unsure (1)..(245): unsure at all n locations
  Clone ID: PAT_MRT4530_1245C.1
cccactgtaaaccttgttatgttcacggtagacccagatccacggatggtgatgggtgtggagaagggctattatncatgttgattaactatgttaacccggtgcttcttaataaanngcttgtcngcttgtgtatattgtgttagatncccaatatgtccatggtgtttttcatagctgttggtgaaccttctttgtgctgtggagatgtgaaatatggctgctgcttttgatgaaaaaaaaaa

SEQ ID NO: 5699 - DNA, 2203 bp, Oryza sativa
  Clone ID: PAT_MRT4530_12460C.1
accatgaatacatggatggacacgttcatgtattgacaattttgagatgaagcagtatcacacaacatgcagatctgagacttgctatatggccttgcagaagtagaactacaatataagctcagatttgtatttcattcttgagcttttatgtcatatatatatatcagtgaaaagttgtgttcatcgaaaggaaagaaaactaaaatcaactagctgcaatttcgacggggggacaaatgcttcagaatgagggtggaagtaggttgcgatcgaacacccagctctccttattccggctacctagaactttgccggcgagaggacggcatttatatacaatggactgagcacaacctttatatatacaagttatcaaggtgatatgatttcgtcacgcatgagataggatctatgaagtcttttccatggttcagggggccgaggtcctcaggggggtgaggtcagccttgataaaccggaaatattccttctgcagcatctgcccgccattaacctggtcatatttgcatctgtagaagttgtagttcagctcttgcaggattttaccgcccgtacttcagagtggtattcaaacactccactacaagctctctgttgccaacaccagaccattccctggctctgtggatcaagcgcgttggggcccccgcctacaaaagctacgatgtagcaacggaacaacatgtcaaacctccccaatcccctgctcttcccctcggccgtgcaagtctcatgtaatgggacgcaatgaaaggtcctgcagccattgttgattcgagcagctatgaatctaaaggcgcaattccaagaatcagacaacagactggtataccgtgcaccgctgctccatgccaaagtagtccctcccgaactttacattcggcatatgcgagcggactcaaaactcgccaatacgcttgctgtggtgacaacccgcgatgataaccctggtgagagcatattgtgcgttgaaggcacctattaaacgagtgaagatgttgcaacggaacagcactaatgcaatcccagatccacgactcttcggaagaatccttttcgtctcggtaaaagggtaacaagtagaggtcccaaaggaagtgagggttccaggagcgaagcaaccaaaatactgattccaagaaacagacgacagcctgatatcctggtgatcgctgctaccagcttcagccggttcactagttgcgtatgaaccgtaatggaagtctttatgagataacgctctcaatgctgtcaaaaatgattgaaccttttccacaactgatgtcaacttgaaagtaaggtataatccagtggttagagacgaaaataggcttccatactccttgttcaggaaaaatcggtaccatacaggagcaggcaataatgctcggtacagaagtagaaaatattccacaactgttaacatttggccctgcctacgatagctacgccctttgctgttcttgtagtacataagtaacatgcacttgatgatcatagcagtttggcgcaccattgtatcattcttgtaacaccagtaaactccaaatacatgaacaacgaataatattgtgatcccaacaaggactgacatttttctctcccccttcaaagcagtttgcttgcgcaggatatcattagacttgaacatcacggcggcaatccaaatcgtcacgaagaaaccttgcaagtgctgcctgatgaagacgacgagcagcagaagggagaaggggagtatctgctccacccacctcgccacctgctgtatgtcgtacctctggtacgacgacgaggactccctccccgcctccccgccgccggccgtcgccgccgccgcagccgatgtggatgggttcgcctgcggggcggcccccgcctcgtcctccacgaccccttcctcccccctctcggacgccgccccggcggcctccccggacccgacaatccggatcgacacctcaccacccccacccccacccccacccccaacctgatgcggcccgccgccggggtccgcgcggaggatcccggagtactcgagcagcgcggagagcggcgcctggatgaagctcgacgccgagaagtgcacgccgtacctcctccccgccgccgccgcggccgcgggcggcggctgctgctgcggcgccgcctgctgctgctgctgaacctgcgcgtccat

SEQ ID NO: 5700 - DNA, 224 bp, Oryza sativa
  Clone ID: PAT_MRT4530_12461C.1
tgactcgcgcgactccgcttgctgttgtggccgacgatatttccgacgaaacgttcattgagttacaaggatcccacctcccaggaataataatacacaatatacagaagagcatgtgtacacatgcagtgagctgctacactatagactggcactctactagacgatatttctgcacatcagacgtcatctagtcagacttggtctcttggctcggctcgctc

SEQ ID NO: 5701 - DNA, 969 bp, Oryza sativa
  Clone ID: PAT_MRT4530_12462C.1
atgcggtgtggccataccagggcggtttcgagtgcctcgttgtcgatttccgattggccgaggcggtttcggggcggcgtggagggatcccggccgtcggatcaggagagaggtcgttaccgcggccctggcccggtggggcccacgggccacgcggcgcgcgcgaacccgtgcacccgcgggctcgcgctcgggattggtcggtgggtcggatggggcccgcttgtctgtgactgcgggtggcggcgcggcgaggcggcaaccggcggcggaagctggaccgtgctaccgcggaggggtggcgcccgccactccgccaagctcaggcgaggagtgagaggatattggaggagccgacgagaagagtggcaactaggagtcgagaccaacaaggcgcgcgacaggtcattgggcaccagccgcaccaactttgcgagagagaggcaacacgacgagttggtggaggctagagatgccttcaattggtggagtcgacatgcctacgtgcagcctcaagagctcgtcacggcggtggggagggagcccgtcacggcggccggatatgatgcccacggcgcctcccgctgtctgcgctgtcgaagaaaaggaaggcaagacggggacggagttggatccggcccccgccaccgccaaactggatccagccgctgcctcctccgccacctccatgcccacatgcttcacaggctccaggcccaccgccgttgtcccctcaagcgcgccgctgcccccatgcatgagctcaccgtggacgaaccgcagccgccacccaccggtcgtctcccctccgcccagatctgggcctcctatcgcagcgcgcgggggagggggagggggaggggggaggcccggcttttgcgcgcgtcgatttcacagtcgccgcagtcgcggtccgctatcgccgtcatcttatccgccgtgtcagctgagagccgagaggtggggtga

SEQ ID NO: 5702 - DNA, 1275 bp, Oryza sativa
  Clone ID: PAT_MRT4530_12463C.1
atggaaccgtgtgtgagaagcgagagcggcggcgtcaagaagccgatgacctcgccgccgatcgacgccgtcggcgtggacctcctccggaagatactccttcgcctccccaacatggcgtcactcgtcaatgccgccctctcctgcaagcgctggcggcgcgcggcctccgaccccgccattctccagcgcttcctcccgctccgccgtcctccgctcgtcggtttcatcctcaccgaccgcggcgacaagcccgtcccccgccactgccccaacatctacttcgtccgcaccaccgcccgtaagcccaatctggcatccgccgccgccgattgcgatatcttcttcgaagacctccccgatatcgattcggacgaggacgacgacgacggccgcggtttctactccgacgagtggcgcctccgcggctgcgacggcggccgccttctcctctcccgcggccgctacgggctcgacctcgccgtctacgatcccatctcgcggactgccatcttcttccgcccgccccaagccttccgctgctcgttccacatggtcaggtacgccattgtcgtcgacgacgccgacgcctcgttccgggtcatcggcatctgtgacgacacatccgccgccatgttctcctcccgcaccaacaaatggaccctgttcgacttcgacgcggaggcggatttgtgttaccgcttcaccgaccgcgacggcatgtccgccggccggttcgtgtactggcggtcgaacaccaagaacaacaagaacgtggagaggatcttgctgctcgatgtgggcaccatgaattggacagtcatcgtggcgccgtttcaggtaggggagtcgtactgcgtcgctgacatggcggagcacggtgggctctgcctcgtgtccagccaggagcaaaaccttcagctctgggtccgcagcagcggcagcggcaccatcaatggtggatggctgcttaagaaggagatctcattgttgcatcagtttgggtacttgaagaagctgcggagtgaggagtggatgaagagggtgcgtgtgctggcagcaaaggctggctatgtctacatggagttctggtccatcaggaaatctaattcctatcttctcgtcctcaatctcagcaccatgaagctggagatgtttcgcaacggttcggatgaacctttcaggggtcctgcatttccattcttgttgcgtttggcacctctgacgacacctagctgggatgatgcaaatgatcttcaggttccatctggatga

SEQ ID NO: 5703 - DNA, 1711 bp, Oryza sativa
  Clone ID: PAT_MRT4530_12464C.1
ggtactggttgagctcccatcgacgtatagtcgtcccgtgctgatcaaactccgatgtgtgcgccgagaataaccagcttcttgttgctttaacaaatcgtgggcatcgcagtcgacgacgcaagtcagtgctagctcggtgatgacgtctatggagatcgacaacacggtcagagctccattgcaatgcagtcctcgaacggagatgccaccgtcggctccggcgcctccatgatcctcatcattgaatttgaatcccatgcaaccaaaagacactgcagctgcgatgaggtcattgtcgtgctgcgcagtcatctcgatttcgcgctccgttgtcgagctgcctgaactcgtgggtagtatggacagcgacgccctcgaccgtcgctccacttgaagtgccatccgaacagtgccggtcaccacccaacggttgatcagagctccattgcaatgctgtcctcgaacggaaatgccgccggctccgacatcgccatgatcctcctcgttgaatttgactcccatgcaaccgaaagacactgcagctgcggtgaggtctatggtgcccatgatagctatagcttccctgtcggagatgttggagaggctagctacaccaagtcgctctcgctgctctatatagtgtacttcttttgcttttgtgaaaaagttggatactttcaaggacatatccaaccggggagggggctcaagccccctactattatcgcattgtgcagtcatctcaattccgtgctccattgtcgagctgactgaactcgtgggcgggatggatggcggcgccctcaaccgtcgctccacttgaagtgtcattcgaacaacgccggtcaccgcccaacggttctgacgaatcgcgacgtaataggcccagatcgcaagataagcagagatggtacccccattatcttgttcggctggcggcggcagaggcgaacacgctggcgctagcgacaacggtgctttatgtgcaggctctgctgcggctgcaccggacgtagcaatagtagtgcaattaggaagcggaacatcgcattcctatggagatcgacaacacggtcagagctccattgcaatgctgtcctcgaacggagatgccgccgccggctctggcgccgccatgatcctcctcgttgaatttgactcccatgcaaccgaaagacacattgtcgcgttgcgcagtcatctcgatttcgcgctccgtcgtcgagctgcctgaactcgtgggcgggatggacggcggcaccctcaaccgtcgctccacttgaagtgccatccgaatagcgtcggtcaccgcccgacagctcccattatcttgttcgactggcggtggcagaggcggacaccctggcgctagcgacgatggtgctggatgcgcttgctggcaattttggtgagttgacatgcaataagaaaataacaaattgagctcaacacttaaactatcttcatcaatccaactacgtttttttagccgcacgatatgtgcgccaagatttgtgtaagaattggtgggggaggctgcatcttcgttgcggaggcggaggtcggttctcgagtcaagatcatcgtactgctgctcgcctgctcgccgtccttggggatgtagctgcaaatggtgtagtggccgataccgacaacggcggcgagccgcacggcctcccgttacggtgcaggcggtggcggccgtcat

SEQ ID NO: 5704 - DNA, 1341 bp, Oryza sativa
  Clone ID: PAT_MRT4530_12465C.1
atgggaaacggtggtggtgggaacaagaaggggaggagagactcgccgtcgccgccgctcgagacccccccgcgcggcgagttgccgtcgacgtcgtcgtcctcctcctcgcgcgccaccaagcgtcaccgcgtggcgggcatggcggaccgctacttccccaacgacctcccggacttcgtcgccgaggcccccgacggcggccgcggcttgctgtcgctcccttactccagcctctccgaaaggctcctccgcgccgcgctccggatcaaggacaaggtcatggaggagacgtggaccagggcgcggcgacaggtgacggactacacgctctacacgggcgcgctcggcacggcgctcctgctgttcaagtccttccaggtcaccggcaaccgcgccgacctcgccctcgccggcgacatcgtcaaggagtgcgacgccgcgtcgcgtggcctgccgttcttgacattcatctgtgggagggctggggtttgcgctcttggtgcagtgattgcaaaacattgcaatgaccagctgctactcacacactacctgagctcatttgatgagataatagtcactgagaaagttcccaatgagttgttatatggaagagcagggtatttgtgggcttgcttgttcttgaatacgcatctcggcgagaagacaattccccatgagcacattacttctgtggcaaaggacatcatcgatgagggaagaaagctggctaaaaaggggaactgccccctgatgtatgaatggcatggaaagaagtactggggtgctgctcatgggcttgctggcattatgcatgtcctcatgcacactgaactcaagctagatgagaaggatgatgttaagaacactctgctatacatgatcaggaacaggtatcctactggcaactatccatcgagtgaaggcagtgaatctgaccgcttggtgcattggtgccatggtgcccctggtgttgctcttacactcgctaaagcttatcaggtcttccatgatgaacatttcaagcagacggctgcagaggctgcagaagttgtctggaaccggggacttctcaagagagttggaatatgccatggtgtaagtgggaacgcctatgtatttctctcactctaccggctaactggcaatgttgagtacctgtaccgggctaaggcttttgcttgctttctgcttgagaaagctgatcagttgattgctgatggggccatgcatgggggtgatcacccattttcattgtttgaagggagggctgggatggcttacctccttctagacatggttagcccatcagaatcaaagttcccggcctatgagctttga

SEQ ID NO: 5705 - DNA, 202 bp, Oryza sativa
  unsure (1)..(202): unsure at all n locations
  Clone ID: PAT_MRT4530_12466C.1
ctcggtgcctaccaggccgccatcancaacagcgacgtcccgggcntcgacgccgacgccgccgnngngcgcgangccatcgtcttcngctnctacgtcgngntcggctnctaccagttngtgatcancgagatcgnctcgnccgcggcgacgtngctgcacngccgtgaanctgctngcgctgtacctctnccggagacac

SEQ ID NO: 5706 - DNA, 1455 bp, Oryza sativa
  Clone ID: PAT_MRT4530_12467C.1
atgggaaacggtggtggtgggaacaagaaggggaggagagactcgccgtcgccgccgctcgagacccccccgcgcggcgagttgccgtcgacgtcgtcgtcctcctcctcgcgcgccaccaagcgtcaccgcgtggcgggcatggcggaccgctacttccccaacgacctcccggacttcgtcgccgaggcccccgacggcggccgcggcttgctgtcgctcccttactccagcctctccgaaaggctcctccgcgccgcgctccggatcaaggacaaggttaggcatgcgtgtgcctcggtttgggtttgggtttgggtttgggtggcgcgcgcgcgcacgcacgcaaggtgttcggctgatttcccccgaccgctccctgccccccccgcaggtcatggaggagacgtggacagggcgcggcgacaggtgacggactacacgctctacacgggcgcgctcggcacggcgctcctgctgttcaagtccttccaggtcaccggcaaccgcgccgacctcgccctcgccggcgacatcgtcaaggagtgcgacgccgcgtcgcgtggcctgccgttcttgacattcatctgtgggagggctggggtttgcgctcttggtgcagtgattgcaaaacattgcaatgaccagctgctactcacacactacctgagctcatttgatgagataatagtcactgagaaagttcccaatgagttgttatatggaagagcagggtatttgtgggcttgcttgttcttgaatacgcatctcggcgagaagacaattccccatgagcacattacttctgtggcaaaggacatcatcgatgagggaagaaagctggctaaaaaggggaactgccccctgatgtatgaatggcatggaaagaagtactggggtgctgctcatgggcttgctggcattatgcatgtcctcatgcacactgaactcaagctagatgagaaggatgatgttaagaacactctgctatacatgatcaggaacaggtatcctactggcaactatccatcgagtgaaggcagtgaatctgaccgcttggtgcattggtgccatggtgcccctggtgttgctcttacactcgctaaagcttatcaggtcttccatgatgaacatttcaagcagacggctgcagaggctgcagaagttgtctggaaccggggacttctcaagagagttggaatatgccatggtgtaagtgggaacgcctatgtatttctctcactctaccggctaactggcaatgttgagtacctgtaccgggctaaggcttttgcttgctttctgcttgagaaagctgatcagttgattgctgatggggccatgcatgggggtgatcacccattttcattgtttgaagggagggctgggatggcttacctccttctagacatggttagcccatcagaatcaaagttcccggcctatgagctttga

SEQ ID NO: 5707 - DNA, 642 bp, Oryza sativa
  Clone ID: PAT_MRT4530_12468C.1
acgattatatagggaattggcctcgagctagaatcggcacgaggggcacactaaattaactagggaaaaataatcgaactcctgagaacaacgaggaaaggagaaaaaggagaaagagtaagttactaagcgccaagaagatctcctagggattgggcaacaccgcaacccaaagcttctcttattgcacgatgcgatcaaccatcatctccgtcgtggaaataatcccctcgaagacatgagcattttttctagccacaggtgccaaggaggacgagggagttgaacccctttcttgtgtgatcctacagttgctagcaagaagactcccaccaaactggaagcagagcctgttgacagggtgatagcctcttgacagggtgatagggaggctaacctggcccggttgaacagcaacttgtgctaaacttgtggtgcgaagacacactgcaccaagatatggtcacctagatatctattgattatctctatacaaacaaatcattagggttgattattccgatcatcagacgggctagaacaattagcaaaagataggatatgtgcattcttctggtgcatatatatgctttcgggcctgtaagatcactagcacttctatataccatgtgcatttaaagt

SEQ ID NO: 5708 - DNA, 143 bp, Oryza sativa
  Clone ID: PAT_MRT4530_12469C.1
caacctcgccgaggcggagacgacggcgatattgtctcgttctctcgccttggcggcgtcgccggatttcgtctcgcacggattcgtcgcgcgcgtccccgtcgcctgattcctttcgccgtcctcctcgcttgattcatctc

SEQ ID NO: 5709 - DNA, 411 bp, Oryza sativa
  Clone ID: PAT_MRT4530_1246C.1
atggatatatacttatctgatttgcttgctgatacccaagtacgtacacgtacaatgcaggccggcggccgtgagctgtccgtcgtcatccccatcgctagcggcgggcgccaccaccgtccgcctcctcttacaactctttccgctttgcccccgccgccatcctccagccccgcggcttcggcgccgccgccgccgcccgcccgatccgccacccaccgccgggctgccgcctcccacggccatccctctaaagccgaccctatttcgtcggccctctaccggaatttaggtttgccggtgccggagaagaaaaggtggtcgccggagttggagaagaagagcacgaatcgtgaagcacatccagtaatccaaattttgcaagatttaaggtaggattttctatcgaca

SEQ ID NO: 5710 - DNA, 1509 bp, Oryza sativa
  Clone ID: PAT_MRT4530_12470C.1
caacacacaaggtaggttaccagtacagccaactgctactccagggccttgatccaagttaagcagctgttcagcattgaacttttcgacatactggacagtagacttgaatacctcaaagcgataagccttctctgcctcgtctttgtaattacggttgaacttgttcatccactcttggaatctcaccttcagggcctgctcctcgtcttcagacaccttcttggagccctccatcctctcatcactgtcgcttgtcttcagatacttgaaagcttctggttcccctgcagtgtttgtggttgccatagacacttccattgtgttaccaggccttaataatttgagttcacgttcccctgaaggcacccagcagcggagcggatttggttttcgagggaactctgaaaggcggcggcggcgatggaacacggaagacaggacgagtatatggatgagatatgggccttttagcaaagtgggcctttcacagaaaagtgacgtgtatatctttggagttacagtattctcttggaacttctgacagggagaaacccagtggaccatacaatgcctgacctgatgtggttcttcacaaggtgaaggatgctgcagacaggctacattggcacagcgaaatcgttgataatgcttctcatcgtggacaattctcttccattcccagatcacccaatcgttggacgatgtgattgggtgatgttcttgcttgtcctttcgtcctctcaaaattccaatttttccccctttgcttcgtgcaaaggacatcataacaacacatctcctagtgcgtttagagatggtaaggtctatgggttttttcacaaaccccatgtagccttcatatatttttaggtaaaaaatgtgtaaagattcaacccaacgttgttctagctgagctgttaggttgtgttttgaataaccaagtgaagcagcgccgccgccgccgacgacgacgacgacgacgacgaaaccgccggaggcagagaggagcagaggtacgcacacggtttcaggttcccccccctccctccctcccatgaaatccaacaccgttttcgagcttgatcgtctccgatttcgtttctgggcggcggcggagtactagtggagacgacgcggtttgtgtgggggatgggattcgtcggctcggcgctgcgcatttttagccgagagagcaatttcatttttagacgatctggaattctctccttctgaatagcatcagcatcatagacgcccattgtggcagtacatatcctgaattcctgacgctgtatgtctctgctgacaatgtcttaataaggagcgaacggagaggattgcccactgaaatttattaagaatggggaacaatttaggctggaacattttacaaccggtctaaggacattgtctctgctgacaatctgatatatttcttggtaaaatttatgtgctgtacagactacaaggggtaaagtagtgagaagagatggtaaggtggcgccg

SEQ ID NO: 5711 - DNA, 877 bp, Oryza sativa
  Clone ID: PAT_MRT4530_12471C.1
agtgctaaaagtggaagccgatgacagaaaaactaaatttgccatctccacagaaagtagttcttctatatacaggttgctggataacttcagagttctgagtaatcactcagcacgtcctcttccggcagattacatgcgaagcgaactaaagtagacatacaaagcagaacacaaggcaaaaacaaaaaaaaaagccggacagagcacacatgctgctgcacagttacaagcactggagtgagtggcagctacgacttgacgatgagaactggacagttggcgttcctgacgcagtaatcactgacacttccaagcagagccctcttgaacaggccatagccatggctccccatcaccagcacgtcggcgccgagcttgtccgccatctggcagatgacgttcctggcgtcgccgaccgccaccttcacctccaccttcatctcatggccagcctcaccgtcgccaccgacctccttgccgtagagcgtgcagagcttctgcgccttctccaccaccgcctccgccacctccttgctgtacccgtcaatggcggcggccacctcgtcggagaacacgtagcctaccatagcggaggcgtcgagcacggagtaggtgggcggcggcggccggacgtagagcaggatgatggtgtccggcggcgccgcgcccccgccgccgccgcgcttggcgaagctggcgaggcaccacttgagcgcgtggacgctctcgtcgccctcgtccacggccaccagtatccgccgccccgtcgccgccgtctcctcctccgtcgcgcggtccatccgtcgcagcgtagcactaaccaactcctctcttctctctcctgtcacaagactgtgcctcaccgctcgccggg

SEQ ID NO: 5712 - DNA, 1142 bp, Oryza sativa
  Clone ID: PAT_MRT4530_12472C.1
atgcgcccccaaaacgaggagaacccgacgcgccgccgaggcttccgcgtcgcgcaaatcaatggcgcgtcgccgcgtcgctcgccggcaacgagcgaggcaggtctcatccccggccgaccagactcgtcgccttcctcaccgaacccgcaaccgccaccgccaccgccaccgcccgtccacatccgccggcgccgatggcctcctccgccctcgccgtctccgtcgccaagccagccgcgtctcctcccgtcgccgtcgccgcggtaaccccgcagcgtcgcctcctcccgcagtgccggggcgtccgcgctgccccggtcgtccggctccgctcgggacgcgcccgcggcgtgtcggtggtgtgcgccgcccagggccaggagacctccttccaagttcctgacgtgactaagtcaacatggcagtcacttgtggtggagagtgaacttccggttctcgttgagttctgggcttcgtggtgcgggccatgcaaaatgatagatcctgtcattggcaaactttcaaaagaatatgaagggaagctgaactgctacaagctcaacactgatgaaaaccccgacatagcaacccagtttgggataagaagcattcccacaatgatgatattcaagaacggtgagaagaaagatgcggtgattggagctgtgcccgagagcaccctggtcagcagcatcgacaaatacatcgggaggtaaaatgtcaggttgaatattttctaggcagttgggcttcaaccttcacgcccagatggatatattgtcatctatgaactccatttcttttcgagaataggcaggagaatcgtaaattgatggaaccccggtttggtagttgtatgtacataataatgtgataaccgctaataaatgcaattcaaggctgagccctgcgtggccttctggatcgaaggtatggaaggttgcttcgagttgcttgtttcattctttcgcgtgggggccagtactactaaatgccgatatgataaccatattcggccgaattgtcattatcagattttaacggatgaaatgtttgccgggagtgtgggcatgaatgcttgatcaacagatcaagcatatgtttgatctacaagggcaactaggccattcacccattcc

SEQ ID NO: 5713 - DNA, 348 bp, Oryza sativa
  Clone ID: PAT_MRT4530_12473C.1
gtggcccccgccattgacgggtacagcaaggaggtggcggaggcggtggtggagaaggcgcagaagctctgcacgctctacggcaaggaggtcggtggcgacggtgaggctggccataagatgaaggtggaggtgaaggtggcggtcggcgacgccaggaacgtcatctgccagatggcggacaagctcggcgccgacgtgctggtgatggggagccatggctatggcctgttcaagaggtcactgaaacgatctcgttttcaatctcagaagctggctctgcttggaagtgtcagtgattactgcgtcaggaacgccaactgtccagttctcatcgtcaagtcgtag

SEQ ID NO: 5714 - DNA, 1437 bp, Oryza sativa
  Clone ID: PAT_MRT4530_12474C.1
atggagagaggggagatggagagggaggaagaagatgaggaggatgaagggatggcggcgacgcttcactcgaagatcaaccggaagcggcttgacaagctcgacatcatcaaaatctgtgaggagattttgaacccgtcggtacccatggcactaaggctctccggaattctcatggattacgcttgtactaactcctcacacagattgagatcaacgaggcatggcgggtcaagccagtcgcagaccccaccgtacttcccaagggcaaaacccaagccaattactggtgccaagggagcaggtctgagggccgtctggtatgaagcagtaacactgccagagaatatcatggatatggatgtggagcagcccatgcttttctcagaggctgatactacaaggttccggggaatgcgtttggaggatttggatgaccaatacattaatgtcaacctagacgatgatgacttctcgcgcgctgagaatcatcaccaagaaaatatcaccctggctgataatttcgggtctgggcttggagagactgatgtgttcaatcgttttgagagattcgacataacagatgatgatgcaactttcaatgtcactcctgatggacacccacaggttccaagtaatctggttccttctccacctaggcaggaagactctcctcagcaacaagaaaaccatcatgctgcctcatcccctcttcacgaagaagctcaacaagggggggcatctgtaaaaaatgagcaagagcagcagaagatgaagggtcagcaacctgctaaatcatcaaagagaaaaaaacgtaggaaagatgatgaggtgatgatggataacgaccagataatgatcccaggaaatgtatatcaaacatggctgaaggatccatcaagcctcattaccaaaaggcacagaatcaacagtaaagttaatcttattcggtcaatcaagataagagacctcatggacttgcccctcgtttctctaatatcttccttggagaagtcacccttagaattttattatcctaaggaacttatgcagctttggaaggaatgtactgaagtcaagtccccaaaagctccatcttcaggttactacacaatttgtagttttctttcacctttctggatcaccaagggaactcctcaggttgataatgacagggaaatgggatttcacccagtggactttgcagatgacatcgaaaaactccgaggaaacactagtggggaatatggaagagattatgatgcttttcacagtgatcatagtgttactcctggaagtcctgggctaagtcgcaggtctgcttcaagctctggtggctctggacggggatttacgcagttggatccagaagtacagttgccatccggaagtaaccgcgatattcgcgcggttactgccaattgtgtagcagaatag

SEQ ID NO: 5715 - DNA, 501 bp, Oryza sativa
  Clone ID: PAT_MRT4530_12475C.1
ggagtagtggtgtataggctcgtgatgaaagcttggtgttataaaatggtacttcctccatttcacaatgtaactttctagtattgcccacattcatatatatgctaatgaatatatatatatatatatatagtaatatctagatttattagcatctatatgaatgttagcagtgctagaaagtcttacattgtgaaacagagggagtattctttcctcatctgctcctccattgtgacgaacccgactaacccttctctgcttccctcctctgctactctactcctctgctgcttccttccgattctctaatttgtccttactcttgatgttgttcatcgattttgattgttgtagcttgaggttttgaggatgatgaaaggtatagtgcttcttccatgtcagtagggatagcacattgtgttgtctatgattttgtttttagtctgatctaatgtaattagagaacgcattttaggattttcaattcaaaaccagcaa

SEQ ID NO: 5716 - DNA, 473 bp, Oryza sativa
  Clone ID: PAT_MRT4530_12476C.1
aaagcaacccggtggtgtgtgcaaactggagaaacatggccaagtgcatggcaagcagcaagtggctggccaaacaagctgcaaggatggatcagcagcaaacaagtgcgtgcactggccaaggccaatgtgagcaagtggtgtgcaggcagatgtggtgcaaagcaagctgacaagctgacaaacagtttgctgggcgtgctacttgcgatcaggctgcaagctcaagcccaagctatggttgggccctgaaactgtgccgtgcaatgatgcggtatgctgacccaagctgacaacactggctccctggtagcattcctgaccgtcggtgggtatctgggtatgggaattgtaccagtatagtagtacaggagagaaaataaagtcagcatcatcgtgtgtgacaagtggaaacatcgggtgatacaaatcggaataaaaaggtcagccaaaattgaaaaaaaaaaaaaaaa

SEQ ID NO: 5717 - DNA, 2076 bp, Oryza sativa
  Clone ID: PAT_MRT4530_12477C.1
atggcggagcccggggaggatgcggcagcggcagcggcggcggcgtcgaccaagtacgtgctcatcaccggcggcgtcgtcagcgggctcgggaagggggtcacggccagcagcgtcggcgtcgtcctcaaggcctgcggcctccgcgtcacctgcatcaagatcgatccatatttaaacacagatgctggtacaatgtctccttttgagcatggtgaggtctttgtgcttgacgatggtggagaggttgacttggatttagggaattatgagcgtttcttggatgttactctgacaagggataacaacattacaactggaaagatatatcagtctgtcattgagaaggagaggaagggtgactatcttggaaagacggtccaggttgttcctcatgtaactgatgaaattaaacagtggatacagtcagtatcttctgttcctgtggatgggcagactcgtccagctgatgtttgtgtcattgaattgggaggcactgtaggtgatattgaatcaatgccattcattgaagctctgcgccagttgtcattttctcttggtaaggacaatttctgcctcatacatgtgagccttgttccggtattgggtgtagttggtgagcagaaaactaagccaacacaacacagtgtacgagaactaagggccttgggtctgactcctgatcttctagcatgccgatccgcacagccactaataggatctgtcaaggagaaactttcacaattttgtcatgtaccggttgagaatatacttaacatccatgatgttccaaacttgtggcatgttccacttattcttagaaaccaaaaggttcacgaggctataatcaaacaacttaaccttggaaggtctgctggaccccctgagttacgagattggacacagatggctgagtcatatgatgacctcaaaaactctgttaaaatcgctttggttgggaaatatactaatctgaccgattcctacttatcagtggtgaaggctcttctacatgcgagtgttgcatgttcattgaaaccttctatccagtggattgcagcttcagatcttgaagatgcaactgcaacaagtgcaccagatgcccatgctaaagcttgggaaactcttaagggttcctcttgcattttgataccaggaggattcggggatcgtggaatatctgggatgatattggctgcaaaatatgctcgtgagaataaagttccataccttggcatttgcttgggaatgcagatatcagtgattgagatgtccagaaatgttcttggcctaaaggatgcagacagtgaagagttcaactcagaaacaccatttcgtgtggttatgtacatgcctgaggtttcaaaaacgcacatgggaaatacaatgaggttgggttgccgaagaacgttctttcgcaggacagattgtcttacatcaaaactatatgggagccctgagcatgtagatgagcgtcatcgtcacagatatgaggtgaacccttctttcgttgctatgcttgaaaacgctggccttcattttgttggttgcgatgaaagtggaaagaggatggagcctgagcccgcttccacctatgaacaggttgtagagctacaagaccacccattttacataggtgttcaattccatccagaatttaagtcaaggcctcggagaccttcacctccatttactggtctaatattggcagcagctgaatacatgggaacacctgcaaataactcaaatggacatgttggaacatctgagtaatgccatccttaatctatcagatggtggtcattgatccctttttggtgttttgttgtggcatctgcttgttgctgctgagatgaggattctagtcattttggtcacatacataatcatgtaccggagataacacttaaagctggaagagaatttttgttatcccagagacctgtaattgcatagctgatcatggattcatgatacagtgtgcaacggattttagcgtggtaattttgttgggtgctctcagttttaacttctgatagtaattgtatcctgttaaacccgtgctccgttcaagtt

SEQ ID NO: 5718 - DNA, 381 bp, Oryza sativa
  unsure (1)..(381): unsure at all n locations
  Clone ID: PAT_MRT4530_12478C.1
tcgggtgcggattcggctcgagtnattctagagctaatacgtgcaaaaacccnacttccnggangggcgcatttattagataaaagctgacgcgggctccgcccgctgatccgatgattcatgataactcganngatcncacggcccccnctgccggcgacncatcattcaaatttctgccctatctncnntgttccnanaaacttgatatcnaattccgcnnaanctcctcncnagggggggcccaggtnccacctccncctnctctnagtccntcnanttcagtggccggnatttgtnaacctctttacngggtaaaaccngccnttccccaaaaaaagcgccgggaaacanancccccntccgccanctggnntatta

SEQ ID NO: 5719 - DNA, 601 bp, Oryza sativa
  Clone ID: PAT_MRT4530_12479C.1
gggctggaggtgatggtactgcaggggaagagaaatcctggaacagatgaaaagtcagggtcgtatcgtttctacagtcagtaagacaagcgaaagagatgaaaattgataggtaggtttgttttgcaagttggcacattgtcatgaaaatggaaagcccaaaaagttctacttgtgatccaattgctcctttggatttgcctcattcgctgcacgcgtttcaccgtgtgccaaacaatccacaagataaggaatattcttgcacgtttcgtgggggattctggaattacttcagtatgggaatggatgctcaggtgtcatatgcctttcgctcggggaggaaattgcatccagaaaaattcaaaaaccagttgtctaatcagaaaacatattggagagctggcatgcacgcaaggatggttctgtgcatccctatgtcatccaatgtcacggtacattgcactcccgtcactaggttagtctttgcagcattctggaaaatcggctccattcgttctgccacagcggctcccgtccttcgtgtctctgtaggtcccctgcttctccggtggcctgaatccatggggaacaccaagtgaga

SEQ ID NO: 5720 - DNA, 471 bp, Oryza sativa
  Clone ID: PAT_MRT4530_1247C.1
atggctgggtgggctgatgaggattatgccgagattatggtggcctactgggctgacgatgggtcttgccggcgagcgcgcagagatcatccagccaggcaccggcgcaccaccttgaaggagaaaagtggcgaggacactccagtggcctttctggtaacgagaagggtcgtcggcagtgaggtgccccttggacctagcggtaccctcgttggcctaagcagggaagaagggcattctgatgggtggagctatgagggctctccggcccaattggctggggtgctagattgtactgaattcgaggcccaaaggctctggcgcgggtaccgcaactgcatgggaggaggccgaacacgactcccatcgtttgtactgatcaggcaaggcgtgtactctctgcggatgacgcacaaggctggcaagtgcgtgagcataccaatgatgcgaaatgtgtggcgcatgcattag

SEQ ID NO: 5721 - DNA, 477 bp, Oryza sativa
  unsure (1)..(477): unsure at all n locations
  Clone ID: PAT_MRT4530_12480C.1
ggacctcttcagggagtttgccatcatcttgtcgacgaacgcggcgccgaactcagaggagggcgttccgatcgtgtgcgtcgtgctccaccgcctctaccgccatgcgcctgacgcgacggccgaggtactggagatgctgctgacgcaagcatccgcttggcaccgagtgcggctgcgcaccttctcctgatgctgcacaacaacccaacggacctggcagcacagttcctcaacacgttcggagccagcgcgaacagagagcagatcatttcggcgtggtgagacaagggcggcgtgcgtgttcatgatgcgtgcgggtccaccgggaagggcttctacatttagatccatctgtggtgggaagacggactcccattcatgtcgagaggggacccagacagagagagaagagacacataccataaaaaaaaaaaaaaaaaaaaaaaaaanaaaaaaaaaaanaaaaaaaaaagg

SEQ ID NO: 5722 - DNA, 431 bp, Oryza sativa
  Clone ID: PAT_MRT4530_12481C.1
caaacaaacaggcaaagacttttccaaatttttttaccggacccccccgggggggggggaccctttttttttccaactttttttattgggggggcccccctcccaaaaaccggaaggcccaggggaaactttgcagggggggggggaggccctaggggggaccccccccaggggggggaaattgggagccaccggggcccgggcctgagcttggggctcgccaacaaagccgggataaaacgggccttggtggaggaaaaactggcccatggggcaaaaagccgggaaaggatattggggggccataaaccctatttggggaaagaattggtggcgaaaaacctgggaagtggtaaattggagcccgggggactggccccaagggagggtaaaggggctggactggggcctcacaaacccattggacgggt

SEQ ID NO: 5723 - DNA, 504 bp, Oryza sativa
  Clone ID: PAT_MRT4530_12482C.1
atgctccgcctgctgctcctcctccttctcgccgccgcttgccagtttacgcccttccgctcagtcgtcacccatccgcgcgcccgccggcgtcggctcccaggtggagggatgcggcggcgggccacatctcgcttgccggctccgcgcagcccggcgccgaggcgggcgtgggagtattcggcgaacgcgagggcaacggcggcagcacaagcgaagaagggaggaaggagtggtgggaagggccgagagacgtggagcaggcggccggcgaccaccacgtcagctccggcaacaggcggcaaggagccgcctcgtcacctcgtgctctccacggcaaggcagtgcagggacaggaaggaggacccgtcgcgcgttggccgaggtggggaccatgtggaagatgggcagacggcctcgaccccggcgagcgcgcaggcgagggagacagggtcggaaaggtcgacggcgaggtggtgggtgagtgggaacgtgaagaagtag

SEQ ID NO: 5724 - DNA, 243 bp, Oryza sativa
  Clone ID: PAT_MRT4530_12483C.1
atgacggcatcgacctcaacaggagagctcaccatcgttgtctcctgctcaccacataccaagctccgccctgacgatatccgcctcaaccagaccaccacccacttctcgacctctagcactggtggaggtggcttcacattcggacgcagctttacattctacaatgtcggtggtgttcgacacggtcatatgcctcttctgctggatgatctggaaagaaaggagcacaagagtctttga

SEQ ID NO: 5725 - DNA, 808 bp, Oryza sativa
  Clone ID: PAT_MRT4530_12484C.1
aaacaaaccgtctctttcttgttgcagagcgccgcgcccaaccggcagaggaagaggaagaagaggtcattccgccacgtcccggacccatcgcctctccccgatgacggcggcgagctcccctcctctcgcaccacccgccaccatcccctcctccacctccgccctgcggcacctcctacccctttccggtctccgcttccggcgattaccagcagctgtgggccgtggctaccgttctcggcccggcttccgctaccgtgcagccgccggcccctctccgccctcctctgagccgccgccacggtctccccacggttggcaagagaggttatcaagattacaggataggatacgcatattctttgcagttctgttctggatggcactgtttttctggggaagtgcttgggatgggaataacaattcaggaggcacaaagcgccaacgattccgtaagaaatcgtgaggatcctttatcaaagttcactggtaatacaaaggtgggtgctgctccttgccaaagtagttctgataccccaaaggaggctggctcgatggtgggtacgtctgcgtgtacccttcattccccagcaacaaaaacctaaaatagatcagagaatatcgatgaaaagaattataatttgttttcccccatttgtaatatttaagcaaatttttagagtgtatttgctgctcactgctagggcagtgataggaagtggagcagattgatatttaaacctatactattatgagaagcattttgttacccttaaaaaaagaaaaaaaaaagaaaaaaaagaaa

SEQ ID NO: 5726 - DNA, 392 bp, Oryza sativa
  Clone ID: PAT_MRT4530_12485C.1
gtcgaaaaaatacaccagatctggactcgactcaatggtagacgccaccccgcaccggccggactggtgtcaccgtagtcgccgacgtctacggcgaccaaaaccctaactcctgaaggctccactgcgcagctagccctctatcctcgacatggccaccaacgctagctacccgagggcgagggaaactgagagcactctgcagaaagagaagcgggagctgtcgtcggcgtccggcccggacctggtggaggggccactgctgaagcgatctcgatacgccgaggaaatggaatgacagatggccaatcatagaccctaactacagaaagatcgaacacaaaaagctgagagatgaacctgacattgagggaaccattatttttgaagct

SEQ ID NO: 5727 - DNA, 268 bp, Oryza sativa
  Clone ID: PAT_MRT4530_12486C.1
gtcggggtacatggtggggctacaacatgccgtgtacgtgtatcaccacggcgctggcgctggtggtgctccacatctgagacgacccctcgagaggcagctccaaaggctcccaaggcagagaataagccagcagataagaagaccgcagccggagaggagaagtatgcagaaaaggcgcccgttgcgaagaaggccaaggcggaaaatcagatgccggagacaaaagcggtctccaaagagggcggggccgacgacaagaagggga

SEQ ID NO: 5728 - DNA, 516 bp, Oryza sativa
  Clone ID: PAT_MRT4530_12487C.1
atggagagcaggtggtgcaagcgcaacggggacctagatcagccggagcctagtggcgccgttgctatataccgcgagggaggaccagattgggatcagatcagagatggtggggccatcgcccagagtgaggccttcaacttcttggaatcaggatgcagccgccactgttgcagcctccgtgagacattgccaccatcagtgcttgggaaagaatcaaagaacaaagaattgtggggactggggagggaccactgcaacctccgggcacaaccgccgccaccaactccggcgcatcctccgggtgtagccgcagccgccgctgatgccgccaccgcctccggccgcaactgccgcctccgggcgccgccgtcgccgccattgggtacagcctcagccgccgcctttaggcaccaccgtcgccaccaccgggcgcagccacagccatcaccgtcgatgcaagccgcaatcgccgccattgcctatttctctatcgaggagaggagggggagatag

SEQ ID NO: 5729 - DNA, 1338 bp, Oryza sativa
  Clone ID: PAT_MRT4530_12488C.1
atggcggacctcgagcaatcttcctccgatgccgccacactgaagaagctgtacaccgaaggagccatccctccaaagcaaaccatggcgagggaggcaggagatcttcctgacgacacggtggcgcagcgagtcagggaggtcctgatcagcgcgctttccacggccgaagaggtgccggcctcgctttgcgataagtcagcggccgagaaggctgccgccatcaatgcttctgcttcgctgaaggagaaggtcgacgacgaagtcaccaaggtctcctccattcccgtcatcgccgggggcagcggcaccaagcggaagccgtgggcgagatcgagcgcttccatcggacacgggcagcctagcctctcctccgaagaggaggacattgaagcagcccgccggagagcggtggtctcctcgcagagcaggagtgaggtggcgacgagcggatctactgccgctatcattcctcgtgtggaggtcgctcccaccatcaccgagtccgcgggacccgctgccgctcctgtggtcgcgccgccgcctgtcgtgaccacttggtctgacgtggtggtggagtgccattgcctcctcgacaacagctcttgggtggtggcggcccagatagatcgggcggaggcccgtccgacggcggcagacgaaagggtagcgcaactggaggcggagctcgaagtcgcccgtgaggaccttcagaagatgatggaactcgtggccggcaacgagatgcagcgccaagtagattcctcttacgagtcatttgttgatctatcgcattcctttgtctcccgtagttatgtagatcccgagaacgtccagcaaggcggagatcctgatgtcgagatggtcgagttgccttccccgagcgatgccgtcaaggacggtggattggatgcgactttctgcccgcctgaggctggcgaagtcggactcccacgtgagaatccggatcttgacagtgtcatcgctgaacgggataggcgtatcgactactggaggatgaagtttgaaatcaccgaactggagcgatcactcgtggttgtgaagaaggaccaagccatggaggccctccgaggtcgcgaggtctgggtgaactcgtatctcaagagctgctgcagtgccatggctgatatctgctgtcagttgaaggttgaccgcccggagcccgaggagagtacgacgggctacttgccttggatgaggggggcgtgtgctcagctcgagggtataggacagcgtatcgacatcagcctgaaggaggagtgtcgtcgtgccagccgctacgctggaggccacgtcctcgctgttggtatttcttaa

SEQ ID NO: 5730 - DNA, 354 bp, Oryza sativa
  Clone ID: PAT_MRT4530_12489C.1
atggaggtaattggagggggttcaattccaaccaatttttgggatggtataaaagctgttaaggataaactcagggtgaatttaggtctttttctttgtgctagtctttgctggggtttgtggttggtagtgtacaaggcaatttctttgatgcataggtggaaggtgctgctgccaaaagaaagagatcgcgaagctttgaacatgctgcttgagaagctgaaggctaagatcgactctcttcatccaatgaacgtgctaccatacaatattagtgtttcagtgttgttgctcttggggttgaggtctcttagtcgtttggatgtctttcttggcagggcttgtacgcattga

SEQ ID NO: 5731 - DNA, 183 bp, Oryza sativa
  Clone ID: PAT_MRT4530_1248C.1
atgcctggcgctgaggttagccgcatcagcgccaaggcggttggtgctgaggtccctgccacgtcgacgtgggggaaaggctgggccgccacgctggcagggctcaatgccgatgcggctggcactgatccatggggcgttgggttaggcctgagctcccactctgagactctaatctcttga

SEQ ID NO: 5732 - DNA, 338 bp, Oryza sativa
  Clone ID: PAT_MRT4530_12490C.1
atgaggaagaaaaaaaatgagaggaagaattagaacgctcgcgtgcgagaggaacctacataacctgctggtcgtcgctgccgtaaaaggctgccgcttgccgaggccgcacacgcccgccgctcgctgctgccgtacgcgcctacgaaagcagcagctggacaccgtcgccgccgacgcacgcgcccgtagcgcccgccggtcacagctgacgtacgcagcagaacatcgctgtcaccgccgctgcacgagcccgtcgcgccagccagtcgccgccgtcgcacgcgctggcttggttgattagggttaatcttgaatcaacggtgcgatggcttggt

SEQ ID NO: 5733 - DNA, 1540 bp, Oryza sativa
  Clone ID: PAT_MRT4530_12491C.1
ctaactcctcctgggcacgaggcgcgggcgcagcggcttcgccatgacggtggtgaactcccgcttctcggcgaactccacctcgtgcccctccacctccttccactcgaactccatcaccatggatcccacgaagtactcgaggtggagcatggcgatgttgagcccggcgcagatcctccgcccgacgccgaacggcatcatcttgatgcccttggtcccgtgcatgtcgacgccggcgccatggccgccgtccaagaacctctccggcatgaactgcattgggttctcccattctctctcgtccctcccgatctcggccaccatgaagttcaccgtggcgcccttggggatgaggtacccgccgacgtccatgtcctccgccgccttgtgcggcagcacgaagtggcccggcgggtgcttgcgcaggccttccttgaccacggcgttgaggtacggcatcttgttgtccttgtccctcacgttccgctccaggagctcgtcgtcgccgccgcaggtggcgttgatctcggcgtagagcttctcctgcacggccgggttcttgaccagctcggccatgatccattgtagcccggtggaggtggtgtcggtgccggcgttgaggaactcggagcagagcgtgacgatctcgtcgtcggtgagggcgcggttgccctcctcgggaatcttgacgtcgaggagcgtgtccacgtacgagtgctggaacgtcgtctccctcgccggcgggaggccctggctggcgagcctcttgtactcccggcgaggcctcgatcagcggcacgaagagctccttctggcgccggcgcagcgcgtgcgcggcctcgaggcggccgcggaagaggtgcttggtgatccacgggaagaagaagaagacgctcatcctcctcgagatgtagagcagccacgcgcgctcggcctcctcgacgtcgcgcacggcgggctcgtcgaggcgctcgccgaagcacatgagcacgaggaggcagaacatggtgtactggaacgcctccatgacgttgggcgcctcctcgccggagccccgcagcttctccatcagcacgcggcgcacccagacgcgcgccggcgcgaactggtcgacgcgcgactgctgcagcgtctgcgacacgaggttgcggcggagcagccgccacatggcgccgtagttggcgcgggtgatgatgttgtcgctgacgccgaggagcgtgctggtggcggcctgcggccggtcggccagcttcgcgccggcggcgatgagcgccgcgtgcgccaggtgccgatccgccacgaagatggacagcctcgacccgatccggagcgtcacgacggggccgtacttcttgaacagcgtcagcaggaggggctcgacgtcggcggccgagtgccgcagccagagcaggttgccgaacagcggcaccgccggcgggccgggcgggaggcggcgccgcctcgacgacgccgcattgcggagcaggaagaggagcgggaggaggaggacgccggcgaggatgaccaggttatccat

SEQ ID NO: 5734 - DNA, 1269 bp, Oryza sativa
  Clone ID: PAT_MRT4530_12492C.1
tcaaacaagtaagtcaacggtgtcaaatattttgaaacggagggagcaaatgagcagtgagactctgattagtgcctgactcctcctgggcacaaggcgcggacgcagcggcttcgccatggcggtggtgaactcgagcttctcggcgaactccacctcgtcgccggccacctccttccactcgaactccatcaccatggatcccacgaagtactcgaggtgcatcacgccgacgttgagcccggcgcagatcctccgcccggcgccgaacggcatcatccggatctccctgctgcccgtcacgtcgaccccgtcgccgtcgccgccggcgaggaagcgctccgggatgaactccattggcttctcccattctctctcgtctcttccgatctctgccaccatgaagttcaccgtggcgcccttggggatgaggtacccgccgacgtctatgtcctccgccgccttgtgcggcagcagggtgtggctcggtgggtgcttgcgcaggccttccatgaccacggggttgaggtacggcatcttgttgtccttgtccctcacgctccgctccaggagctcgccgtcgtcgccgcaggtggcattgatctcggcgtggagcttctcctgcacggccgggttcttgactagctcggccatgatccattgtagcccggtggaggtggtgtcggtgccggcgttgaggaactcggagcagagcgtgacgatctcgccgtcggtgagcgagcggttgccctcctcggggatcttgacgtcgaggagcgtgtcgacgtacgagtgctggaacgtcgtctccctcgccggcgggaggccctggctggcgagcttcttgtactcccggcgagcctcgatcagcggcacgaagagctccttctgccgccgcagaagggcgtgcccggcctcgaggcggccgcggaagaggtgcttggtgatccacgggaggaagaagaagacgctcgtcttcttcgagatgtagagcagccacgcgcgctcggcgtcctcgatgtcgcgcacggcgtgctcgtggagccgctcgccgaagcacatgagcaggaggaggcagaacacggcgtgctggaacgcctccgttacgttgggcggcgcgtcgccgccgccgccgctgacgccggacgtcgtctcacgcagcttctccatgaggacgcggcgcgcccagacgcgcgccggcgtgaactggtcgacgcgcgactgctgcagcgtctgcgacacgaggttgcggcggagcagccgccacat

SEQ ID NO: 5735 - DNA, 403 bp, Oryza sativa
  Clone ID: PAT_MRT4530_12493C.1
atggcgagccgccacgtgtacccgcgcctcccctccccggccaatcgggaggcctcgtccctctgggatccacctcggcgagcgagcgagatggactccccgtcgcctatggcggcgcaggcggccgacctgtcgctgacgctggcgccgtcgggagggggtggtgggggaggaggaggcggcggcggtggtgggtcgtcgtcggcgtgcatcgacggcaaggacgtgcggctgttcccgtgcttgttctgcaacaagaagttcttgaagtcgcaggcgctgggcgggcaccagaacgcgcacaagaaggagcggagcatcgggtggaatccctacttctacatgccgccgacgccgcaccccgccggcaatgccgccgccgccgccgcggcggcgacgcccg

SEQ ID NO: 5736 - DNA, 112 bp, Oryza sativa
  Clone ID: PAT_MRT4530_12494C.1
gcgggagctcgcggcactgaacgggacaatgagggacgattattataaataggactgggggttataaaaatcaccatcagtactcttgccctaacatgacggaaacattcaa

SEQ ID NO: 5737 - DNA, 276 bp, Oryza sativa
  Clone ID: PAT_MRT4530_12495C.1
atggcggcggcgccggaggcggcggcggtgatgcccatggaggcctacttctcgccggcggagctcgttcgcattgcggggtacggcgaagagctggtgtcgacggtgatcgtgtccgggaaggtcgtctgcaagctctccctccgcccacccggctccgacctcctcagcatcgagctgccaggatttgttggtctagatgctgagaaatgtgaaatattgagaatgacacatgatgaagatgaacggcctgaaccagaacactttgatatgtga

SEQ ID NO: 5738 - DNA, 444 bp, Oryza sativa
  Clone ID: PAT_MRT4530_12496C.1
atggcggaagctctgggatttggatcgttggaagtggctgcagttgtggaagccctgggatttggattgtcggaagtggttgcaatggaggaagacatgggatttggatcgtcggaagtggcggcaatggtggaagacctgggatttggatccgaggcgacggcgaagaaggccaagaacacgacgaggaggatgcgccatcttcatctacttgcgaaagctgggtttctgattgcttggatgcccagagccatagtgcaaaaagccgaaccggccatcgaaccagtaaagcttctggttcaccggctcaccggtctgaccactgggtcgtccggctcgccaccatgggtcggcatccgcggcaccggcggtggtggcaacagcctaccgcagtgtggaccacacgtcatcgtagcagctggggacggggtgctctggcgctag

SEQ ID NO: 5739 - DNA, 546 bp, Oryza sativa
  Clone ID: PAT_MRT4530_12497C.1
ggatccccgggctgcaggttttttttttttttttttttttttttttaaccttaaatataatactactcccttcatttcacaatataagattttctagcattgcttatatacatatagatgttaataaatctatatacatatagatgttaatgaatctaaacacatatatatgaatatgaccaatgctagaaagtattacattgtgaaacggaggaagtacctccgtcccaaaatgttacaatatttaattatgaatctagacatattcatagctaaaaatgtttatatttttggactgagggagtataccgaagatatcaaccaaacagaaccgaacttcttcccattgtggaatttgcaatcttttctcctctctctgccatctcctttacggtggtgggaaaaagataacatcttgggaagaggagcgcagggcgcgtttttcgcggaggcggtggcgcaaaggcgaaactccgatcccatggccagagaaaaaaagcattgctggtagcgagagaaaagaagggaaacataaaagagggagga

SEQ ID NO: 5740 - DNA, 1803 bp, Oryza sativa
  Clone ID: PAT_MRT4530_12498C.1
gcacgaggccttcttgctcttgctgcgcgcgcgcgcgaggagaaacagagttggaggcgatggcggcggcgtcggcggcgaaggagctccacttcttgctggtgccgctggtggcgcagggccacatcatccctatggtggacctggcgcgcctcctcgccggccgcggcgcgcgcgtcacggtggtcaccacgccggtcaacgccgcgcgcaacagggcggccgtcgagggagcgcggcggggagggctcgccgtcgagctcgccgagatcaccttcaccggcccggagttcggcctgccggagggcgtggagaacatggaccagttggtggacatcgccatgtacctggctttcttcaaggccgtgtggaacatggaggcggcgctcgaggcgtacgtgcgcgcgctgcctcgccgcccggactgcgtcgtcgccgacgcctgcaacccgtggacggcggccgtgtgcgaacgcctcgccatcccgcgcctcgtgctgcactgcccctccgtctacttcctcctcgccatccactgcctcgccaagcacggcgtgtacgaccgcgtcgccgaccagctcgagccgttcgaggtgccgggcttccccgtgcgcgccgtcgtcaacacggccacgtgccgcggcttcttccagtggcccggcgcggagaagctggcgcgcgacgtggtcgacggcgaggccaccgctgacggcctgctcctcaacacgttccgcgacgtcgagggcgtcttcgtggacgcgtacgcgtcggcgctcggcctgagggcgtgggccatcgggccgacgtgcgccgccaggctggacgacgccgactccagcgccagccgtggcaaccgcgccgtcgtcgacgccgcccggatcgtctcgtggctcgacgcccggccgccggcgtccgtgctgtacgtcagcttcggcagcctcacgcacctccgggcgacgcaggcgatcgagctcgcccgcggcctggaggagtcggggtggccgttcgtgtgggcgatcaaggaggcgacggccgccgccgtgagcgagtggctcgacggcgaggggtacgaggagcgcgtcagcgacaggggcctcctggtgcgcgggtgggcgccgcaggtgaccatcctgtcccacccggcggcgggcgggttcctgacccactgcggctggaacgcgacgctggaggccatctcccacggcgtgccggcgctgacgtggcccaacttctccgaccagttcagcagcgagcagctgctcgtcgacgtgctccgcgtcggcgtcaggtcgggcgtcacggtgccccccatgttcctccccgccgaggccgagggcgtgcagctcaccagcgacggcgtggtcaaggcggtgaccgagctgatggacggcggagacgaggggacggcgaggagggcgcgcgccaaggagctcgccgcgaaggcgagggcggcgatggaggaaggcgggtcgtcgcacgccgacctgacggacgtgatcggatacgtctcggagttttcggcgaagaagcggcaggagagggacgccggcgagaccgcccagcagccgccgccatctccggcggagctcggagatattagcggcgacaaggtcgaagcagatcctgccttgtcagtacaatcgtagataatacagtgtgttactaggttactagattgatgatgatgtaattagcccacatttaggttgttacattattaattaatcacgaattcgaaaacatgtatacccattatcctcaacccccataacctactatcttcgtccttaaaaaaaaaaaaaa

SEQ ID NO: 5741 - DNA, 1401 bp, Oryza sativa
  Clone ID: PAT_MRT4530_12499C.1
gcacgaggtcttgccgttcccgcgccaccaaaccaaaccaactcttcgtcgtcgcgccgcttccgttcttccggcggccatggaggacgcagcagcagcagcaaggcggatggagaggcttgcctcccacctccgcccgcccgcttctcagatggaggaatcacccctcctgaggggctccaattgccgggcaaaaggtgccgctccgggtttcaaggtcgccatcttgggagcgtctggtgggattggccagcctcttgcattgctcatgaagatgaaccctcttgtttctgtgctccatctgtacgatgttgtcaacactcccggtgtcacagctgacattagccacatgaacactggtgctgtggtgcgtggtttcttgggccagccacagttggaaaatgcccttactggaatggatcttgtgatcattcctgctggtgttcctcgtaagcctgggatgacaagggatgatttgttcaacatcaatgccggaatcgtccggactctttgtgaaggaatcgcaaaatgctgccccaatgcaattgtgaatgtgatcagcaaccctgtcaattctactgttccgattgctgctgaggtttttaagaaagctgggacatatgaccctaagcgccttttgggggtgacgacacttgatgtagtgagagccaatacttttgtggcagaagttcttgggcttgaccccagagatgtaaatgtccctgtcattggtgggcatgcaggagtaacaatattaccactcctttcacaggtgaatcctccctgctcattcacctcagaagaaattagttatcttaccactcgcatacagaatggtgggacagaagtagtcgaggctaaagctggagcggggtctgcaaccctttcaatggcgtatgcagcttctaaatttgcagatgcttgcttgagaggattgcgtggcgacgctgggatagtggagtgctcttttgtagcttctcaggtgacagagctgcctttctttgcatccaaagtgcggttaggtcgctgtggcatcgaggagatcttatcacttggtccattgaatgaattcgaaagagctggactggagaaggctaagaaggagctggccgagagtatccaaaagggggtcgctttcatcaacaagtgaggccatcttggaatgccccaatttagttcaacatggaaatacacaggctgtgtctttgcttcctggggagtgggaagaacacttgtatcatcttgtctcaaatgtaaaagctgcctacacgatgtttatacagctgtagcagatgcaaaaacacaagtctgctaataaaagttgcttctgaataaaaaggaaccctgctctgatctctgccttgttaaaaaaaaaaaaaaaaaaaaaaaaaaaaaaaaaaa

SEQ ID NO: 5742 - DNA, 411 bp, Oryza sativa
  Clone ID: PAT_MRT4530_1249C.1
ttactgatgttcagccgcttgctcaggcagttcttccaggtgcactatcggctcagccgatggcatcgccattgacttctttgcagccgattccgcagcaagccttgatgaatcaatcggctgggcaataggctggacatgccctgaatcaggttgttccagaacatttagttcaccatatacagccagatggtacgacgatgcctcagattgtgccggagcacttggtacaaagtattcagccaaattaccagaattaccaaggaggcaatataaattatcaatatcagcctccttccccacaagttcagtatcagcaaggagggctaactcaacctcagtttgcttctcaatataatcagtttgaaccaatacggcaacagtcgcaaggagcagctcaacaacgaccat

SEQ ID NO: 5743 - DNA, 718 bp, Oryza sativa
  Clone ID: PAT_MRT4530_124C.1
ggcacaaaataaatatattattaaaatatattttatgttagatttaagggataagttcattctacacccccgaacttttcactatgtctagaaaacaccctccaactctaaaacataacatccaaacccctccaactttcaataccatgcagatgaccctcccaaagttgatttctacctggtttttgtccactaggatgccaactgtacaaagtagtgaggcccacatgtcagcacgttcgtcctcatcctcttcggctctttctcccctttttcatcttcccagcaaggacctccatgggtatgtgcagctccagcgagggcgagctcacaatcgtacccgtgttctccgagctcagcgaatttctgctcagggtctccgcatcgccgccattgcctgtcccaagctccatcttgggcgaaggcggtgttgtcacggcagccagggacagcgagtggccgccgcggaggagcagatggtcgatgtcgacgccgccggcgccgccgcagctgatggaggcatacccagcgcctcctcctccatgcgccagcaagctcaagctctggcttcccgccgtttccccgagcgccgcttcttgcccgtgccgcggccttcacccgagcacgtcgggcgcgccgcctccatgccggcgcggcttggtcttgaactttggaggatggcgtgggcctggatctcgacgccgacaatccctcgtgc

SEQ ID NO: 5744 - DNA, 1290 bp, Oryza sativa
  Clone ID: PAT_MRT4530_12500C.1
atggaggacgcagcagcagcagcaaggcggatggagaggcttgcctcccacctccgcccgcccgcttctcaggatcttacccttatagctatttgctttctactagtgataatggaggaatcacccctcctgaggggctccaattgccgggcaaaaggtgccgctccgggtttcaaggtcgccatcttgggagcgtctggtgggattggccagcctcttgcattgctcatgaagatgaaccctcttgtttctgtgctccatctgtacgatgttgtcaacactcccggtgtcacagctgacattagccacatgaacactggtgctgtggtgcgtggtttcttgggccagccacagttggaaaatgcccttactggaatggatcttgtgatcattcctgctggtgttcctcgtaagcctgggatgacaagggatgatttgttcaacatcaatgccggaatcgtccggactctttgtgaaggaatcgcaaaatgctgccccaatgcaattgtgaatgtgatcagcaaccctgtcaattctactgttccgattgctgctgaggtttttaagaaagctgggacatatgaccctaagcgccttttgggggtgacgacacttgatgtagtgagagccaatacttttgtggcagaagttcttgggcttgaccccagagatgtaaatgtccctgtcattggtgggcatgcaggagtaacaatattaccactcctttcacaggtgaatcctccctgctcattcacctcagaagaaattagttatcttaccactcgcatacagaatggtgggacagaagtagtcgaggcgtatgcagcttctaaatttgcagatgcttgcttgagaggattgcgtggcgacgctgggatagtggagtgctcttttgtagcttctcaggtgacagagctgcctttctttgcatccaaagtgcggttaggtcgctgtggcatcgaggagatcttatcacttggtccattgaatgaattcgaaagagctggactggagaaggctaagaaggagctggccgagagtatccaaaagggggtcgctttcatcaacaaaaagtcttacattgtgaaacggagggagtacatatcaagtaaccaagtgggttgttgctttcatggcaggagaaaacaatattatcttggaagcaaggttacttgttttgggtctgaacaacactgtgctcctaaatacagtataaacaagcctgcgtggttgggacatcaaactctcaagaaagcagcagcagcaaatgaccttcaatggcgacactga

SEQ ID NO: 5745 - DNA, 744 bp, Oryza sativa
  Clone ID: PAT_MRT4530_12501C.1
ccggccgggtgccgctccgggtttcaaggtcgccatcttgggagcgtctggtgggattggccagcctcttgcattgctcatgaagataaaccctcttgtttctgtgctccatctgtacgatgttgtcaacactcccggtgtcacagctgacattagccacatgaacactggtgctgtggtgcgtggtttcttgggccagccacagttggaaaatgcccttactggaatggatcttgtgatcattcctgctggtgttcctcgtaagcctgggatgacaagggatgatttgttcaacatcaatgccggaatcgtccggactctttgtgaaggaattgcaaaatgctgccccaatgcaattgtgaatgtgatcagcaaccctgtcaattctactgttccgattgctgctgaggtttttaagaaagctgggacatatgaccctaagcgccttttgggtgtgacgacacttgatgtagtgagagccaatacttttgtggcagaagttcttgggcttgatcccagagatgtaaatgttcctgtcattggtgggcatgcaggagtaacgatattaccactcctttcacagatcgatggaattttactacttttccccataggtgaatcctccctgctcatttacctcagaagagattagttatctcaccactcgcatacagaatggtgggacagaagtagtcgaggctaaagctggagcagggtctgcaactctttaatggcgtatgcagc

SEQ ID NO: 5746 - DNA, 412 bp, Oryza sativa
  Clone ID: PAT_MRT4530_12502C.1
cgcaatgccactgtttaatccactgttattgattaaaaagcatgaacctgttggtataaacttacagtagcgtaataaaagatgcaccgtagcacatgctacctttgagcaactagttcttgattatccgggttacaaaattctagcaagtgatttattcgggtggagtcgattgttttttagtgacattgagtcttacaagggaaaatgacagtgatgttctgtactgtttcaagtctcaacgcattttcgtctcgtctccttgagagtaatgtgttgatgtgctgtttgcggtggggatatttttcttgtcaaagtgttgagatttcctaatcttggttaattatttgataataaataaactgatctgatgtgtgttagtccgaaaagcaattaaaaaaaaaaaaaaaaa

SEQ ID NO: 5747 - DNA, 332 bp, Oryza sativa
  Clone ID: PAT_MRT4530_12503C.1
acccccaccaccgtcgccgccgccgccgactgagaagaggaagaggaagaggggagattcctgccgccgacgagaggtgggggggagtgggttgtgatcgtgaggagggctctcatccctagaggggcgagttgaaaggcggcaaagacggctagcgttgaagcggtcgggcgcggccacgcagctgcgccgcccacgcccagtgggggagccatcgcttctccggcgacggcgtccagcccagccccgcacggcggccgcggggcgcttccctcggccggcggcagcccctctgacctcctcttcctcgccggcggcggtcgcctctgaga

SEQ ID NO: 5748 - DNA, 684 bp, Oryza sativa
  unsure (1)..(684): unsure at all n locations
  Clone ID: PAT_MRT4530_12504C.1
gttacgccaagctcgaaattaaccctcactaaagggaacaaaagctggagctccaccgcggtgcggccgctctagaactagtggatcccccgggctgcaggaattcggcacgaggcaaaaccaaaaaacaaatgctccagcacttcatccatccttcatctaactagaagttatagcttaagtgattaggcagtaccacatgcgagcttaacaaaaaacaaaaagctccagcatatcatctatccatcatctgactagaagtgtagaagctaaacaaaccaaaaggctttaacacatgtgcgagctaaacaaagaagatgctcaagcacattcctcaacaatgttctcaggttggatgttctcgttaggctgggcattctcctcatgttggatgttattctcagattgtaatgcaccagcatcagttccagcttgtggtatccagttccctgatcaaccaaacaccacactgtgttcgctgaaggttcatttggaacaacatcagaggggnttcnanccnangttttcaagaaagnccganangntngcaaaaannnngnntgngtnggcccggcccaatgnnatttnnnaagngggnttgnnngggttngaggggannatngggnnnnngnnngnnnngggnnnnnngnaannngnnggnagggnggggannncggnnganng

SEQ ID NO: 5749 - DNA, 1533 bp, Oryza sativa
  Clone ID: PAT_MRT4530_12505C.1
atggcgccaaccacgaaccagagcagcgggtcggcgccactgaccgtgaacccggtggtgcagcgcgccgtcgtcggcgcgcagctgccgacgacgtcgccgtgccgcacgcccaagtcgccgccgccgtcgtacgggagcatcgtcaccgtgctgagcatcgacggcggcggcgtccgcggcatcatcccgggcaccatcctcgccagcctcgaggagaagctgcagaagctagacggcgccgacgcgaggatcgccgactacttcgacgtaatcgccgggacgagcaccggcgggctggtgaccgccatgctcaccgcgcccaacgaccagggccgcccgctcttcgccgccaaggacatcaacgacttctacctcaagcactgccccaagatcttccctcccagaagcattccaattgtgggattgttccagagcatggcggggccaaagtacgacggcaagtacctgcactcggtggtgcagtcgctgctcggcgataagcgagttaatgagacgatcaccaacgtcgtcatccccaccttcgacatcaagctcctccagcccatcaccttctcccgattcgacgcccagatcgatgtgtccaagaacgctctcctgtcggacgtgtgcatcagcacctcggcggcgccgacgtacctccccggccaccgcttccagaccaaggacaaggacggcaagccccgggaattcaacctcgtcgacggcggcgtcgccgcgaacaacccgacgctgttggcgatgacacacgtaagcaagcagatcctgctgggtaaacaggacgacttcttcccgatcaagccggcggactacggcaagttcatgatcctgtcgctgggcaccggcacggccaagatcgaggagaagtacgacgccgttcagtccggcaagtgggggatgatcaactgggtctaccacgacggctcgtcgccgctgatcgacagcttcagccaggccagcgccgacctcgtcgacatccacgcctccgtgctcttccaggcgctgcactgcgagaagagctacctccgcatccaggacgacgagctcaccggcgacacggcgtccgtcgacgtctccacgccggagaacctgaaccggctcgtcgacgttggcaaggcgctgctcaagaagcgggcgtgcaaggtgaacctcgagaccggcaagaacgagcccgacatgagcaggggcaccaacgaggaggagctggagaatttcgccaagatgctgtcggaggaacgcaaggccaggctccagaagaaggccttccttcagtaaacatggatgcacggacatgcatgcatatatgcatgtatcgaatactatttgtgtagcaaattccctccctgaaccaacagcataatcattagtcgtaacccatgcatgcattcgaacaggctatatttctattacatttgtactttaattttgttggaaaagttatactatgtaaactttgtttgtcgtatatctggaataaagtactacataatttaatttaaaaaaaaaaaaaaa

SEQ ID NO: 5750 - DNA, 1875 bp, Oryza sativa
  Clone ID: PAT_MRT4530_12506C.1
atgaatcgcgcggcgaggtcgaggtcgccggaggacgcgtcggtggcggcggcgcggaagctgcacctcctcctccgctcccgggacctccgcccggcgctctcctacctccgcaccctcccctcgccgctcaccctcctccccaaccacgccctcaacgccctcctccgcgcgctcgccgccgccggccgcgtccgcgccgccgccgccctcttccgccgcatcccttcccccacaccgcactccttcaactccctcctcgccgccctcctccgccgcggccgccgccgcgcggcctccgcgctcttcgccgcgctcctccgctccccctccgcctcccccgacgccgccaccctcaacaccctcctccacggcctttccaccgcatccccgcacccgtccactcccgcgctcctcaggctcttccgcttcttgcccgacacctacgccttcgcgccggacgccatctcgtacaactcgctgctctccgctctctgccgcgccggcgacgtgctcaccgcgcgcaagctgttcgacggaatgcgcgtcggaggagaagaaggcagaggagctgtctttcctaacgttatcacatacacgaccatgatcaaggcgtactgcgccaagaggctcgtgaacgaggctctcgcgatcttcaagctaatggttgcggatggtgtggcgccgaacaggatcacatacaacacgatggtgcaggggttctgcgatgccggcaggatggagctagtgaaggaggtgttggagatggactcgtttaggccggacacttgcacattcaacactctggtggccgtgcattgtagggaaggccggatcgaggatgctatgaaggtgtttaatcagatggtggagctccgtgtgagacgtgattctgcaagctatagcatggtcatccgggtgttgtgtgagaatggggaatttgggcaggctgaggagcttgtggatgagctcttggagaaggaggtgctcaagaagagagggggttgcacgccgctcattgcagcgtacaacccggtttttgtgtacttgtgtgagcatgggaagacaaagaaggcaaggatgctgtttgggcagctgctggaccggaggagcaaggtcgatgttcctgcattcaagacattgatccttgggcattgcagagagggtgatttcgaagaagggtatgcattgctgctctcaatgttgaagcgggatcttgtccctgatgatgaatgctacattgccgtgattgaagggttttcacagaggggaaggatgaagtttgcatgggaagccttgcacaggatgttgaatagcggtcttcggccaagcacaagtacttttcactcggttcttttggggcttttgaacaaagatggttgtgcaaaagaagcagctgatttgattgagataatgctagagaggaagattcgccaaaatgttgatctttcgacaaatttggtagatacattgttcaggaacaacctaaatgaccgtgcttacaagattgttacatctctatatgaccatggctattacatcaagatggaaaagttaatcgcaaacctttgcgaggaaaagaagttcatagaagctgcagattttactttgtttagcttggagaagtctcagaattttggtgtagccattccaagcatggttctggatggtctttgcatgactggtagagcttcagaagcattccggctgttctatgaactcattgagaacagaagtgctttggcttctgtcgctgcacctcgtagtttagttgcacttcatcatgcactggaggaatccgggaaaatgaaggaagctgattttattgctagacagatgagacgtgcaagtgccagaataagggaaagaatctag

SEQ ID NO: 5751 - DNA, 1308 bp, Oryza sativa
  Clone ID: PAT_MRT4530_12507C.1
ggagagagagagagagaactagtgacgaaaatcggattcggtgtaaagttaagggacctcagatgaacttattcctcataactaactatgaattccaagttctatgattcatgatccaaatgggcttcaaatttacaatgaaacaaccaagcatcaaaatacactgtaatgcctgcaaaaactgacagccgaatgacaccagggataaatttatacacaactactccatgagacggaagaagcttttagctgccaggcaagattaagcgccttctttctttgcaacccatgggcttctagaggaagccataatcataatcaatttcagcagcaattggaggcgatgtatggaccctcttggagtacagataagtcattttcaggtaaggacaacaagctatcagctcaaagcttgctgttttagcgtgatgttgagtatgccgataggggtttttggctggtaatgctcatcagtatcaacttcttcgatctcctgaacaatatcttgtccattgataacttgcccaaatacaacaagcttgtcattcaagtcaggaattggagcagttgtgataaaaagatcaaatcctttattattaggattcttcgtagtcccgatcatgaatgcctcgtgctttggacttagagcgttttctccactggctttggctttcagtatccattcctgggcagcaccattgaaatcgaaatcacccccttgaattacaaagtttttgatgacatgacgaaacggcattcctttaaaatggttactcttgcacaagctaacaaatctatccacaacatcagcagaagcatctttgtaaatttctatagtaattgagcctttggcagtatcaataaccgcatagcttggtctactagtcttcgtggaatcctcagatcttccaacatgctcagcacgagggagatccatttcagtctcgagcattggcctgtgatgccaatgcctgtaggtagcatagagggatagcgcaaccaagataacaattaggttccaagtaacgatagtggagtaactgatccgtgttggggccttcttcgtcttgctttgaattagcaattgcttcggctttatcctcgccatctgctattctactcgtgcaggacaacagcgctctctaggaagatcccacaatctggttggtacctggaggaagggaaggagccgccgcggtgcggttgcgggcgggatcccggcggcggcgacggcggcggtggcggcggatgaaggaatcggaggtggattggttgtgtttgaggttgggttggaaaagtagaaattgg

SEQ ID NO: 5752 - DNA, 753 bp, Oryza sativa
  Clone ID: PAT_MRT4530_12508C.1
atggcgaggataaagccgaagcaattgctaattcaaagcaagacgaagaaggccccaacacggatcagttactccactatcgttacttggaacctaattgttatcttggttgcgctatccctctatgctacctacaggcattggcatcacagctttacttgctttttgacttccttcactgatgagatacctcacaggccaatgctcgagactgaaatggatctccctcgtgctgagcatgttggaagatctgaggattccacgaagactagtagaccaagctatgcggttattgatactgccaaaggctcaattactatagaaatttacaaagatgcttctgctgatgttgtggatagatttgttagcttgtgcaagagtaaccattttaaaggaatgccgtttcgtcatgtcatcaaaaactttgtaattcaagggggtgatttcgatttcaatggtgctgcccaggaatggatactgaaagccaaagccagtggagaaaacgctctaagtccaaagcacgaggcattcatgatcgggactacgaagaatcctaataataaaggatttgatctttttatcacaactgctccaattcctgacttgaatgacaagcttgttgtatttgggcaagttatcaatggacaagatattgttcaggagatcgaagaagttgatactgatgagcattaccagccaaaaacccctatcggcatactcaacatcacgctaaaacagcaagctttgagctga

SEQ ID NO: 5753 - DNA, 1039 bp, Oryza sativa
  Clone ID: PAT_MRT4530_12509C.1
attctcaagtggtcactgttaggttccatcttatcaaatttgttacttgttcttggttcatcactcctctttggagggatcgttaatatcggcaaggagcgtccactagataaggacagttcagatagcagtagcagtgaagatgatgctacagacaaatcagttataggatttgccagtgcaatggtctggttgatagggatggccgtagtcactgctatgttgtctagttatgttgttactacaatagaggaagcatcagaatcaatgggtatccctgtcaggttcattagtattatcgtgcgacctattgttggaaatgcagcagagcatgcaggcgctatcatatttgccttcaagaacaaaatcgatatcagtctgggaattactcttggatcagcaactcaaatatcgatgcttgtggtaccagtcattctaattgtgtcctgggtgaatgccatccctatggatcttgacttcaaccttcttgagactggatcattggcaatggcagtaatcaccaccgcatttacacttcaggatgacaaatggcattacttgaagggtttgaatctagtattttcctatatcgtcatagcggtgtgctttttcgtcatgaaagctctcccaacgctaaaaaaggaagatgactaaatgtgttgttttgaaccgaatcaagagaccgatgagacgatgcatgcatgtgagttgaagactgtagctagatcggtgagctcctgatcaagctgttcatcatcatgacgggttcagctaattaatcagcaacaacagcagtgaatatatggtaggttcatctgaagcgacgggaacaagattactgatagatgttttgattgctttggtgttttcaggtgattagtgtagatttgggaaatgatcttgaggtattcgtaggatggtgtttttagtgtaaaccatttattgggtcaatgcgttatcttctttattaacgaaaggaggcagagcttctgcctttattttaacaaacaagatcacagtagccttggttcttttgcct

SEQ ID NO: 5754 - DNA, 632 bp, Oryza sativa
  Clone ID: PAT_MRT4530_1250C.1
ctcccagttgttctcaccaatagtgactaaagatctaggggtatatatattcccgatgcgcgccctcgtcttctccaccaacacgtagaagtttttttccccaatctcggcttctccttcgtcaccactgcctagggcatccccgcgccaacgccgccgtcatatatcgccgtcgtctcgcgggggtcgtcgtcgccgcctccgccgccgccgcatctctggtgtgagagccgccgccgcctctctctctctccaagccgccaccgccgacgtcgacacggccaaccccgactccgcctcccgccaatgccgaccccaacctcgatgcggccgccacgaacgcgaacgaacgtgaacgaaacgtgaatgaatcatgaacaaacgtgaatgaaacgtgaacgaaacgttaacgaacgtgaatgaaacgtgaacgaacgtgaatgaaacgcgaacgaacgtgaacgaaacgtgaatgaaacgtgaacgaacatgaatgaaatgtgaacgaaacgtgaacgaacgtgaatgaacgcgaacgaatgagatttgcatttagactaatacatttttttgtatgttgcaaaaaagatgtcgtcgtcgtcgtccctcaagccagagtggtagctagcccg

SEQ ID NO: 5755 - DNA, 252 bp, Oryza sativa
  Clone ID: PAT_MRT4530_12510C.1
atgacgtcgcttgaggcggcggcagagtgcagcacgggaggcggtggcagcaaggcgcagcacgggaggcggtggcggcagggcacagcgctggtggcggcggcggtagggcgcaacggcggggcggcgcgggacgccggcttgatcccgaaggggtcgccggcgatcacttgcggggtagtggtggccttccagtcgccaccagcactgtccctgaaccgcctcacgtttcccctccagcgccaatgttga

SEQ ID NO: 5756 - DNA, 228 bp, Oryza sativa
  Clone ID: PAT_MRT4530_12511C.1
atgggagacaatcttgatgaagtcatcgacaagcgtttgaatgcttcggaggagatacagaaacagaagaagagggtggccaaggcgtacaaccaaagggtgaaagcaaagttgtttcaagccggagacttggtctggaagacaattttgcctttgggcactcgatccaggagagttcgagagggccggtctgaccgccatgtgttggccggtcagatcaccgggtga

SEQ ID NO: 5757 - DNA, 298 bp, Oryza sativa
  Clone ID: PAT_MRT4530_12512C.1
acgaagacgcgtgagctggtcattccattgaagcaccaaaaactatgagctgcacattctagtgagccatcaatggtgctggggcacaaaatgtaggctatgctgaacgtaacaagtgctacgagacactgctgtgtataacacaagaaggtgaacggtgcactcatgcttatgtgtacactaattcttacgcgcagaccgatttatgcgcacacgaagactcacacagtgtgctatatagtgacagatgatgatatgtttgcagcgcttgctaatgatggctaattggatatctaca
